United States Patent Application Publication US 2024/0301379 A1 - sequence listing, part 8

SEQ ID NO: 15326 - protein, 1217 aa, unidentified
  REGION 1..1217: note = Cas Enzyme sequence
MKRILGIDTGTNSLGWAVVERNDNNTYRLIRKGSLIFQEGVKIEKGIESSKAADRTSHRALRKHYFRRRLRKIEVLRVLVKLGWCPKLTDEQLHLWHTKKQYPNSEAFMAWQRTNENLEQNPYYYRHVCLHDKLDLNNEAEAYILGRALYHLAQRRGFLSNRLDASEEDENGTVKTEINKLSEEIEEAGCQYLGDYFYKLYSENGNNVRIRNRYTDREAHYKKEFYAICKTQELSEQQIKALEKALYFQRPLKSQRQGVGKCTFEKGRQRCADSHPAYELFRMLTFLNNVKVKGPHDIEFRPLNNDEYEKALPMFYRKSKANFDFEDIAKAIAGKGNYQYFKDEGEKPYKFNYRMSQGVSGCPTTSRLREIFGEDYAQGIAEVYSKGAGKTPEQMVNDVWNVLYSFSDNNKLMQWGIENLQLNKEQAEKFSKIKLTRNFASLSLCAISKIIPWLEQGLSYSHAVSMAKIPDIVGKAIWEEHKDSITKELIDLITNFDPKDESMQGTLDYCIKDYLKNNFELKAGATDKLYHPSMIETYPDAKPNANGIYQLGSPRTNAVRNPMAMRSLHQLRKVINELLKEGTIDQNTEVHIEYARQLNDANKRWAIGDWNKSQEKKKKEASDEIKKLYKEATGKDIEPTQDDITKYLLWEEQKHLCIYTNESIGITDFIGSNPSFDIEHTIPRSMGGESVMSNLTLCASWYNRDVKKAKMPSQLNKKDYEAILERISHWKEEIERLRKEKDKLRTHSGMAKDVKDRLIRKRHLKDIELKYWQDKYNCFLLKEAPEGFARRQGAGIGLVGKYAGLYLKTVFHKKDDRTKTNVRTIKGSTTAEFRKMWGIQDEFEKKSRDNHIHHCIDAIVIACIDTGSYNEVARYYQQLEEYERTKDNKPSFPKPWTTFTEDILALKDEMLVVHSTQDNMPKHAKKRVRIAGKKLIAKGDAARGALHNDTYYGAIERDGEIKYVVRRALSSFEKESDLENIVDDAVKDIIKKAVAEKGFKKALSEDIFMNESKGIKIKKVRCYAKSVKKPLNIRKQRDISNKEYKRQYHVQNESNYLLAIYEGEIKGKVKRGYELVKNIEAAEFYKASTSKGDYPSIVPEKDEKGLPLKHILTIGKHVLLYESSASEIDFKDIHDLSKRLYKITGLSYLPVGKGFGNIVMRHHQEARASSEIKIKNGAYKNNEEYRPSILMLHTQFHALVEGEDFIITPLGDIKPIH

SEQ ID NO: 15327 - protein, 1536 aa, unidentified
  REGION 1..1536: note = Cas Enzyme sequence
MEKIILGLDEGTNSIGWALVKINRELKKGNIEGIGSRIIPMDEGILGKFDSGVTVSQTAERTRYRGTRRLVQRFLLRRERLHRVLNVLGFLPKHYSDSIDFDKRFGQFKPDREEKLPFYKNEKGNNQFLFLENYQEMLCEFKLKYPDLKQVPYDWTIYYLRKKALTEKISKEELAWILLNFNQKRGYYQLRGEEQEENKNKLEEFHTLTVINVVEREKGKSGIWYNITLENGWIYKRESKVELFDWVGTQKNFIVTTELNDDGTIKLDKENHEKRSFRSPKAEDWGLVKIRTEQTINQSGKSVGCFIYEHILKNPQQKIKGELVRTIERKFYRDELSKILQTQIEFHGTILKDRNLYKKCIDELYRHNDAHKENIKDRGFEYLFLEDIIFYQRPLKSKTSLISDCSLESRPIKDKNGGLVKDVNGIQILKPLKCIAKSNPIFQEFRLLQFVKNLKIFKRGILNDIDVTDEFLKSEADILELLNWLNDKAEVSQKQFLAYTNFKLKEDKYRWNYVEDKIYPCNETRNQFLNAIAKIDVDKSFFDAKNTQDLWHILYSVTDKTEIIKALTSFSIRHNLPEAFIVNFSKIKPYKKEYGSYSEKAIKKLLTLMRFGIHWDENIIDPKTLLRIDKILTGEFDYNIKNRVREKAIHLNSLKDFKGLPLWLTSYIIYDKHSEASDNSKWKTPADIEHFLKHDFKQHSLKNPIVEQVITETLRVVKDIWQHYGDGKENFFDEIHIELGREMKNNASERKRITNTINQNENTNLRIKAILTELKNDGVYDVRPFSPSQQEILKIYEEGIYSSEKNKEKLEEVDKIRKNAKPSTNEINKYKLWLEQGYVSPYTGKLIPLSDLFTTKYQIEHIIPQSRLFDDSLSNKVICESEVNELKSNMTAFEFIRKNEGRIITLTGGKTVKIFTIDVYNKHITGYYSKNKSKQKRLLSEEIPEKFIERQLNDTKYISKIVKSLLSKIVREDDEQEVTSKNVIPLNGSITSKMKQDWGLNDVWNKIVTPRFERLNSINNSNDFGKLEFKKDEFGNIGKQVFQTTVPDDIAKGFSKKRIDHRHHALDALVIACVNRTHINYLNNLNAKDEEDKTIKHELRNKLCFKTKADANGNYKWAFHKPWENFTKNAEDELNQTIISFKQNIRVINKSVNKYQVWKEEDGAFKKITAKQVNGDNWAIRKPLHAETVSGKVFLKRIKQSPISISNAIEQVEFIVDKAVKKQLKEKIKLYTNNAEGLKKHLKSFPILIDGKEIDKVEIYEIVGGENGATATRKTLDNSFDEKRIEKITDTGIQKILLNHLKQEIYQNAIDENGKKDPAHEVAFSENGLDLLNKNIIALNNGKKHQAIIKVRVFEEGGKFSLGQIGSKADKYVEAAKGTNLFFAIYQDENGKRNYKTIPFNEIIERQKQGLGAALEIDENGNNLLFTLSPNDLVYIPYEDEIENLKPFIFDKFSKEQTERVYKFVSCTSSQAFFVKNSYASRIIDNENGSMNKNERMLEIGKSNTIYDENKKPVMIKAVCWKLIVNRLGIIEKVIR

SEQ ID NO: 15328 - protein, 1396 aa, unidentified
  REGION 1..1396: note = Cas Enzyme sequence
MKRILGLDLGTTSIGWALVNEAEKDNETSSIIKLGVRVNPLTVDEKINFEGGKPISTNADRTLKRGARRNLDRYQMRRENLIQILKENNCVTDDTPLTEIGKNTTHQTLFLRAKAAREMIDLEDLAKVLLAINKKRGYKSSRKTKEESDGVAVDGMAVAKILYEQKLTPGQYVHDLLKSSKKHIPDFYPSDLKAEFAALWKNQKQFYAELLTDDLFQELQNKNSGKTWTICSKPFGIVGKYLKGSKDEQRLLKFEFRKKGLSEQLDLEQLAIAFQEINNDINGTSGYLGKISDRSKILFTDKITVGEYMYDQIRKNPHTLLKNQVFYRQDYLDEFEQIWSTQAALYKQLTEILKSEIRDVVIFYQRPLKSQKGLLSHCLFESWEEEYYDEVKKKTRRRTVGHRVIPRSSPLFQQFKVWQNINDLEFKYIGKNIDGLAKENITIEKKLVRLKIDQEDRDLLFAEANSKANSKGKISSTEVLKILGLSSKEWKSNFKEGINANTTSQKLLDVYQNIAHREGYGHDWNSKSATEIWIELKIVFKDIGIDPSILEFDPLTVGNEYSNQKSLELWHLLYSAGDDHKIEEEDQLIYGNQDVALRKKLHLKYGFKPEYAKMLSNLSFPNDYGSLSSRAIRKIIPHLIEGHDYYEACDLAGYNHSNSLNKEENDTRELTTHLELVSKNSLRNPVVEKILNQVVNLVNQVIDNYGKPDEIRIELARELKKSTEERKQMTQYINTATKLNLDIAKTIQKDFGFTPTKNDVVKYKLWEELSTRGYKSIFSEQCIHKEDLFSKKIDVEHIIPKALVYDDSFSNKTLAYREVNLKKSNRTAMDFISQDKISDKEAYKERVEAWYDKGKGKITRAKRDKLLKASVDINEGFIERDLRNSQYIAKKSRTLLEKVCRTVTPTTGMITDKLRDEWGIINVMKELNLPKYRALGLVEVEERKHGKVVEKIKDWTKRNDHRHHAMDALAVAFTTVSHIQYINNLNARRNTLHEKHKTILSIESKITEMIEGSNGKNKRIYKKPFPGFRNESKKHLETILISFKTKNKVVTKNINKTKKEGGFNRTESLTPRGQLHKETVYGKSLTPESKATALNKRFAFAKAKYIIDYNQKKLILNYLKKYNNNPEIAFDGKTLKKEALLWHGKPLKEVLCFKEIFTIRKDVAPDLKIDKIIDEGTREILRARLKEYGNNAKEAFSNLDINPIWQNKQKGIAIKKVTITGVANAEPLHHKKDHLGHDIMIDEETVAADYVSLGNNHHVAIYKDPQGKLHEQVVSLFEAVTRSNHKLPVIDTSYRQEEGWEFLFTMKQNEMFVFPSEDFDPKEIDLMDEKNRKLINPHLFRIQKIGRKDYWFRHHYETEVTNNVDFAYKRINSTVHLEKIIKVRTNHIGQIVQIGE

SEQ ID NO: 15329 - protein, 1403 aa, unidentified
  REGION 1..1403: note = Cas Enzyme sequence
MKKILGLDLGTASIGWALVNEAQNEKKDSSIIKTGVRIIQYDTFNKVDKLGNVSESKNPTEDFTSGKGLSPNAKRTKQRGARRTLDRYQDRRDRLIALLKRSRILEESTVLTEVGKHSTHSLWQLRAQAAAEEIALSDFARVLLAINKKRGYKSNRKTIDEGDGQVIDGMDVAKKLYEEQITPGQYALGLLNQGRKQIPHFYRSDLEAEFDQVWKCQKEHYPARLTEDLREELKGKKKEHTRKICEAHFGIEGRKRTTKGRDQKIENYRWREMGLTEKIDLEQLTIVLQEINKETSDSSGYLGAMSDRSKQLIIKDQTIGQYLYSQLKQNPHTPLKNQVFYRQDYLDEFERIWEIQSEHRKTILTDELKSEIRDLIIFYQRRLKSQKGLISICEFEGKEHEIIVDGEKKIRVIGPRVIPKSSPLFQEFKIWQILNNLKFRNNVENQEVKIVDFDEDLSIRNRLFDELNIRGKLTDKKALNHIFSNPKDWELNFETVEGNRTNEALYKAYQKIVETSGHEVDDKDLKRGISQVFDMLGIKKEILDFDADLSGQELEKQPAYQLWHLLYSYQGDSSSKGNQGLLEKLKTAFGFDQEYAQHLVNVTFQDEYGSLSTRAIRKILPFLREGREFSDACRQAGYNHSNSLEKEENEKRELASHLKMIPKNSLRNPVVEKILNQMVNVVNAVIDQYGRPDEIRIELARDLKKSSKEREEMTKDIADFTKRHETIRKKINELPPFNSGVRITRNDILKYKLYEELESNGYKTLYTNTPVPLRKLFTMEFDIEHIIPQATLFDDSFSNKTLAARKINLDKGSKTAYDFLQEKYGEDSDKFRAYLARIEKLLKDGKIKKAKYRKLLMKGDEIPDDFVERDLRNTQYIAKKALQMLHTIVRTVTPTTGSITNKLREDWQLINVMQELNWEKFEKQGLTTTETNKHGEPIKKIANWSKRNDHRHHAMDAIAVAFTKPSHVQYFNYLNARKNERHEKHKYIDGIEKKETYRNDKNKLLINPPIALVQFRAEAKRHLEGTLISFKARNKVFSRNKNRAKGLDIPQITYTPRGQLHEETIYGQSAFVVSKEEKPGPKFDEEKIKSVAKKEHREALLNRLAEFGDDPKMAFAGKNSPTKNPIYLDGNQSKKLPEKVKLMEFQNQFTIRKPISSELKIDKVVDLGVKRILQTRLDKYGGDAKKAFVNLEENPIWLDKENGISIKRVTITGASTAKSVHQKKDHHGNEILNETGEPMPTNYVKYGNNHHVAIYQNAQGKLQDDIRSFFEVVARKNEGLPVIDKRHNADLDWEFLFTMKRNEYFIFPNKEMGFDPNEIDLTDESNYAKISPNLFRVQKLSKVTYGNSSVREYVFRHHLETTVEENKALKNIAFRNIKSLQHLVGIVKVRINHIGQIVKVGEY

SEQ ID NO: 15330 - protein, 1072 aa, unidentified
  REGION 1..1072: note = Cas Enzyme sequence
MSPQAKAKIKGTGCVWSFDLGLGSIGEAVRDAETQQFKHVASLILPADFANTKEQSAVRRMHRTRLAHKQREAWLDKVWREAGQEPLAKRTVHRNAKTRKFELKHPGDPRLEREFPAQGDKTTYTSCLLRIKLLQGEKLEPWQVYKALHSAIQRRGYDPNIPWKDGERGEKKAKSEEQQEYQSRLTQFAAELQSMTKDKARQLPCYFDAWKMGLWDPAKPKALRERIDHLAESPRGQIIPRTIVEEEIRQLVRAAGKQIPGLAGKEDYVLYGPAGRAYASWYPELRRAHKLRLGSHTDTQGVLSQRIPRFDNRIISKCALIPRLNVCKIVAEGPTKPTPQTKVVFDATFLLRLKNMRAANPDGTQTALSAEQIRTIFEDPARKSWSMSKTDWKKACKAFGLAPLLAQREVAEPKTSGRSRFCRPALDIVARLILSGKSPAEFHAEEVKRLGGNTDPRKGLVKLDLDFLLKMGESWAKIHVPDQQLDAILQLSEDPEAAARTIIGQQNNPVVRHRLDLFFKRLCLLRERFGEPDSVAVEFVREDFMGAEARSEYRAFVKKQTEKRAEAQAAAKKAKLKGKAAPLKLQLLEEQGGICLYTGESLEIKKIDQYEIDHIVPRSRMGPDAPYNRVLTTHRTNSDEKGNRTPFEWLGGSAQWPEFLKRVEAAQKNIRGKKARLLIAPDAEELVQKYSTLAETAWISRLARAILDATFGWRNGIDRNGRKRVIFVQGGLTARVRRKYRLNSILAPAPAGADPYFWEQVAEKNRADPRHHALDAMVLSFIPQWAGDPNKEDFLRFPAALGKDPRKIFAAVLDATAAVRVAMEKPALAETIYGARKQGPQGLSVKRHELFALGMKQTAPGKVSFDLPQLRKQLVAIRDPAIRELVHAEAKKNLTEEKWRKFCDTFRLPGAGGKPGPRVRKVNMTEGTLEEYADLSKDGTGAYRKAIKGHKGQVLYCSKDGERFGVEPIYAHASVIKTVEAIKSTPGVKVLAVVQTGCLVSLKEEVSKHDHKAIVVVDKKQQRIAPKRPLEAGTYIWCTIQTASGQAVLAGRDGSRYAVHLRTLSAAGMKRI

SEQ ID NO: 15331 - protein, 914 aa, unidentified
  REGION 1..914: note = Cas Enzyme sequence
GNTTKVAIKEALNNNDLAKHLLQFEIKVKKVNQSDNSNTYLIDNDSGEITKEEGRLIVDNNIVNEPLYQIWHVIYSIRDINKCKYVLVKKWGLDEITAEKLAKIDFTKSSYGNKSIKALRKILPYLMKGYKYSDAASFAGYNHSKSLTKEEIIEKKLLDKIPLLPKNVLRQPVVEKILNQMIHIINDIIDENRGWITREERDKGKFEIRIELARELKQSREERNETYKNLSRIEKENKEIERRLEELGVRATRKNIIKYRLFSEISENKINATCIYTGKMFSLTDALNGNEIDVEHIIPKSILFDDSQSNKTLTFSYINKEKGDRTAYDYMASKGEEELSKYIERVDQLFKNKIINKQKRDKLLMPANNIPKDFIERQIRESQYISRKSREILNQICKNVWVTGGGVTAYLRRIWGWEDILMHLQLKRIKELIPDPVGEKITEIVEWETEDGQIHHKEVIRNWNKRNDHRHHAIDALVIACTKQGYIQRINTLSAKTTRDEIFKEVSQRNTDFRESLSLLDKYFITQKPFTSSQVEEKVNKVIISIKPGKKVATYGKRFIRKNDKRIIVQDHIIVPRGALSEESIYGKIKILDQKKPVKYLFKNTHLIFKPYIKELVEQRLSEYNGDAKKALASLKNNPIYLDNKNRKVPLEYASCFKEEYVIKYPIKSITEKDIEYIVDKKVREIISQRLKQYSGNTEEAFKEPVYLNNEKKIPIKTVRMFTKLSAVEVLKYDENGKPIAYVKTGNNHHIAIYQDEDGKKIPHLCTFWHAVDRKKYGIPVIIDNPKSVWDKILSSKENYPQSFLIKLPDQNWKFIQSFQQNEIFYISPDNKDDINIDNIEPFNLYRLQKISMKKGKKIDLWFRQIFETETNDSENYSLIKKFYNAQSISRIETLNPIKIKVNRLGEIEAIDLK

SEQ ID NO: 15332 - protein, 1197 aa, unidentified
  REGION 1..1197: note = Cas Enzyme sequence
VQAERIGMKTLGIDLGTNSLGWAVINATGVENTGVLVFEEGVNREQSDSLETPAAARRAKRMARRLRFRRKLRRRLILKILIENGMCPLTPNELKMWSQTGSFPKDNAAFLNWLKSTDTDNPYSDRAAAASGKVAPEVLGRAIFHISQRRGFKSGRKDQPEEGEEKSAAAKELEGMKGEIAALTAELEKSGLTLGQYFYEEIKHGNKVRKRHTGRIEHYQKEWAKIAKAQGLSKDLTDKIDKTLFWQRPLREQSFLVGKCPLEPKRKRAQIGHPEFEAFRALSFVNNIRWGRDGSPSRPSLPLAAEQRAVALACFIRKTPFDFKVIHKALEKQFPELKGAAFNYEDNVSLSPSKVTAALKERLPDGADLQKAFDALTFFDDNEKLQIWAQKQLGLSGEQSASFVKIRIPEGRAGYSLHAIRKINRFFRKGTELSEAIFLAKLPEVIPDFDTKEDGIVAKVHEHNELYRENKRDAYRDTRTENRVGVLSLEKRLASWLEADYGIHTEVFRTLYFRDPKADSSYADVRSGGTVLPPVNLGMIRNPLVQRSMTMLRKLVNELRRKGVIDAETRIHIELARDVNSRNDRMAIQAWQKQNEEARQKAKAKLQEQGIDNPADDLVLKYVLAEEQDWACPYTGRKINIEALVKGGFDIEHTLPRSRSGDDSQANKTLCDIAFNRDIKKDRMPSELPNHDEIVTHLRPWLNKIDELKTLKEKQAKIAKSTSKENPEARSKARQKMLVTKLELKYWEDKYHRFTKETDDVTPSFISRQLVDTGIMTRHAVALLKTVYPDVYPVNGQAVAFARKLWKVQGEDEIKDRSDHTHHAKDALVIAALSRERFQKICAELKTDDERKNPKFNVAPPFPDFAQTVFNITQGILVKHVTRHNGLKQTYYKKPRRLSGLTKGKDGNPVTRKPAAGNTVRGQLHEETFYGKIKRPGHAEPVCVIRKALASCSEKDVAAIVDDVIRKCVQDKLAQLGGDFKKAIVQDVFAMASGVPIRKVRVFVTPHTSLNEIRRHTATPSMHDYKRPVYACTAAGSNLGIAVYKVPLRTQPDFIIEKLLDAVRNAVPPAPNGAELLGRILPGAMALARLECGGLPPLSESGCVLPYSKTLIYKVRKFDKNGITLWFHREARAKKDLEADLKTAQKNSSGSSSVDYEHPHEVLCLNLRKAWNSFLFEGIHFKMGLDGRIEYLTGVEK

SEQ ID NO: 15333 - protein, 987 aa, unidentified
  REGION 1..987: note = Cas Enzyme sequence
MTMTFCLGIDYGEKYIGFSVVEQTAEGNIPRFLGTMEVQRKPIETTLDSRALARRARRTRKTKRRRLKRLGAAFLSLGLPSKQADELLRYCSGRGFGHPAKEDQEQDQKEMPFAISRDEFLTALTQEIKRLIASEDQERVLAVCRRHLRREIRPMRVENRKPSKCAWEGCDRNVRRAKNAKRERLQQALFAWLTDIIRRRESPAQLWQALESWIDRALASPKRVPFKALYTLVPEPAFQKHKAVYEKNIRDILQGESAGRTRFCCEHSNVYIQYVVTGRTIPTKTDFSPADVGRIEQKIFTDLWRYLEARVLPLVGQIDEIVVERVAFDVLRGYHPDRKQDKSINEAEAYKHYQQGPAYGFQDRREMLTKEFDGRCAYCGKRSPLTEVEHLLPQSRFPFDAYLNIVPACPACNARKGSRTAAEAGMTIHDDAYEAYGKYVGKRKIDGFRARHPYHDTKKGLLNRMRHAGSALDAEQALAMILSDLTHIGNSQRVPRPLARYLAQCIETRTGKPCAIRAQSGRLTALYRTIMLPEYAKDHGDDYNHAIDAAILACKVPSFGAWSAPLRRVSQSHACRWRERVLKASPLLFEKRPAVPADAILEIIPGFETLLPGGYVRVRLSSFNWNKKNQATCKLDPVGTNRLTGKDQKQASAAEFHKELKDLIALVAKEAAAPPEVEAETALPEEGSGKQKKRKKKPALKMLEQSIRKVTSSGLRTYLLADMLHADVRLLEHLRASINTEGMGTHPNDLNRRRLLDDFRAGKNDEIPQMGISLTKAGGNFTVPRKTDSQRLGRFQAAHSSLQCLYVGYQCEKGVLEEKLVIFKLNRIFQVTEPKVKVPNDSPLVTGRPLGSQEKEADFSARWVAAFRDYCRTQGIERVERVTQGCVIERGDGSRFYVQNLDLSKNSLTPAALRDIKNVFRSPLCAAVVNKQAKQLSNSVPRDHASGNVAAAQETQETKQPNIEAVEANDAEEVGATRTTGCSHDWR

SEQ ID NO: 15334 - protein, 1427 aa, unidentified
  REGION 1..1427: note = Cas Enzyme sequence
MKKILGLDLGTSSIGWALVNEAETSEEKSSIIKLGVRVNPLTVDELQNFEKGKSITTNADRTAGRSMRRNLQRYKLRRENLIEVLKEYNFITDEMILSENGNRTTFETYRLRAKAAVEEISLEQFARVLLMINKKRGYKSSRKAKGAENGTLIDGMEVAKKMYDEGITPGELCLQLLTAGKRYFPDFYRSDLQAEFDRIWNFQKQFYPDSLIDKVKDEVRGKNKSQTWAILAKYFVWKEVENSWNEEEAQTRRVEKEYRLVGIKRGVKREELKLENFQWRVKALSERMNPEELAIVLQEINEQISNSSGYLGAISDRSKELYFNRQTVGQYQMAVLDNNPNIGLRNMVFYRQDYLDEFNTIWEKQAEFHKELTEDLKKEIRDIVIFYQRRLKSQKGLINICEFERRQIEVEIDGKKKIKTIGSRVIPRSSPLFQEFKIWQTLNDIEVSVLGVKNKRKKQDDNSTTLLDSAENIDSLKLNVSRPLDADEKSLLAKELFIRDKLTKSDVLKLLFNNPQNLNLNFKNIDGNRTGSALYQAFSKILEISGHESINFKKSADEIVEQVKTIFSALGWNTEVLCFDSEKELDKQPYFKLWHLLYSFEGDSTPTGDGNLIQKIADLCGFEKDYASILANITFQEDYGSLSTKAIRKILPHLKDGNQYDVACEYAGYKHSKSSLKKEEIKNKVLKDKLELLPKNSLRNPVVEKILNQMVNVINAIITTYGKPDEIRIELARELKKNAKEREELTKSIVDTTKTHEGIRAILQNDFGMSHVSRNAIIRYKLYEELKDNGYKTLYSNTYIPKEKLFSKDFDIEHIIPQARLFDDSFSNKTLEVKSINIEKGSKTAYDFVEEKYGEQGLQEYLNRCEVLFRDKKTKLRKLKMQESEIPEGFIDRDLRNTQYIAKKALSMLNEICRRVVATTGAITDELREDWQLVDVMKELNWEKYKVLGLVEYFEDNDGRLIGRIKDWTKRNDHRHHAMDALTVAFTKDVFIQYFNNKNASLKPDTNEAAIRNKYFQNGKAIPPMSLDEFRAEAKKHLNDTLISIKTKNKVVTINLNRTKKKNGINKKQQQTPRGQLHLETVYGSHKQYVVKEEKVNASFDAAKIATVNKPAYRDALLRRLQENGNDSKKAFTGKNSLDKQPVWLDAKQNECVPEKVKTVMLETVYTVRKPIDEKLNVDKVVDARIRKLLQDRIKEYGNAKSAFANLDENPIWLNKEKGITIKRVSVSGISKAQSLHEKKDKDGNFILDKDSRRIPVDFVNTGNNHHVAIYRKPVLDKKGQAVFDENGELKFELEEVVVSFFDAVTRVNLSQPIIDKDYKRSEGWKFLFSMKQNEYFVFPNEKTGFDPKEIDLLNPENYALISPNLFRVQKIASKDYVFRHHLETVVADRKELQEITWKRISSLSILNRIIKVRVNHIGQIVMIGEY

SEQ ID NO: 15335 - protein, 1248 aa, unidentified
  REGION 1..1248: note = Cas Enzyme sequence
MKRILGLDMGSASIGWAIIEEDGNVIKIIALGSRIIPYNGTEGQDFVKGAGETRDALRTKNRTARKGYDRYQLRRKYLVDVLVKNDMMPDESLKCLSKMQLWELRNKAVTEYVSKQELGRILLWLNQKRGYKSSRSEANLDKKDTEYVAAVKCRYEMIKEKNLTIGQCLYNELCSNEYFRIKENVFPREAYIEEFDKICEKQKKHLGLTDELIARIRNEIIYYQRPLKSQKGLVAVCDFEGFYEKTDGKERFVGPKVAPKSSPLFQLAKIWESVNNIKLSTISGENVELTLEEKKKIIHHLDNNGKLTSIELFKILHKNKKDFIVPRQLEKGIQGNIVKVAIIKILGEKYSELLKFDLTVIEEIGRCGYLYDKKTGEVLNEKTLKCVDSKVEKEPYYQLWHTIYSINDVQECSNALQKGIIIAGKAKDGDEVRVKIDKETADKLAAIDFNKLGFGNKSAKAIRKILPYLMEGDKYSEAMSYAGYDHSVSWTRDENLRRGLLDKLKPIAKNSLRQPIVEKILNQMVNLVNAIIEKYGKPDEIRIELARELKQSKDERNAADLKMSKRQRENEIIASRLEEYGLRATKNNITKYRLYEEIENQGGKLNAICVYCGQPISRTEAILGREVDVEHIIPKSKLFDDSQSNKTLAHRRCNSFKNDMTAYDFMKTKPKQEFDAYVERVGRLYSKNMISRAKRDKLLMSEDEIPDNFIDRQLRESQYIAKKTREILQTVCCNVWATSGTVTAELRHLWGWDDITMNLQMHKYKELGLTETVVWESEHGKRKHSKEVIKGWTKRDDHRHHAIDALIIACTKQGFIQRFNTLNASKTREDMQSEIEKSSVEYKEKLTLLEKYIISQCPLSVEDVKNAVSQILVSFKSGKKVAVWGKRRVYKNGKREVVQDKIIVPRGALSEQFVYGRIRAVGKEKKMLKYLFNNSHLISNSHIKTLVEQRLNQYGNDIEKALASVKDNPIYLDADKTNMLEYGTCFEEKFVMKYNVDVNFTKTEKVVDEKIRNILQTRLQKFGGKSKEAFKDVQYEEKSLKWYEDEKLERPIHSVRCFTGLSAVVPIKKDEYGNEIGFVKPGNNHHIAIYVDKDGNKIEHVCTFWHAVERKKYGIPVIIKDTNDVWDKIWQQPDCTYPQSFLEQLPTVNLEMELSMQQNEMFVLEMAQEDVKVAIENNDYKTISEHLYRVNSLSSSDYYFYHHLETKKDIKNTDAKESKRYFRFKSVKALFLHNPVKVKIDCLGNIIQ

SEQ ID NO: 15336 - protein, 1433 aa, unidentified
  REGION 1..1433: note = Cas Enzyme sequence
MKKILGLDLGCNSIGWALVNEAENTEEISSIIKLGVRVNPLTVDEMQNFEKGKSITTNADRTLKRSMRRNLQRYKLRRDTLIEVLKEHGFITDSTLLSEHGNKTTFETYRLRAKAAVEEISLEKFARVLLMINKKRGYKSSRKAKGSEDGVLIDGMDVARKLYEEGLTPGELCLQILEAGKKNLPDFYRSDLQNEFDRIWNFQKQFNPELFCDAVKEEVRGKNRSQTWAILAKFFVWSEKESVWNEKEARTEERVKEYKLVGLKRDTKGNELKLENYRWRVQALSEQLNPEIVAIVLQEINGQISASSGYLGAISDRSKQLYFNRQTVGQYLMSELEKDPNVSLRNRVFYRQDYLDEFDRIWEKQAEFHEELTVELKKEIRDIIIFYQRRLKSQKGLISFCEFEKREVVVEEDGRKKNKTVGCRVIPRSHPLFQEFKIWQTLNDIEVFAWDKQSKRKKADKSSILFDNSEDALLVEGKRFLYQEEKELLAKELFVKESMKKAEVLKLLFENYQELDLNFKQIDGNHTGFALFSAYSKMIEKYGYEPVDFKKSADEIIEKLETIFTNLGWNTELLSIDLSKEDKELERQSYFRLWHLLYSFEGDNTPTGNGKLLEKIMQLCDVEKEYAVELANVSFQEDYGSLSAKAIKKILPYLKEGNQYDVACDYAGYRHSKSSLTKDEIENKILKDKLEILPKNSLRNPVVEKILNQMVNLINTLIDTYGKPDEIRVELARELKKNAKEREELTKSIARNTREHDEIRQLLRTEFGMMNVSRNDIIRYKLYEELKDNGYKTLYSNEYIPREKIFSKEIDIEHVIPQARLFDDSLSNKTLEYRAINIEKGNKTAYDFVKEKYGDDGLEKFLNRCETLFKDKRTKLRKLKMEETDIPEGFIDRDLRNTQYISKKAFAMLNEISRRVVATTGSITDKLREDWQLVDLMKELNLPKYEKLGMVEMFEDKDGRKIKKITDWTKRNDHRHHAVDALTVAFTKDVFIQFYNNKNAAWMPASKEHANITGIKARYFENGKALAPMPLAQFRAEAKRHLENLLVSIKAKNKVITSNVNRTKNKNGENRKLQQTPRGQLHLETVYGSHRQYATKIEKVNAAFDVTKIATVSKLAYRNALLKRLEAFGNDPKKAFTGKNTLEKNPLYLDENQTEMVPEKVQTVEFETVYTIRKPIDPNLSIDKVVDVKIRSVLEKRLKEYGGDAKKAFVNLDENPIWLNEAKGISIKRVSIRGISNAQSLHEKKDKDGNLILGKEGRKIPVDFVNTGNNHHVAIYKKPVLDKVGQIVLDEEGNPKYELDEVVVSFFDAVTRANLGQPIIDKDYRRSEGWQFLFSMKQNEYFVFPNAKTGFNPKEVDLLNPENYALISPNLFRVQKFAYKNYVFRHHLETTIKDTSSTLKGITWTDFRSSKGLDKIVKVRVDHIGQIVSIGEY

SEQ ID NO: 15337 - protein, 1433 aa, unidentified
  REGION 1..1433: note = Cas Enzyme sequence
MKKILGLDLGCNSIGWALVNEAENTEEISSIIKLGVRVNPLTVDEMQNFEKGKSITTNADRTLKRSMRRNLQRYKLRRDTLIEVLKEHGFITDSTLLSEHGNKTTFETYRLRAKAAVEEISLEKFARVLLMINKKRGYKSSRKAKGSEDGVLIDGMDVARKLYEEGLTPGELCLQILEAGKKNLPDFYRSDLLNEFDRIWNFQKQFNPELFCDTVKEEVRGKNRSQTWAILAKFFVWSEKESVWNEKEARTEERVKEYKLVGLKRDTKGNELKLENYRWRVQALSEQLNPEIVAIVLQEINGQISASSGYLGAISDRSKQLYFNRQTVGQYLMSELEKDPNVSLRNRVFYRQDYLDEFDRIWEKQAEFHEELTVELKKEIRDIIIFYQRRLKSQKGLISFCEFEKREVVVEEDGRKKNKTVGCRVIPRSHPLFQEFKIWQTLNDIEVFAWDKQSKRKKADKSSILFDNSEDALLVEGKRFLYQEEKELLAKELFVKENMKKAEVLKLLFENYQELDLNFKQIDGNHTGFALFSAYSKMIEKYGYEPVDFKKSADEIIEKLETIFTNLGWNTELLSIDLSKEDKELERQSYFRLWHLLYSFEGDNTPTGNGKLLEKIMQLCDVEKEYAVELANVSFQEDYGSLSAKAIKKILPYLKEGNQYDVACDYAGYRHSKSSLTKDEIENKILKDKLEILPKNSLRNPVVEKILNQMVNLINTLIDTYGKPDEIRVELARELKKNAKEREELTKSIARNTREHDEIRQLLRTEFGMMNVSRNDIIRYKLYEELKDNGYKTLYSNEYIPREKIFSKEIDIEHVIPQARLFDDSLSNKTLEYRAINIEKGNKTAYDFVKEKYGNDGLEKFLNRCETLFKDKRTKLRKLKMEEKDIPEGFIDRDLRNTQYISKKAFAMLNEISRRVVATTGSITDKLREDWQLVDLMKELNLPKYEKLGMVEMFEDKDGRKIKKITDWTKRNDHRHHAVDALTVAFTKDVFIQFYNNKNAAWMPASKEHANITGIKARYFENGKALAPMPLAQFRAEAKRHLENLLVSIKAKNKVITSNVNHTKKKNGENRKLQQTPRGQLHLETVYGSHRQYATKIEKVNAAFDAAKIATVSKLAYRNALLKRLEAFGNDPKKAFTGKNTLEKNPLYLDENQTEMVPEKVQTVEFETVYTIRKPIDPNLSIDKVIDVKIRSVLEKRLKEYGGDAKKAFVNLDENPIWLNEAKGISIKRVSIRGISNAQSLHEKKDKDGNLILGKEGRKIPVDFVNTGNNHHVAIYKKPVLDKVGQIVLDEEGNPKYELDEVVVSFFDAVTRANLGQPIIDKDYRRSEGWQFLFSMKQNEYFVFPNEKTGFNPKEVDLLNPENYALISPNLFRVQKFAYKNYVFRHHLETTIKDTSSTLKGITWTDFRSSKGLDKIVKVRVDHIGQIVSIGEY

SEQ ID NO: 15338 - protein, 1433 aa, unidentified; identical to SEQ ID NO: 15337
  REGION 1..1433: note = Cas Enzyme sequence

SEQ ID NO: 15339 - protein, 1455 aa, unidentified
  REGION 1..1455: note = Cas Enzyme sequence
MARVLGLDLGTASIGYSLRDTDKGANITEQLVRFGSIIFQRGVGNSKTGEFSYAAERTKHRASRRLYQARRYRIWETLATLIEFGFCPLSIEDLDRWRVYDKARNLKRRYPIDAANFEQWVRLDFDGDGKSDYSSPYQLREELAIVQLDFSQEINRFKLGRALYHIAQRRGFKSSKGETLKEQEDAVKDDIANEMSLESVSLKKSEEKKSKDLASYMEENALHTAGCAFAQLEREGVRVRASKYQAVRSQYKEEIKYIFEFQNGLDIDGDFFKRIYSDRKDGCIFYKRPLRSQKGLVGKCTLEPAKSRCPISHPEFEKFRAFAFINNIQYRRTTEDEWLNLTAEQKLKLYNDKFLQAKPSFKFEVIRKWIEKEIGLLQDYHLSKEKRTINYSDRTNVTGCPVSGRMKALLGENWEEYKQESDKIRKNRNGKEHVVSYMMEDIWHVCFSYDDEEAVSEFAKSLKFDDKQVKQFLNLWIAIPQGYAMLSLKAIRNINRFLVPKRNNPLYKGYIYTEAALLGKMPEILGEKQWADNEKSILGAINGWINQNREEKRILNIVNNLISAYKSLEYAEQFAYKNIEYQLDDSDKEDIEKYTIEAFGQKSWEKETLEMKDKVLKDVERMYQQFFVTSKRDYFRLPKLGDTIKLYLSNNFPEFYCANSFGESQTGLQCRCAACKKLNKLYHPSMVEFYKPANEQEFEYDGVMLSKKLLANPVIGAFKNPMAMRTLHQLRNLINYFIKEGLVEEDTRIVVETARDLNDANMRWAIEEYQREREKENKAILEAIKELKGEEKNNDDIDKARLLIEQNPEYLFNKDRYEVESGDGTNNKKKKAMGKATDFLYKKDVAKYRLWLEQGMQCIYTGKTISVSELFDENKTDFEHTIPRSKSFDSSLANLTVCDAYYNRHIKKNCIPTELPNYEEIEHRLQPWKKKVEQLKNNVEFWRQKSRQAQTKDAKDKAIRQKHLWQIELDYWQDKLSRFTMTEVTSGFKHSQLNDTRLITKYAYHYFKSVFSKVEVQKGLVTADFRKMLGVQSADEKKDRDKHSHHAIDATILSLIPVAAKRDKILELFYKIQEEKKLYFNTEYWEKELQKEIRSCQIGNISSLPDYIEENILINHISKDQTLVPAKRKMRTRGKVIWQRDEDGQICMDKDGYRMPKHWIKGDCIRGKLHGDSFYGAIKQSKKKGEKDYLTSYEDISYVIRRELKYKKTPTDKGFKDLDDLHLSIVDEGLFNIIKQQCDGKSFKEACDDGFYMLNRDGDKVNKIRHIRCYTSVKKPLAIKRQSYLSDKEYKQSYYAEVGDLYAMCKYCNADKTKVRYEVINLFDITENRRYGYNIAEVLEDDKKKEKYYLVAVLQAGKQVILYKNDDELESIIEMSNDKLSDRLYVISGFESPYRIILKKHICAKSDSELGKGGSIKSFNELPDKIRQSVNATNYLLEDIDFYISPDGLITFKND

SEQ ID NO: 15340 - protein, 925 aa, unidentified
  REGION 1..925: note = Cas Enzyme sequence
EFEEFRALSFVNNIRVIDGEMRNPLTPEQHAVAVDCFNRKTPFDFKAIRKKLEKQCKELKEAEFNYEDNVSLTPSKITASLEEILPSIGGAERQKAFDALTFFDDNEKLNVWAQKHFGLSQEAADKFVKIRIPEGRAAYSLYAIRKINRFLRKGVELSEATYLAKLPDIIPEFDAKEDEIIAKVHEHHELYRENKRVAYRDTRTENRIGVVPLEKRLGSWLQDEYGIDAKKANLYFRDPRADSSYASLTKEEKTGVERGILPKVNLGMIRNPIVQRSMTMLRKLVNELRKKGDIDADTRIHIELARDVNTHNDRIAIQEWQKQNEKKRAEARTKLQEHGFTDPADDLVLKYILAEEQNWTCLYTGRNISMKELIEGGFDIEHTIPRSRSGDDSQANKTLCDATFNRNIKKGLMPSELPNHDEILTYIRPWLNTIEELKKLRAKQSKAVKSVPKDNPEARARARQRLLVTKLNLKYWEDKYHRFTKRPDEITPSFINRQLVDTGIMTRHAVALLKTVYENVHPVNGQAVAFARKLWKVQGEDAVKDRTDHRHHAKDAMVIAALSRDRFHKICAELKADDERKNPKVAVEPLFAGFAQTVFETTQDILVKHVTRHNELKQTKRKSIRLSSPKKTRIGTITRAPTGGDTVRGQLHKDTFYGKIRKPGETETVCVVRKDLNSSNFPDEKALKKIIDPAVCKAITDEIARRGGEFKKAMDAAVEEGTFKLPGERGAIIKKVRIEAVVTNPRALREQTATPSKHPYKNSVWVQAADNSNFRISVYEQHNDPVVFVTENLLDHVQGKILSPTDGFRGYIYPGTMAIAYKYEGEWNEDGFDYRNRLYRVVKFAQKRVTLRYHCEARRMTELQNDLAESGKNKKGESSIDFDTPHELLLLSEKKVQESFLFEGIDFKMGLDGTITFIDRRRYSK

SEQ ID NO: 15341 - protein, 1433 aa, unidentified
  REGION 1..1433: note = Cas Enzyme sequence
MKKILGLDLGCNSIGWALVNEAENTEEISSIIKLGVRVNPLTVDEMQNFEKGKSITTNADRTLKRSMRRNLQRYKLRRDTLIEVLKEHGFITDSTLLSEHGNKTTFETYRLRAKAAVEEISLEKFARVLLMINKKRGYKSSRKAKGSEDGVLIDGMDVARKLYEEGLTPGELCLQILEAGKKNLPDFYRSDLQNEFDRIWNFQKQFNPELFCDAVKEEVRGKNRSQTWAILAKFFVWSEKESVWNEKEARTEERVKEYKLVGLKRDTKGNELKLENYRWRVQALSEQLNPEIVAIVLQEINGQISASSGYLGAISDRSKQLYFNRQTVGQYLMSELEKDPNVSLRNRVFYRQDYLDEFDRIWERQAEFHEELTVELKKEIRDIIIFYQRRLKSQKGLISFCEFEKREVVVEEDGRKKNKTVGCRVIPRSHPLFQEFKIWQTLNDIEVFAWDKQSKRKKADKSSILFDNSEDALLVEGKRFLYQEEKELLAKELFVKESMKKAEVLKLLFENYQELDLNFKQIDGNHTGFALFSAYSKMIEKYGSEPVDFKKSADEIIEKLETIFTNLGWNTELLSIDLSKEDKELERQSYFRLWHLLYSFEGDNTPTGNGKLLEKIMQLCDVEKEYAVELANVSFQEDYGSLSAKAIKKILPYLKEGNQYDVACDYAGYRHSRSSLTKDEIENKILKDKLEILPKNSLRNPVVEKILNQIVNLINTLIDTYGKPDEIRVELARELKKNAKEREELTKSIARNTREHDEIRQLLRTEFGMMNVSRNDIIRYKLYEELKDNGYKTLYSNEYIPREKIFSKEIDIEHVIPQARLFDDSLSNKTLEYRAINIEKGNKTAYDFVKEKYGNDGLEKFLNRCETLFKDKRTKLRKLKMEEKDIPEGFIDRDLRNTQYISKKAFAMLNEISRRVVATTGSITDKLREDWQLVDLMKELNLPKYEKLGMVEMFEDKDGRKIKKITDWTKRNDHRHHAVDALTVAFTKDVFIQFYNNKNAAWMPASKEHANITGIKARYFENGKALAPMPLAQFRAEAKRHLENLLVSIKAKNKVITSNVNRTKNKNGENRKLQQTPRGQLHLETVYGSHRQYATKIEKVNAAFDAAKIATVSKLAYRNALLKRLEAFGNDPKKAFTGKNTLEKNPLYLDENQTEMVPEKVQTVEFETVYTIRKPIDPNLSIDKVVDVKIRSVLEKRLKEYGGDAKKAFVNLDENPIWLNEAKGISIKRVSIRGISNAQSLHEKKDKDGNLILGKEGRKIPVDFVNTGNNHHVAIYKKPVLDKVGQVVLDEEGNPKYELDEVVVSFFDAVTRANLGQPIIDKDYRRSEGWQFLFSMKQNEYFVFPNEKTGFNPKEVDLLNPENYALISPNLFRVQKFAYKNYVFRHHLETTIKDTSSTLKGITWTDFRSSKGLDKIVKVRVDHIGQIVSIGEY

SEQ ID NO: 15342 - protein, 1433 aa, unidentified
  REGION 1..1433: note = Cas Enzyme sequence
MKKILGLDLGCNSIGWALVNEAENTEEISSIIKLGVRVNPLTVDEMQNFEKGKSITTNADRTLKRSMRRNLQRYKLRRDTLIEVLKEHGFITDSTLLSEHGNKATFETYRLRAKAAVEEISLEKFARVLLMINKKRGYKSSRKAKGSEDGVLIDGMDVARKLYEEGLTPGELCLQILEAGKKNLPDFYRSDLQNEFDRIWNFQKQFNPELFCDTVKEEVRGKNRSQTWAILAKFFVWSEKESVWNEKEARTEERVKEYKLVGLKRDTKGNELKLENYRWRVQALSEQLNPEIVAIVLQEINGQISASSGYLGAISDRSKQLYFNRQTVGQYLMSELEKDPNVSLRNRVFYRQDYLDEFDRIWEKQAEFHEELTVELKKEIRDIIIFYQRRLKSQKGLISFCEFEKREVVVEEDGRKKNKAVGCRVIPRSHPLFQEFKIWQTLNDIEVFAWDKQSKCKKADKSSILFDNSEDALLVEGKRFLYQEEKELLAKELFVKESMKKAEVLKLLFENYQELDLNFKQIDGNHTGFALFSAYSKMIEKYGYEPVDFKKSADEIIEKLETIFTNLGWNTELLSIDLSKEDKELERQSYFRLWHLLYSFEGDNTPTGNGKLLEKIMQLCDVEKEYAVELANVSFQEDYGSLSAKAIKKILPYLKEGNQYDVACDYAGYRHSRSSLTKDEIENKILKDKLEILPKNSLRNPVVEKILNQIVNLINTLIDTYGKPDEIRVELARELKKNAKEREELTKSIARNTREHDEIRQLLRTEFGMMNVSRNDIIRYKLYEELKDNGYKTLYSNEYIPREKIFSKEIDIEHVIPQARLFDDSLSNKTLEYRAINIEKGNKTAYDFVKEKYGNDGLEKFLNRCETLFKDKRTKLRKLKMEEKDIPEGFIDRDLRNTQYISKKAFAMLNEISRRVVATTGSITDKLREDWQLVDLMKELNLPKYEKLGMVEMFEDKDGRKIKKITDWTKRNDHRHHAVDALTVAFTKDVFIQFYNNKNAAWMPASKEHANITGIKARYFENGKALAPMPLAQFRAEAKRHLENLLVSIKAKNKVITSNVNRTKNKNGENRKLQQTPRGQLHLETVYGSHRQYATKIEKVNAAFDAAKIATVSKLAYRNALLKRLEAFGNDPKKAFTGKNTLEKNPLYLDENQTEMVPEKVQTVEFETVYTIRKPIDPNLSIDKVVDVKIRSVLEKRLKEYGGDAKKAFVNLDENPIWLNEAKGISIKRVSIRGISNAQSLHEKKDKDGNLILGKEGRKIPVDFVNTGNNHHVAIYKKPVLDKVGQVVLDEEGNPKYELDEVVVSFFDAVTRANLGQPIIDKDYRRSEGWQFLFSMKQNEYFVFPNEKTGFNPKEVDLLNPENYALISPNLFRVQKFAYKNYVFRHHLETTIKDTSSTLKGITWTDFRSSKGLDKIVKVRVDHIGQIVSIGEY

SEQ ID NO: 15343 - protein, 1433 aa, unidentified
  REGION 1..1433: note = Cas Enzyme sequence
MKKILGLDLGCNSIGWALVNEAENTEEISSIIKLGVRVNPLTVDEMQNFEKGKSITTNADRTLKRSMRRNLQRYKLRRDTLIEVLKEHGFITDSTLLSEHGNKTTFETYRLRAKAAVEEISLEKFARVLLMINKKRGYKSSRKAKGSEDGVLIDGMDVARKLYEEGLTPGELCLQILEAGKKNLPDFYRSDLQNEFDRIWNFQKQFNPELFCDAVKEEVRGKNRSQTWAILAKFFVWSEKESVWNEKEARTEERVKEYKLVGLKRDTKGNELKLENYRWRVQALSEQLNPEIVAIVLQEINGQISASSGYLGAISDRSKQLYFNRQTVGQYLMSELEKDPNVSLRNRVFYRQDYLDEFDRIWEKQAEFHEELTVELKKEIRDIIIFYQRRLKSQKGLISFCEFEKREVVVEEDGRKKNKTVGCRVIPRSHPLFQEFKIWQTLNDIEVFAWDKQSKCKKADKSSILFDNSEDALLVEGKRFLYQEEKELLAKELFVKESMKKAEVLKLLFENYQELDLNFKQIDGNHTGFALFSAYSKMIEKYGYEPVDFKKSADEIIEKLETIFTNLGWNTELLSIDLSKEDKELERQSYFRLWHLLYSFEGDNTPTGNGKLLEKIMQLCDVEKEYAVELANVSFQEDYGSLSAKAIKKILPYLKEGNQYDVACDYAGYRHSRSSLTKDEIENKILKDKLEILPKNSLRNPVVEKILNQMVNLINTLIDTYGKPDEIRVELARELKKNAKEREELTKSIARNTREHDEIRQLLRTEFGMMNVSRNDIIRYKLYEELKDNGYKTLYSNEYIPREKIFSKEIDIEHVIPQARLFDDSLSNKTLEYRAINIEKGNKTAYDFVKEKYGNDGLEKFLNRCETLFKDKRTKLRKLKMEEKDIPEGFIDRDLRNTQYISKKAFAMLNEISRRVVATTGSITDKLREDWQLVDLMKELNLPKYEKLGMVEMFEDKDGRKIKKITDWTKRNDHRHHAVDALTVAFTKDVFIQFYNNKNAAWMPASKEHANITGIKARYFENGKALAPMPLAQFRAEAKRHLENLLVSIKAKNKVITSNVNRTKNKNGENRKLQQTPRGQLHLETVYGSHRQYATKIEKVNAAFDAAKIATVSKLAYRNALLKRLEAFGNDPKKAFTGKNTLEKNPLYLDENQTEMVPEKVQTVEFETVYTIRKPIDPNLSIDKVVDVKIRSVLEKRLKEYGGDAKKAFVNLDENPIWLNEAKGISIKRVSIRGISNAQSLHEKKDKDGNLILDKEGRKIPVDFVNTGNNHHVAVYKKPVLDKVGQMVLDEEGNPKYELDEVVVSFFDAVTRVNLDQPIIDKDYRRSEGWQFLFSMKQNEYFVFPNEKTGFNPKEVDLLNPENYAMISPNLFRVQKFTYKNYVFRHHLETTIKDTSSTLKGITWTDFRSSKGLDKIVKVRVDHIGQIVSIGEY

SEQ ID NO: 15344 - protein, 1433 aa, unidentified
  REGION 1..1433: note = Cas Enzyme sequence
MKKILGLDLGCNSIGWALVNEAENTEEISSIIKLGVRVNPLTVDEMQNFEKGKSITTNADRTLKRSMRRNLQRYKLRRDTLIEVLKEHGFITDSTLLSEHGNKTTFETYRLRAKAAVEEISLEKFARVLLMINKKRGYKSSRKAKGSEDGVLIDGMDVARKLYEEGLTPGELCLQILEAGKKNLPDFYRSDLQNEFDRIWNFQKQFNPELFCDTVKEEVRGKNRSQTWAILAKFFVWSEKESVWNEKEARTEERVKEYKLVGLKRDTKGNELKLENYRWRVQALSEQLNPEIVAIVLQEINGQISASSGYLGAISDRSKQLYFNRQTVGQYLMSELEKDPNVSLRNRVFYRQDYLDEFDRIWEKQAEFHEELTVELKKEIRDIIIFYQRRLKSQKGLISFCEFEKREVVVEEDGRKKNKTVGCRVIPRSHPLFQEFKIWQTLNDIEVFAWDKQSKCKKADKSSILFDNSEDALLVEGKRFLYQEEKELLAKELFVKESMKKAEVLKLLFENYQELDLNFKQIDGNHTGFALFSAYSKMIEKYGYEPVDFKKSADEIIEKLETIFTNLGWNTELLSIDLSKEDKELERQSYFRLWHLLYSFEGDNTPTGNGKLLEKIMQLCDVEKEYAVELANVSFQEDYGSLSAKAIKKILPYLKEGNQYDVACDYAGYRHSRSSLTKDEIENKILKDKLEILPKNSLRNPVVEKILNQMVNLINTLIDTYGKPDEIRVELARELKKNAKEREELAKSIARNTREHDEIRQLLRTEFGMMNVSRNDIIRYKLYEELKDNGYKTLYSNEYIPREKIFSKEIDIEHVIPQARLFDDSLSNKTLEYRAINIEKGNKTAYDFVKEKYGNDGLEKFLNRCETLFKDKRTKLRKLKMEEKDIPEGFIDRDLRNTQYISKKAFAMLNEISRRVVATTGSITDKLREDWQLVDLMKELNLPKYEKLGMVEMFEDKDGRKIKKITDWTKRNDHRHHAVDALTVAFTKDVFIQFYNNKNAAWMPASKEHANITGIKARYFENGKALAPMPLAQFRAEAKRHLENLLVSIKAKNKVITSNVNRTKNKNGENRKLQQTPRGQLHLETVYGSHRQYATKIEKVNAAFDVTKIATVSKLAYRNALLKRLEAFGNDPKKAFTGKNTLEKNPLYLDENQTEMVPEKVQTVEFETVYTIRKPIDPNLSIDKVVDVKIRSVLEKRLKEYGGDAKKAFVNLDENPIWLNEAKGISIKRVSIRGISNAQSLHEKKDKDGNLILGKEGRKIPVDFVNTGNNHHVAIYKKPVLDKVGQVVLDEEGNPKYELDEVVVSFFDAVTRANLGQPIIDKDYRRSEGWQFLFSMKQNEYFVFPNDKTGFNPKEVDLLNPENYALISPNLFRVQKFAYKNYVFRHHLETTIKDTSSTLKGITWTDFRSSKGLDKIVKVRVDHIGQIVSIGEY

SEQ ID NO: 15345 - protein, 1433 aa, unidentified; identical to SEQ ID NO: 15342
  REGION 1..1433: note = Cas Enzyme sequence

SEQ ID NO: 15346 - protein, 1013 aa, unidentified
  REGION 1..1013: note = Cas Enzyme sequence
VGCRVIPRSHPLFQEFKIWQTLNDIEVFAWDKQSKCKKADKSSILFDNSEDALLVEGKRFLYQEEKELLAKELFVKESMKKAEVLKLLFENYQELDLNFKQIDGNHTGFALFSAYSKMIEKYGYEPVDFKKSADEIIEKLETIFTNLGWNTELLSIDLSKEDKELERQSYFRLWHLLYSFEGDNTPTGNGKLLEKIMQLCDVEKEYAVELANVSFQEDYGSLSAKAIKKILPYLKEGNQYDVACDYAGYRHSRSSLTKDEIENKILKDKLEILPKNSLRNPVVEKILNQMVNLINTLIDTYGKPDEIRVELARELKKNAKEREELAKSIARNTREHDEIRQLLRTEFGMMNVSRNDIIRYKLYEELKDNGYKTLYSNEYIPREKIFSKEIDIEHVIPQARLFDDSLSNKTLEYRAINIEKGNKTAYDFVKEKYGNDGLEKFLNRCETLFKDKRTKLRKLKMEEKDIPEGFIDRDLRNTQYISKKAFAMLNEISRRVVATTGSITDKLREDWQLVDLMKELNLPKYEKLGMVEMFEDKDGRKIKKITDWTKRNDHRHHAVDALTVAFTKDVFIQFYNNKNAAWMPASKEHANITGIKARYFENGKALAPMPLAQFRAEAKRHLENLLVSIKAKNKVITSNVNRTKNKNGENRKLQQTPRGQLHLETVYGSHRQYATKIEKVNAAFDVTKIATVSKLAYRNALLKRLEAFGNDPKKAFTGKNTLEKNPLYLDENQTEMVPEKVQTVEFETVYTIRKPIDPNLSIDKVVDVKIRSVLEKRLKEYGGDAKKAFVNLDENPIWLNEAKGISIKRVSIRGISNAQSLHEKKDKDGNLILGKEGRKIPVDFVNTGNNHHVAIYKKPVLDKVGQVVLDEEGNPKYELDEVVVSFFDAVTRANLGQPIIDKDYRRSEGWQFLFSMKQNEYFVFPNDKTGFNPKEVDLLNPENYALISPNLFRVQKFAYKNYVFRHHLETTIKDTSSTLKGITWTDFRSSKGLDKIVKVRVDHIGQIVSIGEY

SEQ ID NO: 15347 - protein, 1433 aa, unidentified
  REGION 1..1433: note = Cas Enzyme sequence
MKKILGLDLGCNSIGWALVNEAENTEEISSIIKLGVRVNPLTVDEMQNFEKGKSITTNADRTLKRSMRRNLQRYKLRRDTLIEVLKEHGFITDSTLLSEHGNKTTFETYRLRAKAAVEEISLEKFARVLLMINKKRGYKSSRKAKGSEDGVLIDGMDVARKLYEEGLTPGELCLQILEAGKKNLPDFYRSDLQNEFDRIWNFQKQFNPELFCDAVKEEVRGKNRSQTWAILAKFFVWSEKESVWNEKEARTEERVKEYKLVGLKRDTKGNELKLENYRWRVQALSEQLNPEIVAIVLQEINGQISASSGYLGAISDRSKQLYFNRQTVGQYLMSELEKDPNVSLRNRVFYRQDYLDEFDRIWEKQAEFHEELTVELKKEIRDIIIFYQRRLKSQKGLISFCEFEKREVVVEEDGRKKNKTVGCRVIPRSHPLFQEFKIWQTLNDIEVFAWDKQSKRKKADKSSILFDNSEDALLVEGKRFLYQEEKELLAKELFVKESMKKAEVLKLLFENYQELDLNFKQIDGNHTGFALFSAYSKMIEKYGYEPVDFKKSADEIIEKLETIFTNLGWNTELLSIDLSKEDKELERQSYFRLWHLLYSFEGDNTPTGNGKLLEKIMQLCDVEKEYAVELANVSFQEDYGSLSAKAIKKILPYLKEGNQYDVACDYAGYRHSKSSLTKDEIENKILKDKLEILPKNSLRNPVVEKILNQMVNLINTLIDTYGKPDEIRVELARELKKNAKEREELTKSIARNTREHDEIRQLLRTEFGMMNVSRNDIIRYKLYEELKDNGYKTLYSNEYIPREKIFSKEIDIEHVIPQARLFDDSLSNKTLEYRAINIEKGNKTAYDFVKEKYGDDGLQKFINRCEALFKDKKTKLRKLKMEEKDIPEGFIDRDLRNTQYISKKAFAMLNEISRRVVATTGSITDKLREDWQLVDLMKELNLPKYEKLGMVEMFEDKDGRKIKKITDWTKRNDHRHHAVDALTVAFTKDVFIQFYNNKNAAWMPASKEHANITGIKARYFENGKALAPMPLAQFRAEAKRHLENLLVSIKAKNKVITSNVNHTKKKNGENRKLQQTPRGQLHLETVYGSHRQYATKIEKVNAAFDAAKIATVSKLAYRNALLKRLEAFGNDPKKAFTGKNTLEKNPLYLDENQTEMVPEKVQTVEFETVYTIRKPIDPNLSIDKVVDVKIRSVLEKRLKEYGGDAKKAFVNLDENPIWLNEAKGISIKRVSIRGISNAQSLHEKKDKDGNLILDKEGRKIPVDFVNTGNNHHVAVYKKPVLDKVGQMVLDEEGNPKYELDEVVVSFFDAVTRVNLDQPIIDKDYRRSEGWQFLFSMKQNEYFVFPNEKTGFNPKEVDLLNPENYAMISPNLFRVQKFTYKNYVFRHHLETTIKDTSSTLKGITWTDFRSSKGLDKIVKVRVDHIGQIVSIGEY

SEQ ID NO: 15348 - protein, 1433 aa, unidentified
  REGION 1..1433: note = Cas Enzyme sequence
MKKILGLDLGCNSIGWALVNEAENTEEISSIIKLGVRVNPLTVDEMQNFEKGKSITTNADRTLKRSMRRNLQRYKLRRETLIEVLKEHGFITDSTLLSEHGNKTTFETYRLRAKAAVEEVSLEEFARVLLMINKKRGYKSSRKTKGSEDGVLIDGMDVARKLYEEGLTPGELCLQMLEAGKKNLPDFYRSDLQNEFDRIWNFQKRFNPELFCDTVKEEVRGKNRSQTWAILAKFFVWSEKESVWNEKEARTEERVKEYKLVGLKRDTKGNELKLENYRWRVQALSEQLNPEIVAIVLQEINGQISASSGYLGAISDRSKQLYFNRQTVGQYLMSELEKDPNVSLRNRVFYRQDYLDEFDRIWERQAEFHEELTVELKKEIRDIIIFYQRRLKSQKGLISFCEFEKREVIVEKDGRKQNKTVGCRVIPRSHPLFQEFKIWQTLNDIEVFAWDKQSKRKKADKSSTLFDNSEKPLLVEGKRSLYQEEKELLAKELFVKESMEKAEVLKLLFENFQELDLNFKQIDGNHTGFALFSAYSKMIEKYGYEPVDFKKSADEIIEKLETIFTNLGWNTELLSIDLSKEDKELERQSYFRLWHLLYSFEGDNTPTGNGKLLEKIMQLCGVEKEYAVELANVSFQEDYGSLSAKAIKKILPYLKEGNQYDVACDYAGYRHSKSSLTKDEIENKILKDKLDILPKNSLRNPVVEKILNQMVNLINTIIDTYGKPDEIHVELARELKKNAKEREELTKSIARNTREHDEIRQLLRTEFGMMNVSRNDIIRYKLYEELKDNGYKTLYSDEYIPREKIFSKEIDIEHIIPQARLFDDSLSNKTLEYRAINIEKGNKTAYDFVKEKYGDVGLQEYLNRCEALFKDKKTKLRKLKMEEKDIPEGFIDRDLRNTQYISKKALAMLNEISRRVVATTGSITDKLREDWQLVDVMKELNLPKYEILGLVETFKDKNGRRIKKITDWTKRNDHRHHAMDALTVAFTKDVFIQYYNNKNAVWMPTSKEHANIAGIKARYFEDGKALAPIPLAQFRAEAKRHLENLLVSIKAKNKVVTSNVNRTKKNNGENKKMQQTPRGQLHLETVYGSHRQYVTKMEKVNAAFDVTKIATVSKLAYRNALLKRLEAFGNDPKKAFTGKNTLEKSPLYLDENQTEMVPEKVQTVEFETVYTIRKPIDPNLSIDKVIDVKIRSVLEKRLKEYGGDAKKAFVNLDENPIWLNEARGISIKRVSIRGISNAQSLHEKKDKDGNLILGKEGRKIPVDFVNTGNNHHVAIYKKPVLDKVGQIVLDEEGNPKYELDEVVVSFFDAVTRANLGQPIIDKDYRRSEGWQFLFSMKQNEYFVFPNEKTGFNPKEVDLLNPENYAMISPNLFRVQKFTYKNYVFRHHLETTIKDTSSTLKGIIWTDFRSSKGLDKIVKVRVDHIGQIVSLGEY

SEQ ID NO: 15349 - protein, 1167 aa, unidentified
  REGION 1..1167: note = Cas Enzyme sequence
LDDITLDVLDKGVVVFPEGIDAANDTLETPAAIRRAARMARRMKFRRKTRKWALLNILIDNGMCPMTREELVAWKNKGVYPVNNKSFIEWLVSTDKTNPYADRASAASGKVPPLVLGRALYHIAQRRGFKSSRKDAAEESADDKELGKVTGDILALTKEIADSGCRTLGQYFAKRIEEEQGKLAKTRIRKRYTGRVEHYMTEFAVIMDAQGIKHDSDLYNALYKAIFLQRPLRSQKHLVGMCPLEQGNPRAQIGHPAFEEFRMRAFVNDLSFVNTVTGDRIPLSQEDRELACSAFMKASATIKFGDIAKLFKKKFKNEPLKFHHYESNDTVSSCSTRCKIRNGFGDMPYDEQKVFDALTFFDDDGKLREWFRRHYPSLKDESIDRLVKIHPNEGNAQYSLKAISKILPFLRKGHDLFTARLLAKMPDVIPQFAEHEDEIVLHIKEMAIKCRAERESMRNETISRDKKPPRLMDLCREYFLTEWGVDDKAWNKLYQRGDSQYAVDPKRPDRIPAVQLGMIRNPLVQRSMTTLRRLVNYLRDHGKIDGDTTIRIELARGVNDFANRQAIQLWQKDREGLREKARKELGEHATEDTIDRYILWEEQGRKCLYTGKSISLSELVSGTAFDIEHTIPRSMSGDDSLANKTLCDSVYNRQVKKGMIPTECPNYDEMIYTNLAPWREKVNELDKTYKARKNKAMSLSDPQAKSNARKFALRTRIELNYWKDKLRRFEITADKLVDPANGLSGFKRRQLVDTGIMSSHAVELLRSVYPSVYAVNGAATAFARKAWGIQGDESKDRSEHTHHAKDAMVIAALTPSRFNAICTALKDDGALASVRPCDVCKPPCDGFAEKVRKATGEILVKHVMRQTTLRQSSKQNALAKAHPQKSDPTKTVKFVKSQGDTVRGALHKDTFYGCIAKPDDGTNAFVVRKPLVGPIAALKGFSGKIVDPAIRSIVESALAELELKGIKTLEPGTIKMPSGVPINKVRIFSDTKNPVQLCNHVIASSKEYKTPYYVRIAEGSNFRLGVFNVDGKYSVQPENILTWAQNHKKPNYIPLNKQKGFVGYIFPGSMAIVKASAKENLESLSSAQLRKRLYTTISVGGDGEPRAQFRHALAAGMKKELGVPAAEYSATNPPPLLRMGPKKFLADMLFEGIHFKMMLDGSIVFLK

SEQ ID NO: 15350 - protein, 1442 aa, unidentified
  REGION 1..1442: note = Cas Enzyme sequence
YLTKHQNNIMKKILGLDLGCNSIGWALVNEAENTEEISSIIKLGVRVNPLTVDEMQNFEKGKSITTNADRTLKRSMRRNLQRYKLRRDTLIEVLKEHGFITDSTLLSEHGNKTTFETYRLRAKAAVEEISLEKFARVLLMINKKRGYKSSRKAKGSEDGVLIDGMDVARKLYEEGLTPGELCLQILEAGKKNLPDFYRSDLQNEFDRIWNFQKQFNPELFCDAVKEEVRGKNRSQTWAILAKFFVWSEKESVWNEKEARTEERVKEYKLVGLKRDTKGNELKLENYRWRVQALSEQLNPEIVAIVLQEINGQISASSGYLGAISDRSKQLYFNRQTVGQYLMSELEKDPNVSLRNRVFYRQDYLDEFDRIWEKQAEFHEELTVELKKEIRDIIIFYQRRLKSQKGLISFCEFEKREVVVEEDGRKKNKTVGCRVIPRSHPLFQEFKIWQTLNDIEVFAWDKQSKRKKADKSSILFDNSEDALLVEGKRFLYQEEKELLAKELFVKESMKKAEVLKLLFENYQELDLNFKQIDGNHTGFALFSAYSKMIEKYGYEPVDFKRSADEIIEKLETIFTNLGWNTELLSIDLSKEDKELERQSYFRLWHLLYSFEGDNTPTGNGKLLEKIMQLCDVEKEYAVELANVSFQEDYGSLSAKAIKKILPYLKEGNQYDVACDYAGYRHSRSSLTKDEIENKILKDKLEILPKNSLRNPVVEKILNQMVNLINTLIDTYGKPDEIRVELARELKKNAKEREELTKSIARNTREHDEIRQLLRTEFGMMNVSRNDIIRYKLYEELKDNGYKTLYSNEYIPREKIFSKEIDIEHVIPQARLFDDSLSNKTLEYRAINIEKGNKTAYDFVKEKYGNDGLEKFLNRCETLFKDKRTKLRKLKMEEKDIPEGFIDRDLRNTQYISKKAFAMLNEISRRVVATTGSITDKLREDWQLVDLMKELNLPKYEKLGMVEMFEDKDGRKIKKITDWTKRNDHRHHAVDALTVAFTKDVFIQFYNNKNAAWMPASKEHANITGIKARYFENGKALAPMPLAQFRAEAKRHLENLLVSIKAKNKVITSNVNRTKNKNGENRKLQQTPRGQLHLETVYGSHRQYATKIEKVNAAFDVTKIATVSKLAYRNALLKRLEAFGNDPKKAFTGKNTLEKNPLYLDENQTEMVPEKVQTVEFETVYTIRKPIDPNLSIDKVVDVKIRSVLEKRLKEYGGDAKKAFVNLDENPIWLNEAKGISIKRVSIRGISNAQSLHEKKDKDGNLILGKEGRKIPVDFVNTGNNHHVAIYKKPVLDKVGQVVLDEEGNPKYELDEVVVSFFDAVTRANLGQPIIDKDYRRSEGWQFLFSMKQNEYFVFPNDKTGFNPKEVDLLNPENYALISPNLFRVQKFAYKNYVFRHHLETTIKDTSSTLKGITWTDFRSSKGLDKIVKVRVDHIGQIVSIGEY

SEQ ID NO: 15351 - protein, 1433 aa, unidentified
  REGION 1..1433: note = Cas Enzyme sequence
MKKILGLDLGCNSIGWALVNEAENTEEISSIIKLGVRVNPLTVDEMQNFEKGKSITTNADRTLKRSMRRNLQRYKLRRDTLIEVLKEHGFITDSTLLSEHGNKTTFETYRLRAKAAVEEISLEKFARVLLMINKKRGYKSSRKAKGSEDGVLIDGMDVARKLYEEGLTPGELCLQILEAGKKNLPDFYRSDLQNEFDRIWNFQKQFNPELFCDAVKEEVRGKNRSQTWAILAKFFVWSEKESVWNEKEARTEERVKEYKLVGLKRDTKGNELKLENYRWRVQALSEQLNPEIVAIVLQEINGQISASSGYLGAISDRSKQLYFNRQTVGQYLMSELEKDPNVSLRNRVFYRQDYLDEFDRIWEKQAEFHEELTVELKKEIRDIIIFYQRRLKSQKGLISFCEFEKREVVVEEDGRKKNKTVGCRVIPRSHPLFQEFKIWQTLNDIEVFAWDKQSKRKKADKSSILFDNSEDALLVEGKRFLYQEEKELLAKELFVKESMKKAEVLKLLFENYQELDLNFKQIDGNHTGFALFSAYSKMIEKYGYEPVDFKRSADEIIEKLETIFTNLGWNTELLSIDLSKEDKELERQSYFRLWHLLYSFEGDNTPTGNGKLLEKIMQLCDVEKEYAVELANVSFQEDYGSLSAKAIKKILPYLKEGNQYDVACDYAGYRHSRSSLTKDEIENKILKDKLEILPKNSLRNPVVEKILNQMVNLINTLIDTYGKPDEIRVELARELKKNAKEREELTKSIARNTREHDEIRQLLRTEFGMMNVSRNDIIRYKLYEELKDNGYKTLYSNEYIPREKIFSKEIDIEHVIPQARLFDDSLSNKTLEYRAINIEKGNKTAYDFVKEKYGNDGLEKFLNRCETLFKDKRTKLRKLKMEEKDIPEGFIDRDLRNTQYISKKAFAMLNEISRRVVATTGSITDKLREDWQLVDLMKELNLPKYEKLGMVEMFEDKDGRKIKKITDWTKRNDHRHHAVDALTVAFTKDVFIQFYNNKNAAWMPASKEHANITGIKARYFENGKALAPMPLAQFRAEAKRHLENLLVSIKAKNKVITSNVNRTKNKNGENRKLQQTPRGQLHLETVYGSHRQYATKIEKVNAAFDVTKIATVSKLAYRNALLKRLEAFGNDPKKAFTGKNTLEKNPLYLDENQTEMVPEKVQTVEFETVYTIRKPIDPNLSIDKVVDVKIRSVLEKRLKEYGGDAKKAFVNLDENPIWLNEAKGISIKRVSIRGISNAQSLHEKKDKDGNLILGKEGRKIPVDFVNTGNNHHVAIYKKPVLDKVGQVVLDEEGNPKYELDEVVVSFFDAVTRANLGQPIIDKDYRRSEGWQFLFSMKQNEYFVFPNDKTGFNPKEVDLLNPENYALISPNLFRVQKFAYKNYVFRHHLETTIKDTSSTLKGITWTDFRSSKGLDKIVKVRVDHIGQIVSIGEY

SEQ ID NO: 15352 - protein, 1009 aa, unidentified
  REGION 1..1009: note = Cas Enzyme sequence
VIPRSHPLFQEFKIWQTLNDIEVFAWDKQSKRKKADKSSILFDNSEDALLVEGKRFLYQEEKELLAKELFVKESMKKAEVLKLLFENYQELDLNFKQIDGNHTGFALFSAYSKMIEKYGYEPVDFKRSADEIIEKLETIFTNLGWNTELLSIDLSKEDKELERQSYFRLWHLLYSFEGDNTPTGNGKLLEKIMQLCDVEKEYAVELANVSFQEDYGSLSAKAIKKILPYLKEGNQYDVACDYAGYRHSRSSLTKDEIENKILKDKLEILPKNSLRNPVVEKILNQMVNLINTLIDTYGKPDEIRVELARELKKNAKEREELTKSIARNTREHDEIRQLLRTEFGMMNVSRNDIIRYKLYEELKDNGYKTLYSNEYIPREKIFSKEIDIEHVIPQARLFDDSLSNKTLEYRAINIEKGNKTAYDFVKEKYGNDGLEKFLNRCETLFKDKRTKLRKLKMEEKDIPEGFIDRDLRNTQYISKKAFAMLNEISRRVVATTGSITDKLREDWQLVDLMKELNLPKYEKLGMVEMFEDKDGRKIKKITDWTKRNDHRHHAVDALTVAFTKDVFIQFYNNKNAAWMPASKEHANIIGIKARYFENGKALAPMPLAQFRAEAKRHLENLLVSIKAKNKVITSNVNRTKNKNGENRKLQQTPRGQLHLETVYGSHRQYATKIEKVNAAFDVTKIATVSKLAYRNALLKRLEAFGNDPKKAFTGKNTLEKNPLYLDENQTEMVPEKVQTVEFETVYTIRKPIDPNLSIDKVVDVKIRSVLEKRLKEYGGDAKKAFVNLDENPIWLNEAKGISIKRVSIRGISNAQSLHEKKDKDGNLILGKEGRKIPVDFVNTGNNHHVAIYKKPVLDKVGQVVLDEEGNPKYELDEVVVSFFDAVTRANLGQPIIDKDYRRSEGWQFLFSMKQNEYFVFPNDKTGFNPKEVDLLNPENYALISPNLFRVQKFAYKNYVFRHHLETTIKDTSSTLKGITWTDFRSSKGLDKIVKVRVDHIGQIVSIGEY

SEQ ID NO: 15353 - protein, 1433 aa, unidentified
  REGION 1..1433: note = Cas Enzyme sequence
MKKILGLDLGCNSIGWALVNEAENTEEISSIIKLGVRVNPLTVDEMQNFEKGKSITTNADRTLKRSMRRNLQRYKLRRDTLIEVLKEHGFITDSTLLSEHGNKTTFETYRLRAKAAVEEISLEKFARVLLMINKKRGYKSSRKAKGSEDGVLIDGMDVARKLYEEGLTPGELCLQILEAGKKNLPDFYRSDLQNEFDRIWNFQKQFNPELFCDAVKEEVRGKNRSQTWAILAKFFVWSEKESVWNEKEARTEERVKEYKLVGLKRDTKGNELKLENYRWRVQALSEQLNPEIVAIVLQEINGQISASSGYLGAISDRSKQLYFNRQTVGQYLMSELEKDPNVSLRNRVFYRQDYLDEFDRIWEKQAEFHEELTVELKKEIRDIIIFYQRRLKSQKGLISFCEFEKREVVVEEDGRKKNKTVGCRVIPRSHPLFQEFKIWQTLNDIEVFAWDKQSKRKKADKSSILFDNSEDALLVEGKRFLYQEEKELLAKELFVKESMKKAEVLKLLFENYQELDLNFKQIDGNHTGFALFSAYSKMIEKYGYEPVDFKRSADEIIEKLETIFTNLGWNTELLSIDLSKEDKELERQSYFRLWHLLYSFEGDNTPTGNGKLLEKIMQLCDVEKEYAVELANVSFQEDYGSLSAKAIKKILPYLKEGNQYDVACDYAGYRHSRSSLTKDEIENKILKDKLEILPKNSLRNPVVEKILNQMVNLINTLIDTYGKPDEIRVELARELKKNAKEREELTKSIARNTREHDEIRQLLRTEFGMMNVSRNDIIRYKLYEELKDNGYKTLYSNEYIPREKIFSKEIDIEHVIPQARLFDDSLSNKTLEYRAINIEKGNKTAYDFVKEKYGNDGLEKFLNRCETLFKDKRTKLRKLKMEEKDIPEGFIDRDLRNTQYISKKAFAMLNEISRRVVATTGSITDKLREDWQLVDLMKELNLPKYEKLGMVEMFEDKDGRKIKKITDWTKRNDHRHHAVDALTVAFTKDVFIQFYNNKNAAWMPASKEHANIIGIKARYFENGKALAPMPLAQFRAEAKRHLENLLVSIKAKNKVITSNVNRTKNKNGENRKLQQTPRGQLHLETVYGSHRQYATKIEKVNAAFDVTKIATVSKLAYRNALLKRLEAFGNDPKKAFTGKNTLEKNPLYLDENQTEMVPEKVQTVEFETVYTIRKPIDPNLSIDKVVDVKIRSVLEKRLKEYGGDAKKAFVNLDENPIWLNEAKGISIKRVSIRGISNAQSLHEKKDKDGNLILGKEGRKIPVDFVNTGNNHHVAIYKKPVLDKVGQVVLDEEGNPKYELDEVVVSFFDAVTRANLGQPIIDKDYRRSEGWQFLFSMKQNEYFVFPNDKTGFNPKEVDLLNPENYALISPNLFRVQKFAYKNYVFRHHLETTIKDTSSTLKGITWTDFRSSKGLDKIVKVRVDHIGQIVSIGEY

SEQ ID NO: 15354 - protein, 1433 aa, unidentified
  REGION 1..1433: note = Cas Enzyme sequence
MKKILGLDLGCNSIGWALVNEAENTEEISSIIKLGVRVNPLTVDEMQNFEKGKSITTNADRTLKRSMRRNLQRYKLRRDTLIEVLKEHGFITDSTLLSEHGNKTTFETYRLRAKAAVEEISLEKFARVLLMINKKRGYKSSRKAKGSEDGVLIDGMDVARKLYEEGLTPGELCLQILEAGKKNLPDFYRSDLQNEFDRIWNFQKQFNPELFCDAVKEEVRGKNRSQTWAILAKFFVWSEKESVWNEKEARTEERVKEYKLVGLKRDTKGNELKLENYRWRVQALSEQLNPEIVAIVLQEINGQISASSGYLGAISDRSKQLYFNRQTVGQYLMSELEKDPNVSLRNRVFYRQDYLDEFDRIWERQAEFHEELTVELKKEIRDIIIFYQRRLKSQKGLISFCEFEKREVVVEEDGRKKNKTVGCRVIPRSHPLFQEFKIWQTLNDIEVFAWDKQSKRKKADKSSILFDNSEDALLVEGKRFLYQEEKELLAKELFVKESMKKAEVLKLLFENYQELDLNFKQIDGNHTGFALFSAYSKMIEKYGYEPVDFKKSADEIIEKLETIFTNLGWNTELLSIDLSKEDKELERQSYFRLWHLLYSFEGDNTPTGNGKLLEKIMQLCDVEKEYAVELANVSFQEDYGSLSAKAIKKILPYLKEGNQYDVACDYAGYRHSKSSLTKDEIENKILKDKLEILPKNSLRNPVVEKILNQMVNLINTLIDTYGKPDEIRVELARELKKNAKEREELTKSIARNTREHDEIRQLLRTDFGMMNVSRNDIIRYKLYEELKDNGYKTLYSNEYIPREKIFSKEIDIEHVIPQARLFDDSLSNKTLEYRAINIEKGNKTAYDFVKEKYGNDGLEKFLNRCETLFKDKRTKLRKLKMEEKDIPEGFIDRDLRNTQYISKKAFAMLNEISRRVVATTGSITDKLREDWQLVDLMKELNLPKYEKLGMVEMFEDKDGRKIKKITDWTKRNDHRHHAVDALTVAFTKDVFIQFYNNKNAAWMPASKEHANITGIKARYFENGKALAPMPLAQFRAEAKRHLENLLVSIKAKNKVITSNVNRTKNKNGENRKLQQTPRGQLHLETVYGSHRQYATKIEKVNAAFDVTKIATVSKLAYRNALLKRLEAFGNDPKKAFTGKNTLEKNPLYLDENQTEMVPEKVQTVEFETVYTIRKPIDPNLSIDKVVDVKIRSVLEKRLKEYGGDAKKAFVNLDENPIWLNEAKGISIKRVSIRGISNAQSLHEKKDKDGNLILGKEGRKIPVDFVNTGNNHHVAIYKKPVLDKVGQVVLDEEGNPKYELDEVVVSFFDAVTRANLGQPIIDKDYRRSEGWQFLFSMKQNEYFVFPNDKTGFNPKEVDLLNPENYALISPNLFRVQKFAYKNYVFRHHLETTIKDTSSTLKGITWTDFRSSKGLDKIVKVRVDHIGQIVSIGEY

SEQ ID NO: 15355 - protein, 1065 aa, unidentified
  REGION 1..1065: note = Cas Enzyme sequence
MNKRVLGLDPGVTSVGWVLIEENKKGEAVKLIDGGSRIFKPIYEPQFLKLKNKSRTEKRQTRRQRDRRKRRMSKVENFLFKHGLLSKKNDQYHEENKSIQTKLGNPYKLRRDALYQLLENDQLSYIILHLFRRRGFYSALKAKSASEKKKDAAAQAIMEKVRSSDCATLGEYFWRELRTNPKARVRGGESDFSILGSEKMLRDNLYDELELILNKQIEFGNTSLLIRDDKTNNEIREELLRLFRFQRPLKPQKRRSFCSLETKKAKFKDKKTNKEIVKNIGLKTAHKLTVYSQEFIIRQSINNLIVEEMDHDTGEVFFVDIDLEMKEKLFQKAWTQKELSFSAIRKELKVSPESKINLEFGNKKGIAGNQLYTIFKDNELKKWFNSLTYDEKSDLMTDIHMIKGAEYLGLRKVLIKKWNLSDEMIDILVGELDKALKPEYTSVSKKAIEKLLPELRKGKKYSEAVDSIYQKTNSINQKGEVLDLLPPFAPITNPIVNKSVTEVRKLVNDIIKKHGKITEIRIELARDLGLSAKGLSDLRSLQRKQERKNTEAKNYLAERNLKINKENIEKYKLWKELGEKTILPEKINGHWVYSNISFDDVFGSTAKYEIEHILPKSETGDDSYMNKTLCLSGVNGAKGQRTPYEYYQKVMTKEELEIWIKHVYSIFNDAHDSKNKRSKILLTRKEMLSKISNNASLNDTRYIARVLKDYLEQIVVDKVETTKGGYSAMLRKELDLNKLLGDSNKKSRIDYRHHMVDGLVIALSTKSTIDALNKIRKLPSYEVYGNKKSKRYNDLHSKINSRFKIRQDFESHFENTLTSHEVENKASGGFDEETIYSLMREKMVKSKCGEFEYPILSKIDLSKFEDIAELDSKEYDDCVFVTSKKASSELVGKKISEIINGKYALPKELFEVLIKMQKDKKLEQIPVLKSGNVLKKVKEISSKVMSSKCHFLKNLEHIVIGFKKLGNNFCVVDYDTDTPRVVSLFEYLNNKKTYKNNILFKGSILKDKKGDSWKIWQVNQSLILAPVNKIKIDKDNFKKFNLKKEDYNSKGMSINKIKIDFKIKK

SEQ ID NO: 15356 - protein, 1094 aa, unidentified
  REGION 1..1094: note = Cas Enzyme sequence
MKYIIGLDIGIGSVGWAVVRNDDDCKRLEDFGVRIFESGEIIENNKNIRNSQRRRKYRGMRRRIRRRNHRKERLKNYLENIEFVSRAELSEFFAKNNHDIIDIRVRALDEKVTPVELTAALLHIAKRRGYKAFYELSDENNNAKDKKAKEEEKDIYKALTNTADVIKNGGYRSIAEAIMKDSEHFSDKISGRYKYRNIKEKDEKGKKESSGKISENDILFPTEMFEDEVRKILGKQKEFYPQLTDESIDKIFDIIFSRRDFEDGPGNADDKNRPYKGFVDSIGNCPYYKNEKRGHRYTVIGDLFALANKLSQYKYVEKNTGEVVKLPRDLMRNIVNQSLQSGSITKTKINELAKEFNIVILNTKTAKNENIADCIKYLKAVKPIFESYGFDWDKLISEEYTDQNSLLNRVGDTISFNITPKRRIDALNKIDELKGKDELIKKLSKQNFSGTAKVSDKYMIDAINAFFDGTLVGEFQANVQQDEFSVSIKTEKLLKLKPFDNNSEYAQNPVVFRAINETRKVVNAIVQKYGAPNAMNIEIASELNKSFDTRQKISTQQNKNEKERKNAIKQISLITGLDEREIRPQYIERYLLGELQGWRCMYSNEEITNKKEAILNKGKQYEIDHIVPFSRILDDTLNNKALVLARENQKKGARTPLMYLSAEKEKEFKQRVNKLFKGNKITEKKYRYFMLESLVGEDAEKILGDWKTRNLNDTRYIAKFLVKYFNDNLYFAREKGDDKRPVVYAVKGAITSSLRRQWLNKETWGRYDKGELKKITYFDHAVDAIVIANCLPAYVIIAAENHKLRDIYYSAGKIKTEEYRKSLDNCVDTLMKYYGMSPAVSRKLLEKVKETPSLLKNIRFEVEYRVRDYELMKYFFNYDTKVGEDTLDQIFRNDLYKIYDHQFADSIEMPIVSIKPERKYSGQMVKDGFIKKKDAISGKNSVKTIGENNSTVLNDSRFYCVDVYRTCNDETNLNFIKYTDLLKRNNHLYLRSDYRYPDDYAMHEMYLFYGDYIEITKKNKICCGYYFSLKNSSRNELYMSKGNTRRKLNNMKENEVCSITKKDTVKKFEIDILGKKLGEVKKCGEPLSLLPEKN

SEQ ID NO: 15357 - protein, 1031 aa, unidentified
  REGION 1..1031: note = Cas Enzyme sequence
MFIKKYRIGLDLGSTSIGWSLVEINDKSEAIDIIDMGVRIFSDGREAKSKAPLSVKRRESRGIRRNHDRFLERRTNLIKVFTEKGFLAENYNENKDVFAKNPYYLRVRALDEKVELNEFARLILHLAQRRGFKSNRKDKTKESGSMKKAINETIEILNSQNFRTIGELLYFKNQAEQIHKKPSIRFRYDKNSEMQNLIFPSRDLMEDEFNQIWDKQSEFYDVLDSDLKEQIHYIMFYQRPLKPQIVGKCYLEPDEHCAPKASFAFQEARIWQVLNNFKIREILSGNTLELSKDDRDKLYKNLYIKEKISYQDLRVVLFGKERADNYRFNYEKHISEKIYGHQSNYEFNKKAKLKKSWNSLEDKSKSEIVDLLLSDKTEDELKSELTRFDFNNEQIDIILNADLPKGYGDLSEKALCKILPYLRAGQNYSDACVSAGYNHSSRYYGEIYNEGNLPYYGELLPHRVIPSNIKTGDELADKFGKINNPTVHIALNQTRKLINAICKRYGPPSEIVIELARELKMSKEKYNEYESKQRKRLQDNERINKILIDQGIECNHDNRLKYRLWEELNDDPCARKCVFSGRIINLDNLFNSEIEIEHILPYSRTFDDGYNNKTLSFRSANKYKGNQSPYEAFGQSNEISNLQDILIRAEHLPYHKQQRFNKDAMKEFNDENVIIARMLTDTQYMTRVVREYLMYVCGDDKIWTVKGGLVAKLRHNWGLNTLLNTDNEKNRADHRHHIVDALTIACTTRSTVKKYAKSKTEIVKKDSISPYKNFNRETLQTRILKTIVSHKPEQPDINRLKINNQTAGQLTKDTAYMLKDIVDKKYANYTIRKDISSFSNKEQIINIVDPLIRENFLNHLETESDFKQWRDDWCKRHNIYKLKAVEKKDMKTMAGIKDKNNREFKYYNFAENLFADIYITHPWKDNQKWKLEIIPSFNAHQKGFIPEWKKEFPHAKRIMRVYKNDMIALDIENETKIYRVKKMSKGKICIVEHSVSAKEITSSEIPASKLQEKNARKIGVDILGRVFDPKK

SEQ ID NO: 15358 - protein, 1055 aa, unidentified
  REGION 1..1055: note = Cas Enzyme sequence
MKGVKMKNYRLGIDLGATSLGWSLFELDNNNEPVKLMRVGVRIFPDGRKAAGKWSKKEPLNVTRRTARGIRRNRDRYLQRRNDLMKYLIENNLMPKDISERKELEHLDPYYLRAKGLDEQLTLFEFGRAIFHLNQRRGFKSNRKFDSADKETSIMKMAIKELAEKLEETDSRTLGEYLYNLNKDLPKKEIVHSKPRRVKKGDKSYNLFPDRAMYLDEFEQLWEKQHEFHSELTNEIKTNIKNIIFYQRDLKPQEKGSCQFEEGEFRCSFAYVTAQKFRIFQELNNLELLDFNKKNHKLTDEQRAIILHTLLTQKTATFKSLRRKLGKDFANNFTFNLESEKRKDLKGDETSAIMRKDNYFGDKWDELADTEKDEIVTKILNEENDKEVETNLVNWLCDKYSLSEENAQNIANASLSKKISNLSGKAIRKLLPFLQDGFIYSDACEKAGYKLTDEAPEKPKFYKGNLPYYGELFEKDALFGDKEKYNSENEPEKYYGKIPNVTVHIALNQLRKFINELSKTYGAPKQIVLELARELKLGRSKVAEIEKIQAKNRKYNEKIAVELEKISVENNYANRTKYKLWEELADDPTKRCCPFSGIQIPIHKLFTHEFQIEHILPKSKTFNDRMVNKTIAHRKANQDKGERSPFEAFGHNPTGYNYNEILLRAEQLPFAKRRRFFPDAMKNYEDEGEVLSRMLTDTQYMSRIARKYMAFVCGKNNVWSIPGQLTAKLRSKWGLNELLSEDSSKNRADHRHHAVDAFVVACTSRSTMQKVARAIGNSRDKFIDKMPPPFKQFKHKEMKQLLDDMVISFKPDHGNAKKAITEHKTVGQLHKETAYGLVSKDEEKGKIILSVRKELVSLESIKKIKEITDPRIRATLLQLTEGKTGKEITGIISEFSKETGIKRVKTQIEKSLNSVVRIEDNKGNYKYYELRNNYCADIYCPDKGKKAGKWQIEIIPMFYAHQTNFIPDWQKANPTAKKIMRLYINDTVAYEENGETVIRRVKKMNIDGRLFFIDHKIAKSDKDPNATSVKQLQEKDGRKVGVDILGRVSDPKRAK

SEQ ID NO: 15359 - protein, 1047 aa, unidentified
  REGION 1..1047: note = Cas Enzyme sequence
MNYILGIDVGATSLGWCVLQLDKKEKPIKIKRMGVRIFSDGRDSKSQEPLAVTRRNARSARKRRDRLLRRKKRLMKVFIENGLWSSSEAERKNLEKTTDPYEIRCKALDQEVTLAELGRALFHINQRRGFKSNRKTDKKEKDTSALKMAIKDLHERLEKGNYRTIGEYLYKMNPSGIHPSKRHPLRIRVTAEGNKAVYNFYANRKLYEKEVDFLLKKQQAFHPELTDLLCDKIKNIIFYQRPLKPQAVGKCRFEAGEPRAPIASPLYQKFRFLQELNILAPDDLANGDSLTPAQRKLIREIMSKQKTVKFEDIRKELKMSATFNLEDERRKELNGDEVSAILSKRALFGPIWHEINDDQKEEIVNVLLSERNEQDIAEFLLSKFDLSAEQLNKIIDTELPEGYGSLSIKALRKIVPYLEQGEIYSKACELAGYHHSKITGAKTWDYLPYYGVILEKEVIGGSLSLDDDPDKMHKPEIADYERFWGKINNPTVHIGLNQIRLLVNELIRTYGKPKRIAVEFARELKLSRKQKEALNKEQKENKNRNAIINEMLRNAGIKENYENRMIVKIWQDQARENPLERVCPFCGKLISFEKLFTGEFEVEHLLPFSRSYNDGHNNKVISCSSCNRIKTNKTPYEAFGADPRKWNEILERIKYLPIRKQRCFKEDALQGEKEIIERLLNDTKYLAKAAKKYLAAICPPEKISAIPGQLTAQLREAWGLNTLLPDSHKKDRTDHRHHSIDAFVVACTSRAMLQAISAASARGWLERRRLFADSPPPFEDFTRTDMQDCIDKMIISHKPDHGNALRSISENKTIAALHEDTSYGFVKDCDNEGAAIFAIRKPLISLTEDKNIREIASNKIRAMVTNALNGITVKKEREQKLRELAQKYNIRNVRLHIQKNKGTMAPIKDRRTGKIYRYVALGGNYCAEIYQPNRGKYKNKWQVEVISYYHAHQKEFVPKWRKAEPEAKLIMRLFKDDLVAWDNGAARVIMRVKKFNQDGRLFFEPHSVAKSDKDAKATSAKQLQERNARKIKVDILGRVFDPLCSRG

SEQ ID NO: 15360 - protein, 1048 aa, unidentified
  REGION 1..1048: note = Cas Enzyme sequence
VLRLGLDLGTNSIGWVLYRLNDADSPEPIEIVDGGVSIHSDGRNPKNRASNAADRRMKRGPRRNRDRTLRRRRRVAAQLRICGLLPDPAEDRAPWRQLDPLKLRAEALDRPLSRFELGRVLLSFAERRGFKSNRQADGGEEGAIRASTAELQRRIDQSGTRTLGEYLWGRRQRGSTVRARPGGGPYLGGGLYPERSMIERELEAIRDAQAPHHPEVTADAWNDLVGSLLYQRPLRPVERGRCTLLPDENRVLKAEPLFQFFRILQEVNNVEVAPPGQAARPLTDEERERVVAKLRRSRTRRFDQLVADAGLPEGTRCNLRTVAREELDGDRAAVPLRAKKCFGRKWDRHSLEEQQQIVERLLADTNADDLVDWLMDEFGLDEAAAEAVSEAKLPPGTGNLSRAAIGRMLPFMQNGMRYHDAVTAAGLGRHSDRHGDASHERLPYYGSVLARYATGVKPDAASEVERFGRVANPTVHIALGQVRRLFNAIVDAYGKPNEVVVELSRDLKQTEEQRREDERRQGTNRERNDRLRELAEEAGVPEPSAQDMRKLRLWDEQGPPNQRVCPFTGTPLSIGRVLSDETEVEHLLPYSRTLDNSMNNSVVAMRHANREKANRTPFEAWGADSDRYGEILARAESLPTGKRWRFNADAMKRFSERSDFLDRQLNENRYLSRLVREYLECVVERSSIWVTPGRTTALLRRAWGLESILAAPGSDRKNREDHRHHMIDAAVVGMTSRSLLQRVAQAAGRGTDVGRIAADIPPPWPAFRKDMEALARNCIVRHRPDHFTVLGDKRERRRAGRDVTSGSLHNDTAYGVIDGPDEKGMMTLVERKHLTAIKPKDLGRIRDLALKARLQSLWKQVQAENAESSESEQWQRFAPEARRQIGIRRVRLLTTMGEGSLAFIGDATGGIYKAYKTDGNAYMDIWLLPDGGTRGETVSRFDAHSQRGHSQIKAKHPTARKLMRLHIDDMVAMGEGENRQILRVQQLSDQRVVLVDHAQAGKSKEMPSFSKSATRVLVEGMRKVSVDILGRVHDGGPFKAEARQRSRE

SEQ ID NO: 15361 - protein, 1062 aa, unidentified
  REGION 1..1062: note = Cas Enzyme sequence
MAQWRLGIDLGTNSLGWAAVTLDAELEPCGLKDWGVRIFPDGRDPQKGESLAVERRTARGMRRNRDRKQRRVRRFAGLLEEFGLSVATDISPYAARDLAARKPVDAPTLGRALLHLCRRRGFQSNRIADSNDKETGNLKVQMNLLQAHLDATGSTLGQFLYERLLAGEHVRFRGGQPVTITIDGKPQPVYPKRSMYMDEFQTIRDVQGNTLLSDEQWNALETGIAFQRPLMRQAVGRCTFEEEERGSRHLPISQTFRIVQEANNLRYLHRGTVYELTQEQRTALINALQKQKTLAFSAIRTKLLKLPRDSEFNLESLRRKELDGNTTAFSMRKLFAEHEMDWDTLSPDRQNSLVQCILEAQTREDFDKANVSQGWNLSASLLDACYGVHFPSSIGHLSVTAMQKLLPHMLTGMQYWDAATTVYGSHTAQGFETGEVLPELPYYGRVLQGATTPIRACGTANEDEIAYGRIPNPTVHVALNQLRQVVNALIARHGNPYQIHIELARDLKIGKKRKAEIEKEIATHTKEADRRKKELIACGIPNPSPADLLKMRLWEELADAGETDSTGGMMRIDIYTGKPMSLRQCMSDEVEIEHILPFSRTYDNTSANKTVTFRQTNRDKGNATPAEYMLMKGEAAYTAMLERARQRLRKSKQWRFNKDAMDIFERAVMRQLTAEEKAEYLEGGTEGLFIARQLKDTQYMARTAARYLVPVVGSSSRIIPVNGGVTSILRNKWKLDFAKKKGTDEERNDHRHHAVDALVVALTSRSMLQRIARATSDAQNAAKDYRAKLFVPMPQWLAHGWNEMKHLYGQILISFRQDHSRESKLYQETAYGLLAKDDPAFKEGYNAVFRRAITGLKESELSQIRDAALRAAIVDATESPEYHGLKWEAKLGKLQQEGVLIGNTRQLLRRVRIVVKNQSIRRIPSARYKGYAPDAIAFCDIWKVPVTNIKRSFTGKFTYQASYVSYVDAKAFEGNEAGLFAKYKPHPAAKRCMRLHKEDMVTVLLGGSQALMRVAGFKSDQRLYLRPHIQATMERQPFSITKLMQENDLRKVHITADGRLMR

SEQ ID NO: 15362 - protein, 1125 aa, unidentified
  REGION 1..1125: note = Cas Enzyme sequence
MNQKNFLISYDIGYASIGWSIMNSADSSSQDPDILGCGVVTFPTDDCLASTRRNLRRTRRNIRATRMRIDRLKKYLSHIGFLSRKELDADGHPAPFFLAARALLGEQQLTALELWQVLRFYAHNRGYDGNTRWANALENDDEDGNEDTEKLANAYNLMKKFEKQTMAETICAVLELDPTKSTATFTEKNPAYKTQNAAFPRNAVLNEVTLILAKHQHLLSLAHAAHLMQDDLTLEQRDNLSKAGIKLPKRYLGGLLFGQLVPRFDNRIIARCPITWAKLYDQVMAKENDEEKARHVADRDAKVPVKNCHEFYRYRWARLLANIKVDGKPLDVKCRTELTSLAEASGGLTKKEIEKYLKESLGKQIVTNLEAYFNLHPDSEDALVFDPAIKFAHSNAQGMQHFWPLLPDNVKKLSVSRWRKGKSISPSEWIERMSLMNLDTSSIDAAIKTVDKAQKEKKGKPHKSCLNKAIKPKLPSGRAAYSRTVLKQVFEEVMAGYDPTKPAGKTSASDGENKPQDGILYGLLAPGSRVRELESQRSLDSLTNNHLVRHRLLILERLTQDIIKQYTGNQPEKVTQVIVEVARELKEFSGSTAKEISSELNSRLKNFKSAVKHLEDNGISRDMINGSLIRKCRIAMDLGWTCPFTNQKYDVTDLTKLEREHIIPYSARATNALHALVLTFPEVNRMKGKRTARQFIQEHESQPVPNTNLSIMTLKQYESFVDKLSTKGHPDDSKRMKARKALLATTEFDEKEQGFTEGHLTQSSHLIKLASRQLRPQLPNAAVNHIPGIVNAEIRKAWRLTGTLAQACPDVLDIRGEVKPKDDIRNITHLHHALDAAVLGLCAHYIPLTQRGQDVKGKIWQAMLKRNKTEDEKRFLLSLRCFKAIPRDRGNTQGLDIRLMDLPPEVKNSLSRKLAECRVVQHIPSDRSGARTELTTWRVLGINGEGDSAEVSLRQYSTAVEEGKRIRTVKDTTEKAGKLLGPRPNSGKGKLRDIKGAIVISTNYGVALDPAPQIIPFHKVHWRVYDKSNPDSTINRNGGEIPRILRNGMLVRIKNKSKRAKSDYTGIWKIQSVKNNTSGIALDITRAERVKPENKVAWAGININLQTLIDCGLEIVNPPLTGLEM

SEQ ID NO: 15363 - protein, 1125 aa, unidentified; identical to SEQ ID NO: 15362
  REGION 1..1125: note = Cas Enzyme sequence

SEQ ID NO: 15364 - protein, 1062 aa, unidentified
  REGION 1..1062: note = Cas Enzyme sequence
MGENYRLGLDLGTNSIGWALLRLDGEGEPCGLLDLGAHIFSNGRTPGKGLPLAAGRRIARGMRRRRDRYLQRRRLLQALLLDYGLLPISRDERKDLGRQDPYTLRARALDGPLEPYELGRTLFHMNQRRGFKSNRLSGEEDEKERGKIAERIGKLREEIDPGTPGRRTLGEWLHRRHARGKPVRFRPESATFYPTREMYEEEFDAIRKMQEQNHTLTPSQWDALRTIIICQRPLKPVEVGRCSLDPSEPRAHKALPLAQEFRIYQEVNNLRIFEPGHRKERPLRKDERETLIEVLLGGRDVEFAKLSKMIGIDDRSRINLASEKRKKLNGDETAKKLRKKDLFGNRWNQLPGEFQNEIVKTLLNEQYNNKLVSTAQREWGLDKETAQKLSHARLPQGTVHLGETALRLVTPELARGLRYDEAVRLHYPHHSDLSGDGQSSELPYYGEALPRYMMPVRKGDGSPEEQDHGRIGNPTVHIGLNRLRKLVNEIIKCYGKPASISIELARELKNPPEIRRMIEKQQAERQEKNEQIKSDILGAKADDTPANVRKIRLWNEQKIGCKNLCPFCGDPIPFRQALSNDTEIEHLLPFRRTADDSPANMVIAHIKCNRRKGDRSPFEAFGSESSGKYEYSGILNRARGLPGNKAWRFDENAMERYEQGRGFLDRHLNDTRYLSRIAQEYLTTICPKGKVDVVTGQLTFMLRGKWGLSPNNLLRDGESTDGRGKDRTDHRHHAIDALVIALTSRSLVQRVAKLAGRNRKARGTGIDHLLSGLPRPWDGFSHEEVRKRLANVVVSHRAEHGLAGQLHNEKAYGTIGDRTEEGEGLFSNDKYQIVTTESLEFTKRAPSKVLDAVRDARLQEALKELWAFIEKTESGTPAAKWKEFTKRAASPGELGKFDFSGAKHGVRRVRVTENLTVHPLPRKGRYKAVKPDSNAFMDVFEMPNGKWQAVTVTRLAANAPDFKKRHNELRPHPAARRIARLFAGDMVAITENGDRQIYRIQILSGQRMWLSPHNEANTDHRNRDRDDPFKLTQKSVNALRRLGFRKIHVDILGRVRDPGPRS

SEQ ID NO: 15365 - protein, 1062 aa, unidentified; identical to SEQ ID NO: 15364
  REGION 1..1062: note = Cas Enzyme sequence

SEQ ID NO: 15366 - protein, 1055 aa, unidentified
  REGION 1..1055: note = Cas Enzyme sequence
MPIRLGLDVGTNSIGWALINTDTGRIIDLGSRIFSDGRDPKSGASLAVDRRDARAARRRRDRYLGRRSAFLETLISHGLMPENADEAKLVEVKDPYDLRARALDERLEPHEIGRALFHLNQRRGFRSNRKAERGRKETEDGKIETGAKALDAAMKDAGARTLGEFLNGRETKRVRMGGENQSYDFYPQRRHVEAEFGEIWNAQAPHHPGLLTEETRAALHRILFFQRDLKDQEVGKCTFAGWNGVPDDERRLAKAHPLFQERRLYEEVNNLKIVSPGAADRDLTLAQRDALILKLRSTRKSSFSALGKLIKLDDGERFNKESETRKDILGDEVRAELADKKRFGDRWGFLDLDEQLKIIDRIQNEENPEVLLDWLKAEYGLDEEAAVAVGKARLPEGYGRFGETATRRLIEALKAGVVTYDKAAQAAGFHHSDLRTGEVWDRLPYYGQILTTEIAPGKAEYGDENERRFGKITNPTVHIGLRQLEKLINAVIAVHGRPDEIVVELARELKLNEEEKKKHEARIRRDTAAAVARGEKLEAEGIPDNGANRMVLRMWEELNPSNPLDRRCPYCGEVIGIRALFSGEADVDHIIPYSQSLDDSAGNKIVAHRSCNRAKGNKTPYEKWGHDEARWEIISAQVARMHRSKQWRFGPGARERLEKDGGFEARQLTDTQYLSRATAKYLSALYTPDEGRRVYALPGRMTAMLRRVWGLNSLLPDHNYVENAHSNAPKNRLDHRHHTIDGVVAAVTDIGLMQRIATAAGRAEEKELDRIFEELAPPWPTFRDDLKDRLARVIVSHKPDHGRKGRPSPNRDVTAGRLHNDTAYGFTGEVAADGKTPIVVHRVPFASLKPGDIADPTRIPDEALRNALFAATRDLSGKPYDQALARFAKEHPIFKGIRRVRVREALNVIAIRDKEGRPYKGYKGDSNARYDVWRLPDGKWVADIVSMFDAHRPDRGDRRPHPAAKKVLSLRQNDLLAVERDGETQILRVVKFSSTGQITLAAATEAGALKARDAAPQDTDPFKYIYSSGSGLKKMLARQVRIDPLGRVFDPGPRP

SEQ ID NO: 15367 - protein, 1071 aa, unidentified
  REGION 1..1071: note = Cas Enzyme sequence
MKRIYGFDIGTTSIGWAVIEYDVIQCLGRILAMGARIFPEARDPKGTPLNQNRRQKRLVRRQIRRRKQRRRALNELLAQNSLLPPFSKDKNSAWAKVMALSPLPLRKKGLTEQLAPHELGRALYHLARLRHFKGRDIEESDKPDEEESAEEKEAKSARDITIKELKASGQTLGQMLAERVPAEGEVPKQQTRRIHALRSHVEDEFSRLVKVQESYHPALRDPAFAESLHETIFAQRPVFWRKNTLGQCRFIPGAPLCPKGSWLSQQRRMLEKLNNLAIVGGNMRPLDPEERAAILDKLQTQASMTWAGVRVALKPLYKKRNEQGEEKVLRFNLELGGESKLIGNALEAKLADIFRDSWVNHSHKQAIREAIQERLWKADYGEIGEQRVVILSATERHKRRAEATESLVRDFGISGQEAKALGELKLPAGWEPYSIDALNLFLPKLEEGIRFGALTAGPEWAEWRDINFPNREQPTGEILDRLPSPADREEQKRQTAIRNPTVVRTQNELRKVVNNLIEAYGKPDLIRVELAREVGLSKREREEMQSRLGKQEKRRRDAEADLKSKGIPLPSRADIEKWLLWKEGQERCPYTGDQISFDALFRNGQYDVEHIWPRSRSLDDSFRNKTLCRRDVNIAKGNRTPFELYNACPDEWSAVAKRLQGMVAGKGTPGMPLGKIKRFLAESMPDDFANRQLTDTGYAARQAIVFLKRLWPDIGPEAPVTVQAVTGRVTAQLRRLWELNNILSNDGEKTRADHRHHAIDALVVACTDPGVTNRLSRYWQQRDDPRVQSPKLDKPWASIRIDAQRMKDEDKIKISHRGRKKISGPLHGEMPFGDTSDEEVKNGTMFGVYVKKMSIEKLSLATLRIGHVSQITRTAPFVVRDPAIRQRLAQHLEQMGGDPKKAYPPYPRLTPEGPEIRKVRVLSLQQKSLMAPVAMKNNDRDKREPTGFADLANNHHISVYRRNDGVADFEIVSLYEASHRLTNGEPVVRRKREGAEFIMSLSPGDAIEFPNGDHKGIRIVQGVWASGVIVTLDGFDAVGDSVWRPSPSTILASGARKVSFDPIGRIRSAND

SEQ ID NO: 15368 - protein, 1090 aa, unidentified
  REGION 1..1090: note = Cas Enzyme sequence
MQRIFGFDIGTTSIGWAVIDHDAARAVGCIVGMGVRIFPEARDPDGTPLNQIRRQKRLIRRQLRRRKLRRRALNELLNEAGLLPPFAKGKRVNGSYVRSSWEEVMQLPPLELRKKALAERLEPYELGRALYHLAHRRHFKGRDVESDTPVESSAEEKAAQSARATTVQILQESGKTLGEMLAERAPTRGEIPRQRTRGIHALREHVIEEFNRIIEAQRQHHPILRDPVFVDQLRNVVFSQKPVFWRTNTLGECPFVPSSPLCPKGSWLSQQRRMLEKLNNLSIVGGNLRPLDSEERAAILEKLQVKASMTWTAVRAALKPVYAKRGEPGAEQALRFNLELGGESQLPGNLVEAKLASIFGERWKTHPYRQAIRDAIHERLWKADYAEIGTQRVVILPETERRRRRAELAKTFVHEYGISDFEAKALSELQLPAGWEPYSVEALWRFLPLLEQGVRFGALVAGPEWAKWREATFPNRQQPSGGSLDLLPSPANSGEQKRLAAIRNPTVVRVLNELRKVTNNLIRVHGKPDLIRIELAREIGLSKRERAEIREQLRRQEKRRREAEEDLKSKGILQPTRAEIEKWLLWKESQERCPYTGDHISFDALFRNGEYDVEHIWPRSRSLDDSFRNKTLCRRDVNIEKGNRTPFEFYQSRPDEWAAIVTRLRGMTAKGRSAGMPYGKVKRFLAESMPEDFANRQLTDTSYAAREAVTFLKRLGSKSGAGTSVAVQAVAGRVTAQLRHLWQLNNILADNAEKTRSDHRHHAIDALVVACTDPGMVHRLSRYWQQKDDPRAERPHLPAPWPGIRAEVQQLKDCGEIRISHRVRKKVSGPLHDEMPYGDTGKEIMKNGTILGVFVKRMPVEKLSLETLKIDDVAQISKTAKFVVRDKAIREALRNHLAAAGGDPKKAYPPYPRVTPNGPEIRSVRVLSLQQKSLMAPVAMSWNGERERQPNGFAELGTNHHVAIYRTSSGKAEYEIVSLYEAARRLARGEPIVRRQRDGAKFVMSLAAGEAVEFLDGERKGIWIVQGVWANGQVVLTRDYDARPTSKKESERLGMSGKREEFYPKVSTLILDSVRKISVDPIGRIRVAND

SEQ ID NO: 15369 - protein, 1090 aa, unidentified
  REGION 1..1090: note = Cas Enzyme sequence
MQRIFGFDIGTTSIGWAVIDHDAARAVGCIVGMGVRIFPEARDPDGTPLNQIRRQKRLIRRQLRRRKLRRRALNELLNEAGLLPPFAKGKRVNGSYVRSSWEEVMQLPPLELRKKALAERLEPYELGRALYHLAHRRHFKGRDVESDTPVESSAEEKAAQSARATTVQILQESGKTLGEMLAERAPTRGEIPRQRTRGIHALREHVIEEFNRIIEAQRQHHPILRDPVFVDQLRNVVFSQKPVFWRTNTLGECPFVPSSPLCPKGSWLSQQRRMLEKLNNLSIVGGNLRPLDSEERAAILEKLQVKASMTWTAVRAALKPVYAKRGEPGAEQALRFNLELGGESQLPGNLVEAKLASIFGERWKTHPHRQAIRDAIHERLWKADYVEIGTQRVVILPETERRRRRAELAKKFIHEYDISDAEAKALSELQLPAGWEPYSVEALRRFLPLLEQGVRFGALVAGPEWTEWREANFPNRKQPSGGSLDLLPSPANSGEQKRLAAIRNPTVVRVLNELRKVTNNLIRVHGKPDLIRIELAREIGLSKRERAEIREQLRRQEKRRREAEEDLKSKGILQPTRAEIEKWLLWKESQERCPYTGDHISFDALFRNGEYDVEHIWPRSRSLDDSFRNKTLCRRDVNIEKGNRTPFEFYQSRPDEWAAIVTRLRGMTAKGRSAGMPYGKVKRFLAESMPEDFANRQLTDTSYAAREAVTFLKRLGSKSGAGTSVAVQAVAGRVTAQLRRLWQLNNMLADNAEKTRSDHRHHAIDALVVACTDPGMVHRLSRYWQQKDDPRAERPHLPAPWPGIRAEVQQLKDCGEIRISHRVRKKVSGPLHDEKPYGDTGKEIMKNGTILGVFVKRMPVEKLSLETLKIDDVAQISKTAEFVVRDKAIREALRNHLAAAGGDPKKAYPPYPRVTPNGPEIRSVRVLSLQQKSLMAPVAMSWNGERERQPNGFAKLGTNHHVAIYRTSSGKAEYEIVSLYEAARRLARGEPIVRRQRDGAKFVMSLAAGEAVEFLDGERKGIWIVQGVWANGQVVLTRDYDARPTSKKESERLGMSGKREEFYPKVSTLISDSVRKISVDPIGRIRVAND

SEQ ID NO: 15370 - protein, 1037 aa, unidentified
  REGION 1..1037: note = Cas Enzyme sequence
MERIFGFDIGTTSIGFAVVDYSPEQSSGNILRLGVRIFPEARDPDGTPLNQQRRQKRMMRRQLRRRRMRRKALNEALRDAGLLPAYGSPDWPIVMGSDPYELRRRGLESGLSAYEFGRAIYHLAQHRHFKGRELEDSDTPDSDADDEKEAQNERDATLKALKNEQTTLGAWLARRAPSDRKRGVHAHRTVVLEEFERLWTAQSEYHPALQSEELKAKIGDTIFAQRPVFWRKNTLGECRFMPGAPLCPKGSWLSQQRRMLEKLNNLAIAGGNARPLDDEERGAILFKLQQQASMSWPGVRSALKALYKQRGESGAEKSLKFNLELGGESKLLGNALEAKLADIFGLDWPSHPHKQEIRIAVHERLWAADYGETPDKKRVIILSDKERKTRREDAAKSFVADFGVTEQQATQLQVLKLPTGWEPYSISALNQFLPELEKGERFGALVNGPDWENWRRDVFPNREQPTGEILDKLPSPASKEERERISQLRNPTVVRTQNELRKVVNNLISLYGKPDRIRVEVGRDVGKSKREREEIQSGIRKAERRRGDAAKDLQSKGISNPSRDDVEKWLLWKEGQERCPYTGDQIGFAALFREGQYEVEHIWPRSRSFDDSPRNKTLCRKDVNIEKGNRMPFEAFGQDEDRWSAIQTRLQGMVSAKGGAGMSPGKVKRFLAKEMPDDFAARQLNDTRYAAKQILAQLKRLWPDLGPEAPVKVEAVTGKVTAQLRKLWTLNNVLADNGEKTRADHRHHAVDALAVACAHSGMTNKLSRYWQQRDDPRAQKPTLTPPWGTIRADAEKAVNEIVVSHRVRKKVSGPLHKETTYGDTGEDVKTKSGIYRQFVTRKKVEALSKGEIEEIRDPRIREIVKEHVASRGGEPKKAFPPYPRVSPSGPEIRKVRLTTKQQLGLMAPVGNGYADLGSNHHIAIYRLPDGKADFEVVSLFEASRRLSQRKPVVQRTRADGATFVMSLSAGDTIEVPDGDRAGHRIVQSIWSSGVVVTLAHIDASGDTVWRPNAGSLLKGRARKVSIDPIGRVGTAND

SEQ ID NO: 15371 - protein, 1037 aa, unidentified
  REGION 1..1037: note = Cas Enzyme sequence
MERIFGFDIGTTSIGFAVVDYSPEQSSGNILRLGVRIFPEARDPDGTPLNQQRRQKRMMRRQLRRRRMRRKALNEALRDAGLLPAYGSPDWPIVMGSDPYELRRRGLESGLSAYEFGRAIYHLAQHRHFKGRELEDSDTPDSDADDEKEAQNERDATLKALKNEQTTLGAWLARRAPSDRKRGVHAHRTVVLEEFERLWTAQSEYHPALQSEELKAKIGDTIFAQRPVFWRKNTLGECRFMPGAPLCPKGSWLSQQRRMLEKLNNLAIAGGNARPLDDEERGAILFKLQQQASMSWPGVRSALKALYKQRGESGAEKSLKFNLELGGESKLLGNALEAKLADIFGLDWPSHPHKQEIRIAVHERLWAADYGETPDKKRVIILSDKERKTRREDAAKSFVADFGVTEQQATQLQVLKLPTGWEPYSISALNQFLPELEKGERFGALVNGPDWENWRRDVFPNREQPTGEILDKLPSPASKEERERISQLRNPTVVRTQNELRKVVNNLISLYGKPDRIRVEVGRDVGKSKREREEIQSGIRKAERRRGDAAKDLQSKGISNPSRDDVEKWLLWKEGQERCPYTGDQIGFAALFREGQYEVEHIWPRSRSFDDSPRNKTLCRKDVNIEKGNRMPFEAFGQDEDRWSAIQTRLQGMVSAKGGAGMSPGKVKRFLAKEMPDDFAARQLNDTRYAAKQILAQLKRLWPDLGPEAPVKVEAVTGKVTAQLRKLWTLNNVLADNGEKTRADHRHHAVDALAVACAHSGMTNKLSRYWQQRDDPRAQKPTLTPPWGTIRADAEKAVNEIVVSHRVRKKVSGPLHKETTYGDTGEDVKTKSGIYQQFVTRKKVEALSKGEIEEIRDPRIREIVKEHVASRGGEPKKAFPPYPRVSPSGPEIRKVRLTTKQQLGLMAPVGNGYADLGSNHHIAIYRLPDGKADFEVVSLFEASRRLSQRKPVVQRTRADGATFVMSLSAGDTIEVPDGDRAGHRIVQSIWSSGVVVTLAHIDASGDTVWRPNAGSLLKGRARKVSIDPIGRVGTAND

SEQ ID NO: 15372 - protein, 1070 aa, unidentified
  REGION 1..1070: note = Cas Enzyme sequence
MNTTPFKYNLGIDVGVASLGLAVIEIDKEENVIGVKEGFVRTWSAPVGGETRRLARSQRRMIDRKQMRLRRLAQIFLKNGIGFPHNDIPKYLLDKSPLKLRAKAVNEKIDLEELQRIILHMAKHRGSSAFDGRDNDEKDTLLTKEGIKKLEVKINEMGFKTYGQFLWYREKRGKKVRINQEVIGKGSYDFYPSRSLLREEFDIIWKKQKEWYQEKLNDSFRESLEEVLFSQRKFSTPPPGNCSYVTNEKRLPKSSRLFQKKRIYEEVNNLRFYNHNNTPLPYTVNQRDRLVEKLMEGESLNKTKIKKTIGIKKNCKVNLEDSKARTEIAKYPFSNYELGEEWAELNAENKDFVLEILSTHFDKEEAVDKIKTVINLSDQLTKRLIQTDFPKGYGNLGKTATKKIIEELKKHPTLSSRQAEDLAGLVHAQTPTGELFRKLPYYGEVLKGYAIEPIWIFSENPSNKPPNTNFLEKKYGRAPNPVVHVALNQIRKAVNCLIDKYGLPEKIYVELARDLGKSEKTKAKIEQEIAINRKKREQIRRKLKENELEQTRPNELKYELWEQQECKCVYTGDNISFIQLFSGEVEIDHILPRSKTYDDSKANMVLCKKSANAFKNNRTPYDAFSSDPNFDWDAIIRRVNDLPAGKKNRFKSDALERFENNPDYWRERFSIDNSYIAKITRQYLTCLYGKPENVIAVSSKVTSLLRKKWGLNKVLGGESNIKQRDDHRHHFIDALVVGCTTRSTIQKIQTAARHCEEKRILGIVDKIQPPFGGEREFWSHVEKVTQNVLLSRKPDNSASGQLHEDTLRGIVSGPNEKGKYLTRTKVKLGDIKSLTELKKKKISGALIKGYGDNPSIADFTNRLNLIQNKVEEFCQKARLELETEAIQNKNQGKKVRAITETLVYKKAIDLMKKKALPCYYWDFKEQKLVNVIKQGNKFNGGYLSGRNHRMDFYQSSQGKIKWQIITMFEANDETFVPESDKAGNALLWSAHKDDILLLDDPDNLNYRVRMIVVKIKDGYMGVVKCTDASEAGNNRSLYEKGLKFFKEKRAQRIITNHLGEPTYFFPMLNE

SEQ ID NO: 15373 - protein, 1070 aa, unidentified
  REGION 1..1070: note = Cas Enzyme sequence
MNTTPFKYNLGIDVGVASLGLAVIEIDKEENVIGVKEGFVRTWSAPVGGETRRLARSQRRMIDRKQMRLRRLAQIFLKNGIGFPHNDIPKYLLDKSPLKLRAKAVNEKIDLEELQRIILHMAKHRGSSAFDGRDNDEKDTLLTKEGIKKLEVKINEMGFKTYGQFLWYREKRGKKVRINQEVIGKGSYDFYPSRSLLREEFDIIWKKQKEWYQEKLNDSFRESLEEVLFSQRKVSIPPPGNCSYVTNEKRLPKSSRLFQEKRIYEEVNNLRFSHQGTPLPELTIGQRDELVETLMEGKPLKKTDIKKIIGNKANTKVNLEDSKDRTLIAKYPFSDSELGEEWAELNEENKDFVLEILSTHFDKEEAVDKIKTVINLSDQLTKRLIQTDFPKGYGNLGKTATKKIIEELKKNPTLSSRQAEDLAGLVHAQTPTGEIFRKLPYYGEVLKGYAIEPIWIFSENPSNKPPNTNFLEKKYGRAPNPVVHVALNQIRKTVNLLIDKYGLPEKIYVELARDLGKSEKTKALIEQKIASNREKREQIRRKLKENEIEQTRPNELKYELWEQQKCKCVYTGDNISLIQLFSGEVEIDHILPRSKTYDDSKANMVLCKKSANAFKNNRTPYDAFSSDPNFDWDAIIRRVNDLPAGKKNRFKSDALERFENNPDYWRERFSIDNSYIAKITRQYLTCLYGKPENVIAVSSKVTSLLRKKWGLNKVLGGESNIKQRDDHRHHFIDALVVGCTTRSTIQKIQTAARHCEEKRILGIVDKIQPPFGGEREFWSHVEKVTQNVLLSRKPDNSASGQLHEDTLRGIVSGPNEKGKYLTRTKVKLGDIKSLTELKKKKISGALIKGYGDNPSIADFTNRLNLIQNKVEEFCQKARLELETEAIQNKNQGKKVRAITETLVYKKAIDLMKKKALPCYYWDFKEQKLVNVIEQGNKFNGGYLSGRNHRMDFYQSSQGKINWQIITMFEANDETFVPESDKAGNALLWSAHKDDILLLDDPDNLNYRVRMIVVKIKDGYMGVVKCTDASEAGNNRSLYEKGLKFFKEKRAQRIITNHLGEPTYFFPMLNE

SEQ ID NO: 15374 - protein, 1070 aa, unidentified; identical to SEQ ID NO: 15372
  REGION 1..1070: note = Cas Enzyme sequence

SEQ ID NO: 15375 - protein, 1070 aa, unidentified; identical to SEQ ID NO: 15373
  REGION 1..1070: note = Cas Enzyme sequence

SEQ ID NO: 15376 - protein, 1073 aa, unidentified
  REGION 1..1073: note = Cas Enzyme sequence
MRWRLGIDLGTNSAGWIAVGLNEAGDPDRIIAIGSRIFSDGRDPKSGASLAVDRRAARAMRRRRDRFKQRQAALLKHLTLAGLFPIDGTAQKALENLDPYELRATALDHPLPLAHLGRALFHLNQRRGFKSNRKTDRGNNDDSGKIRVGMERLHAAMADAGARTLGEYLHGRRSGAATDNTIPSVRTRLRPESGEGVRGDGYDFYPDRRMLEEEFDTIWQAQAGFHPDTLTADLRERMFKVIFHQRPLKQPQVGTCTLCPGEPRLPKAHPLFQRRRLLEELNALKIVQPGETARRLTRDERDLLLLRLKDSRSARFDKLRQLLKLDPDARFNKESENRTELKGDEVAAELGARTRFDKSWVHLDPAAQIEIVDRLRNEEDEEKLRDWLDTTHALTPDQIRATMGARLPEGFGRFGLTATTRLIAALQEDVIVYSEAVERAGLGHHSDFRTGEEFAELPYYGLALERHIMPGTGEPDDPEELRIGRLTNPTVHIGLNQLRRIVNRLIKAYGKPEEIAIELARDLKFDEERKKEINLRNKANREAAERRSKKLAEIGLADKGGNRALLKLWEELNPENVLDRRCVYTGQQISIEMLFSGAVEVDHILPFSATLDDSHANKLLCLQIANREKRRRSPYEAFGSRADWEDIAARAAHLPREKRWRFEPDAMQRFDAEGGFLARHLVDTQYLSRMAREYLSALYPGRGEGSSHVWVSPGRLTEMLRRSWRLNSLLPDHNYGGGADQRKNRLDHRHHAIDAAVVAVTDRALLQRIATESGNRGSEGRERATADLPTPWPDFREDLDKALRGIVVSHRPDHGTTSKAGLVRGRDATAGRLHNDTAYGLTGEADDKGNDLVVHRVPFGALKKAADIAKVRDPELRAALDHATAGREGRAFEDALRRFPQLGPLQFRNIRRVRVIEPLAVIPIRDRNGRPYKGYKGDSNYRYDVWELPDGKWVAEVVSMFDAHQPGWTSMIRQANPTARKVLRLHQDDILAIEPEAFGRRLVRVIKFGQNGQITLAEPQEGGDLKRRDAAPQDVDPFKYSSPTAGGLKRLKARQVRIDELGRVQDPGPRHRL

SEQ ID NO: 15377 - protein, 1121 aa, unidentified
  REGION 1..1121: note = Cas Enzyme sequence
MAITLAFDIGYASIGWCALSADDSRKDPEFLGTGVVTFPTDDCLASRRRDLRRTRRHIRSTRLRIERMKRWLVHRGVLSRQDLDRPGHPAPFLLAAAALQGHRMLNAWELWTVLRWYAHNRGYDGNARWSREEATDDDTAKEAAAKALMAQHGTTNMATTVCACLKLDPGVLKLPKKEQIISSRLPYKTLNAAYPRATVQKEVLDLLLSHLGKIPGLDDKALDLLFTPEALSAEDRDLLKAADIKLPKRYHGGLLFGQLLPRFDNRIISRCPITWAKTYDEAIAEGKSDEQARQLADKFAKVPAAKCREFLEYRFARVLANIKADGKPIDKELRQQLWGLAEKQGRLTHADIKKAVKQHCGDVPTNLEAYFKLHPDSEEALVLDPVMDEVRKAAGSQARLAPFWKHLAAETKQAVIDEWRNSKAVSLVWISERAGENPALAEAFRKEFAAQKPKKGEIRFETLNEYLQAVRIGPKIPSGRAPYARAVLRQVAEEVRNGWDATKANKITDPENGENKPTDGILYAALDPSSRVRQLQAERPIEQLTNNHLVRHRLLILDRLLDDILAEFASEEKQVAQVIVEVARELKEFSGKDRVAIKQALGRRMAHHAKAVEMLVQNGIEPNANRIKKCRIALDLNWTCPFTQRLYGPSELDSLEFEHIIPRSQRLSDSMAGLVLTRQEVNKAKGNRTAMRFIIDSAKDGLIVPPSVYEKWVQSLKVSKKETHPDDYARQSARKRLLLLQDYEEKERTFTDGQLTQSSHLMKLAMGALKRKLPQAAMDPIPGPVTSEIRKSWKLTGTLAQACPEVLDSEGKVRPKDEIRGLTHLHHALDAATLALAAHYFPLRHRGENQTGKIWQALLKRQRTEEEKKFLKSLGIFVTYGRLRRAKDGNPYEEKDVRLDDLPKAVKEQLSRSLAECRVMQHLPSDRSGAKTKLTTWGVEEIENGRAKLRQQGFIDDSGKPNLNPDKSRKRSYKEANPNGKGADKNWLRLDKLLGPQPKNSQGKLEDIKGAMVIEENYGLALDPKPTVIPFHDVSTRLVSLRQSNGGKPVRVLRNGMLIRVDNWPEKEGLWRIMSCKASMKLDLARPQETKASWREVAIPSLVTRGLIILPRRYTGHPLTD

SEQ ID NO: 15378 - protein, 1054 aa, unidentified
  REGION 1..1054: note = Cas Enzyme sequence
MRRRLRRRAWRLTKLARTLKTHGVIADVRLLRPEHPCTRSLWRLRVEALDRQLTSEEWARVIYHLCKHRGFHWISRAEKRQAESDVKGEGGQVTQGLAATANLMNVKGYRTTAEMVLAEFPEAQRNKRGDYSKALKRELLAEELALLFRRQRELGNPQATAELEAAVLGTGDKKSGLFWLQKPALSGADLLKMLGKCTFERSEYRAPKASFTAERHVWLTRLNNLRIFVEGTARPLNEAERRVALPLPYQQATDLKYKQLRAALLAIGLPNTFKFAGLAYPSDADLAVGTTKDPEEQTLIKLPAWQELRLAFKKTGLQSEWRSIAGQATSGQPDLLDKIAEVLSIYKEDDEVAAQLRKLPLPNTDMVIETLLDIRFDKFHALSLKALRKIVPHMEAGLRYDEACAQAGYHHSQIAVPGTAGQRYLPPFYARRDKDGRMVFRDDIDVPRNPVVLRALNQARKVMNALIRMYGPPHEVRIEMARDLSRALDERRKIEKEQAEYRERNERDRSHFVELFLREPGPGEFEKWQLYREQQCKCAYSVEEIDIKRLFDKGYVEVDHALPYSRSFDNSKNNKVLVLAKANRDKGNQTPYEFLDGAHDSERWRRFEAFVQANKSYRQAKRNRLLRKNFGKEEASDFKARNLEDTRYICRFFKNYVEQNLQLATGSEPKRCVVVSGQLTAFLRARWGLLKIREESDRHHALDAAVVGACTHGMVKRLSDYARLKELAEVRAGFVDIETGEIVDPAKFAQLERHFPMPWPHFRHELELRLKEDDPAKLRSQIELLGTYPHAALDSLRPLFVSRAPQRRNGGAAHKETVYAQPERLKSQGAVTQKVPLASLKFSDLDQLIDPHRNERLYSEIRARLEAHGGKGDKAFPPNNPLRKPDREGNPTGPVVRTVTMVIDKLSGIPVRGGIAKNDTMLRVDIFSKSGKYFLVPVYVHHKVKGLPNGAIVAHKDESEWPTVDDTYSFCFSVYPNDLLRVTQKGATFLGYFTGCDRGSGNVSLWAHDRAERVGKDGLIRGIGVKTALSVEKLEVDVLGNTYSSRSEPRRGLA

SEQ ID NO: 15379 - protein, 1456 aa, unidentified
  REGION 1..1456: note = Cas Enzyme sequence
MKKILGLDLGTNSIGWALVDKDNQKILGMGSRIIPMGKDKIDYEKGDGVTKSAMRRAKRSTRRMNKRYKLRRNKLLYILHTLGMLPEQFQFKKLNEKDKDGSLLRLNGTKENNSFKETNNGIPVPTKIQELELLPISKKTLQADSISFCQLKVDALTKAIDIKDFGRILYNFNQLRGYSGGDSDERSKKENDEEESLGNKNYEVITRKVGIISVEQSEDTFKIRGGKNKGQQLNKFIVVISLDDQELEGTTELQDFKKKVGQEEELQITTKRDKNGEVTSRIITLPQKSDWRKEMEANEKILKEDRLFISELKLRDLQNNGKWTKIRNRVFLRNRYKEEFDKMWDTQAQKYNFLKECPKETLEKIANYIFPGKSESQQKLRKNAIEGGLKYIIKDQIIYYQRPLKPQTELISNCRFEKSEKVIAVSHPLFQEFRCWKQINNLYITSKQQVWNEKKEKNVWQYTNRYLTNEQKQRIYEKLQNQKGISFNEVKKIVEIKDDKIEYLNGLHVKARLIGCDTLISIKKQLGDYAESLLEKDISIIEKIWDAIFDVRNHEGSEYDITSKRVAPIFEILKEYLDDSQKAEELALKLAQKVKFVRKYGSLSAKAIQKVLPLMQLNPQNISEQITDKFNTIKNFISTGEILDNTDYNFQDYVIDFVEKKPNALENGGLMEYLAISLAYDKHTAETMEAQISNYHDINYEKRNLRNPIVEQLMNETMQVVKAIWKQYNIDTKELEIRIELARDLKNSAKERKAIYDGQSNNQKENNKAKERLKENQIALTSENILKYRLYAQQKETSPYTGKPIDFSKLFDNKEYDIDHILPKSRYYDDSFSNKVICEKNINEEKSNRTAWEYISQQNSKHEILPIENFIKHVNNNYFGKRKKNLLAEKIPTNPVSRQLKDTQYISIAVKNELAKIVGSENIKTSTGEITDFLRSRWGLKKLFMEMTEERFKRMELWDLDENGNPTTTTKWVTKEVMNDGEKDKNVYEIKNWSKRYDHRHHAIDALIVALTEQSHIQRLNNLNKYIQDQLERRKEEFKITTGEDETVFEAFCNLEEGRRDEILQKMESSRYFEKPFLYTNKKGEIVSSLCRQVKEHLETMIISQKPKDKLSISEDTLDPNTPNKKLKKQLKIRAAIHEDTYYGKTNERDTKRIKLSALSASDIDKIIDKSLASEIKEHKKKYIKKEDAFIGEGLKEFNDNRIKKNKQPVYNVKVWYNKNEKKKDSLQRLYDNNEKQSVITGDNYLFIVMEKETKKGVSRVFDIAPLYDSVALAKEYLKEGKRNFKQLICEDYRLKHTDKPQKVLFYLQQNDLVYLPTSSNDPVLNMTNNELKEWLNKDYENKKSFARRIYKVVKMTGKNCFFIPNNYATTISTPKDLSKEDLEKLHKEYKDKDIPKHKKNYEEFGSFGSSIKTEINDNFVKELVLKEKFEGNQPIKIQDTCLKLKIDWLGNIEFA

SEQ ID NO: 15380 - protein, 1042 aa, unidentified
  REGION 1..1042: note = Cas Enzyme sequence
MRFSFDLGTNSIGWAVYQTVESETGESLAPVALCDAGVRVFPDSRDPKSQQSLAADRRKARGMRRRRDRYVQRRGYLMNALVECGLMPKDEAQRKELESLDPYDLRARALDEALPAAHIGRALFHLNQRRGFQSNRKTDAGDQEAEGMKAAIEKLAAQLQGEGARTIGEWLAGRHQGAVDVRFRGKQVGNKMEWEFYPQRAMLEHEFDAIWAAQAAHHPALLTDAARGRIRGIIFSQRPLQPVPAGKCTFEYDEDRAPKALPTAERMRILQDLNHLQARAFPTAQLQPPTLEERDKLFRRLKTGSPMNWKAVCKALRLPDTATFNLQSEKRTELKGDETARRLGVAKKKNIEAADLIGKRWHDLPLATQDEVVLKLLGDDDDDTVCAWLMDKLNITDTQARHMAGTSMTPGYARLSKKAMDKILPHLEGEVITYDKACDKAGYDHTGQVEETGEVFNRLPRYQEIEAFNRQLAGSGDPNDPYDKRYGRYPNPTVHVGLNQLRRVVNALAEKHGVPSEIVLEIARDLKNSKKARDDIQKRQKQNQDANEKRDDKLRELDLPASGENRMRLRLWEDLNPDDPLDRRCPYTGKQISSTMLFSGEVDLDHILPWSRTLDNSAANRTVCTREANRLKGDLSPAEAVERGIFRQDDINRATANLPGNKKWRFADDAMERYENAERNFLDRQLHETAWLSRLARIYLSNMCHKNHVWVVTGQLTAMLRGKWGLNGILGDGERKHRNDHRHHAIDAAVIGAIDRGMLNRAARENARKESDVELKLDIAPPLDDFRDHVREAVERIVVSHKPDHGIGGQLHEETAYGIVQDPEAEGGMTLVARKPVVGLTKAEIKRIRNPRIRDELLALTEHASAKELPEILAEWSRDNNIRRLRILKKEQSFIKIDDRQTGAAYRAVIAGENHHLDVFEMPDGKLAFRVATVFQVNQPNWRADAPQGGRLVMRLHKGDMVKIDGADGARKVMRVQQVKVMAKQVVLVPHNEAGDFQKRHDDPNDSFRWEFFGFGNFIKRRLRPVIVSPTGKVKRRRPPAK

SEQ ID NO: 15381 - protein, 1047 aa, unidentified
  REGION 1..1047: note = Cas Enzyme sequence
MSLRFSFDLGTNSIGWAVYRTNPPENGGKTGVLVELCDAGVRVFPDSRDPQSQQSLAADCRDARSARRRRDRYIQRRRHLMSTLVKCGLMPENEAKRKALENLDPYNLRARALDEKLEPHEIGRALFHLNQRRGFKSNRKTDAGDKEAEGMKAAIEKLEEKLRDENARTIGEWLGRRHQGRGDVRFRGKQAGQKMEWEFYPQRAMLEREFDAIWEAQKHHHPALLTDAAQDRIRKIIFHQRPLKPVPAGKCTFEAEEDRAAKALPTAERVRILQELNHLHVRPTPAAEQQPLTLEERDKLFDRLKTGSAMKWKAVCKALRLPDTATFNLQSEKRKELKGDETARRLGVSKRKNIDAADLIGKQWRDLPLATQDEVVLKLLGDESDDSACKWLVDKLGINRAQAQNMVNTSLPPGYARLSKKAMDKILPCLGSEVITYSEACKEAGYDHARPIEETGEVFNRLPRYQEIEALNRQLAGTRDPKDKDKPDKYYGRYPNPTVHVGLNQLRRVVNALAEKHGVPNEIVLEIARDLKNSKKARDEIQKQQKKNQDANEKRNTKLRELGLPENGENRMRLRLWEDLNQEDSLDRRCPYTGQQISNGMLFSGEVDIDHILPWSRTLDNSAANRTVCMLEANRLKGDWSPAEAVERGIFKQSDIDCATANLPGNKKWRFSRDAMERFENGERDFLDRQLMETRWLSRLARTYLAHMCGKNHVWVVTGQLTAMLRGKWGLNSILGEGDRKQRNDHRHHAVDAAVIGAIDRGMLQRAARENARKETDADMKLDIAPPLEDFRDSVYKVVNRIVVSHKPDHGAGGQLHEETAYGVVEDPDAENGMTLVARKPVGDLTRPEINRIRDTHIRQELQDMTRDIAAKGLPGILARWSEKNGIRRLRVLKKEQSFISIDDRKTGKPYRAVIAGENHHLNVFEMSDGSLEFRVATVFQVNQPDWKAEVPDGGRLIMRLHKGDLVKIDGKSGNREIMRVQKIQPSNRTLALVPHNEAGDYQKRHDDPNDFFRWEFFGFGSFQKRRLHSVTVTPTGKVKRRLPPEK

SEQ ID NO: 15382 - protein, 1047 aa, unidentified; identical to SEQ ID NO: 15381
  REGION 1..1047: note = Cas Enzyme sequence

SEQ ID NO: 15383 - protein, 1098 aa, unidentified
  REGION 1..1098: note = Cas Enzyme sequence
MQVHDDVILGLDIGVGSLGWALLEEDLQTGEQRLLQRQTPQGETTYALGVRLFHVPENAKTKELLNVKRRTARMQRRTTARRAQRMRRVRALLDSLGVPGVRDADAFHLGKGRGAQCDPWQLRREGLERRLEAREWAVVLLHIAKHRGFRSNSKTDRSGSDKEMGQVLQAVSNLQQEVEASGLTVGALLASRERRRNRADHTGAPRYDLCMLRSLQENEVDILFTRQRELGNPLAGEEVRCRYAELAFAQRPLAPVSHMVGPCAFLEGERRAPRFAPTAELFRYVQALCNMRLRQETGEETPLSEEQRQAACAVFGSVQSVTYKKLRQVLRLPAGCRFAGLSYGVTEKGNVQDPEKADVVMRTGKCCQGTACLRGILGDAYEALHEQRLDEADAARLAATGALFAPAAALLARGMAGLRLTDAVARIVSELNDLDQIRAVLALLPLAAPRIAALSQAAGEGKLGIFQGTARLSLRAMEAILPHMLACGEYAAACELAGFDPRAAQKTDVTDIRNPVVLRVFREVRRQFSAICREFGFLPGRVHVELLREVGKSGEERNRISRGLERRTKEKEAARKAVAQLLGKSPEMVSAGEVQRYELWRQQDGKCAYYMLWRHAGGERAYGDAMPQGSIPPDWLADGVNAVQVDHILPRSRTFDNSFHNLCLCCHAANQAKGGRTPWEWLGAAQPQAWHDFEQWVQSLPLKGLKKRNYLLRDLNAEVQGRFHARNLTDSGYVARLTLRWLEEEYARHDVPMQDADGRTRRRFFARPGQVTDFLRRHWGVQALKKIDGQRSGDRHHALDALLVAACSEGMLQRMVRAFQREENGPERLHIPCPWQDFSATVGRALGSVFVSRVERGRTKGPLHEETLRAIREERQPDGETRRVLYERKAVARLTAADLDKIKDAARCPDVVAALRRWLDAGKPGDALPRSAHGDIIRHVRVCAGEFSSGVVLQRGSGQAQASNGGMVRTDIYSRDGKFYMVPVYAKDVADKRLPLRACVAAKAEKDWREMTADYRFLFSLTPDCYVLTENRKGEVKEGYFAGANRNTSAISLSLAHDKQNVIQGIGITTLKRFEKYRVDRFGRLSLVRREADPRGRS

SEQ ID NO: 15384 - protein, 1137 aa, unidentified
  REGION 1..1137: note = Cas Enzyme sequence
MQKLLFSFDIGHASIGWAVMDITAERLPAIKGCGTVLFPTDDCLASTRRQLRRQRRHIRSTRVRIARMKRLLGQLGVLTPSQLDEPGGPWPWKLASRVHAGGPLLSWRELWDVLRWYAHNRGYDGNEKWSRDEEETEQDKKKWQAALGLMEKFGKATMCETICAKLKVDPLSDDKKTSPIAYKTSNAAFPRDVVRDEVITLLEKHVGKLPQLSPALITALCAEDNTPKDGQSVREVLKQLGFDIHLPGRFVGGLLFGQAVPRFHNRIIGECPVSGEKRPLKDCREYLEFRWAEILANLTVRRTKDGEKVPLSSEERKALTAIARKEGGFTAGEFKKAVLEVTKAEASNADLMMTHPDAADALVLDPALRFTKTNGMLKAVWEDLPAVLQKRVLGRWNKRRRVSWAWLLQQPEAPNNLETQLQAAWKETKRKPRKGEDEAKWEDRVKQSLAPVFPSGRAPYGREVMKRVVEQVMEAKMHPRENGGVLDAELIKKHDLTKEIDDLTNNHLVRHRLKILLRLTDDMVKTYANGDPTQVDKCAIEVARDLMEFSGKTNYDIKAELQGRLKDFESAAEKLEEAIVGTGRQISAELIRKTRIAQDMSMTCPYTGHTYCMKEVIYGKVEKEHIIPRSKRPSDSLDSLVLTFPEINREKKDLTALQFIRAFQGKKFKTCCGTLEIWTESKYRAFLEKHGLDPKSKPTRKEAARRKIHFDDLVRNWKRRAKLELESYEDREFTPRDLTLTSHLSRLAARSLEQYFSFPSQVRQRIHGGTPRKCEIRPFDSPEKTPVMIAIPGSVTAETRKAWKCLGCIGPACPEVMQEVQDLDKNGELKFDKAGKPVMKSVVKPKGEIRSITHLHHALDACVIAFASHFMPKDGKLWEQIVTKKVLKHDEEAFRERYGWHGLLKLAEPKDENARGKTRKLEVLDLPDTFKKQIIEALKERRVVQHVPADMSGARLEMNTWRVVKVESGKVTLRQRTFAPKDVDSETGARARRWKPDEIVDESRVLGLRPGKLKALSGALVIAENYGVVVLPEPVMIPFHNVKERMADVAAQNNGNLPLVIRSGMLIRVPDGDFKGVWRVRACMKDSTKGILFDLSLADRVEYRAKGVPWCRRDVRLKSLLKAGMVRVDTGYCGSPS

SEQ ID NO: 15385 - protein, 1051 aa, unidentified
  REGION 1..1051: note = Cas Enzyme sequence
MGTSSLGWAVVELKSNQDSENQKFVPADVIDLGVRIFDDGRDAQTNEPLAVGRRNARSMRKRRDRMLRRKQYLLHTLQNAGLWPVDKEKQSKLIGQNPYEIRCRALDQKITPFELGRALFHMAQRRGFKSNRKVDKDDSSSNMKQAIGVLESKIATSGARTLGEYLYRLRPDERTVPHKQQPSLRVRTSMKGSKTEYSIYPDRYMYEAELRAIWERQKEFYPNMLTDDLFQKIHRTIIEQRPLAPQEVGVCQFEEGEKRAPKASPYFQRARILQDLNHLELVSGTLSPENREKVKKLLLTKKEVRFDDIRKKLGLPPSAIFNLEANERRKIDGDLVNSFMGNKNAFGEKWDKLTIDQRHEVISLLLAEHEDEALSALLMQNPYNLSEEQAGRVLHLTPRLPNGYGSLSVKALQKIIPFLEEGARYDEACQKAGYHHSYLAVKEFAKLPYYGVVLDKAVIGASKNPKEDPSNPANNLDDTIGNWERYAGKINNPTVHVALNQTRKVVNAIVEKYGRPTQIAVELARDLKMSQKEKLTFTRRQNENTKRNEKIMTELEQLGLPNNYENRMRYKLWEDQARDPQHRVCPFCGKVVSISELFAPVFEIEHLLPFSRTFNDSHTNKVISCTSCNRDKFNKTPFEAFGHDTQRWEKILDRIKDYPFVKQRAFREDSLSDEKEKELIARQLNDTKYMAKMARQYLGCVCEDGNVRPIPGGMTAHLRHAWGLNPMLGDPDDEKERDDHRHHAIDAFVVACTSWGMLKQISILSGKGIKRVHFPPKPFDEFDYSQFQDMLERTVVSHKIDHGGVGTAILTHRTTGALHEETNFGFAKQLDEKYALFSTRKELASLVKDKNIETIANRKIRNNVQRLLAGISDEKVRKARLLNFARKNNIRRVTVCEKRDISTMIAIRDKNTGRPYRYVSGGSNYCTDIYCPNRGPQKGKWCAETISTFDAHRKDFIPAWKKAEPEAKLIMRLFRNDTMAYDEDGKRIIARVKKMSGGNVVLIAHNVASPKEEGRKISANRLKDLNARKIKIDMLGKVLDPYRMGSTQTKE

SEQ ID NO: 15386 - protein, 1070 aa, unidentified
  REGION 1..1070: note = Cas Enzyme sequence
MATRLGLDIGTNSIGWCLYDGDSIRDIGVRIFSDGREPSKLTVSGSGTPLAVKRRDARGARRRRDRYIGRRSAMLRELRKHGLLPADPKQAKALETQDPYALRVRALDEKLEPHQIGRALFHLNQRRGFKSNRKAERASKAGEDGKIATATKLLDEEMQRLGARTLGEFLVKRDSEFDGEAGKRVRMRADSKAYDFYPDRRHVLDEFRAIWNAQKVWHPELLTEQAWNDIFRVIEYQRELKPQVVGHCTFAGINGVPADEKRLPKAHPLFQQRRLYEEVNQLKVVAPGEAGRPLTRDERDALILKLQDKKSVSFETLGKTLKLKDGERFNKESENRKALDGDEVRAALSGKKLFGTRWFHFSAEEQWMIIERLLEEEDSETLLTWLKIGYRLDDEAALAVANAKLPEGHGRFGLSATTALLKELKADVCTYAEAAKRAGFHHSDFRTGEVFDQLPYYGEILAREIAPGKPEYGDENERRFGKITNPTVHIGLNQLTKLVNAIIRLHGKPDYIFVELARELKLNEKEKIAYNRQLKENTDAARDRGAKLGTMGVRDTGRNRLILRLWTELNPGDALNRRCPFCGEQISQRMIQNGEVEIEHIIPYSQCFDDGIGNKVLSHVRCNRQKGDQTPWERWGHDPDRWSIIQEQVAHLHRSKQWRFGPDARDRYAAEEDSFLPRQLIDTQYLTRIAAKYLACLYPERGERHVFAVHGGMTAMLRRLWDLNSILLDHNWVENLNSNAPKNRLDHRHHAIDAAVVGIMTPGLIAEIAKAAARAEKQNLDRLFEELPMPWAQHPNDRRFRDELREKILAATVSHKADHGRQGKPERGRDITAGKLHNDTAYGFTGLTSDTGLPVVVHRVPLTSLTPKDIADPDRIPDTTLRDSLWQATRDLSGKEFEKALLDFSRTHAQFKGIRRVRVREGLTLIPIRNHAGKPYKGYLGDSNARYNVWQMPDGRWVHQVISTFDLHQPGFIEQRPHPAAKKVLSLRQNDLIAIERDGALRQIMRVQKYGQNGQIFLIEHNEAGNMAERNKNTDDPFKFYGPGASALRNMKARQVRIDELGRIFDPGPR

SEQ ID NO: 15387 - protein, 1038 aa, unidentified
  REGION 1..1038: note = Cas Enzyme sequence
MVEYSDPRDFGFRPETVMTALMPYEQYSSKTRRLILGIDMGIASVGVCLIDIRNHEIILMASHIFKAPVEGKQKDISARQSGASIRRGYRSVRRTTKRRKNRKKAVRDIEKKYVLIPDDADGQWFAIRKGEPDVLHLRGKALLYKLNGRELARILYAFAGRRGYIDHGKGTTDNDSGKVKKALSENRKILDENGYETIAQYLLKQPTSRNREGDYRYMVDIEMVTDEIHTIFRHQRDLGSDIATEELEGEYLSALRWLTDTSARDEKIYGRVGYCTYLGAPEKRAASSLISFEMVRAYEKLSNIKIEHQGREATYISPEKRNEIVASLFAVSKNPKPLKWSQLREKLDMQSSDSFDSRLPTDEKGDCIKIPAWNALCTGLFMSNRALLDRFHDDTDAADAVCSALTYASSGESLRNALENLSLDLSEQDIDSLLDLPYASKLFSGYCSTGVRALQMLRDAFKDPQIEKLYDAEKATGLYEARQALAAARNESRDRLLCPYLEFDPTCTNPVVLRATAQVRRMINSIIRHYGLPDIIRVEVAKDLKRSKHEKAIIAATNKANKDSNEQAKKDLVAFYGLPNDAHVSSADFEKMWLYREQFGQDPYTGKGINLERMLNDRDYVEIDHILPFSRSCDDSKSNKVLCLTKSNRDKANRTPYEWMTSGEPSAPDFGDFCRRMDAWAGKGKSAHYTKSKLSKLKNSTFGKEEQKFIDRNLNDTRYMSRQLAMWVRECLPFPDDRRQHVFCVAGAATSLMRRIWGIGIVDEKGKKDRTDDRHHAVDAAVIACCSPEIVKGIARVNSGRSNIKERERLRYESMPYSEFKAQVEAWIPCIVPTRTVSRTATGSLLKDTVYPYVGVDDRGKDLYRRNGKIEPASTLWKDGGGGCKLYDGIYGLMAVFDENMKKSGRWRFDPVYYIDVPNIRQDFIRKFTKDLSIDYWTKVQLKGDEPRIFLKQGDVLVQDGCAMRYYTYNVSNGAISSYSKIGKESVPLQKTGPLSEESFPTQSKWDSSLTLMQEDCLGLCWLRFLSARADQFENSLL

SEQ ID NO: 15388 - protein, 1125 aa, unidentified
  REGION 1..1125: note = Cas Enzyme sequence
MPERLFSFDVGTNSIGWCVFNLNQFKEPIEIVDAGVRIFADGREPKSGNSLAEGRRLVRSMARRRDRYKRRRKAVLRTLTEYGLMPRDPQARAALVAQTNDAKRGEPANDVYALRARALDETVPLHLLGRVVFHLQQRRGFKSNRKADRRSKDNEVGAITLGEDRLRAAMSEAGARTLGEFLAGRRGSDPTTRGNVRVRIDAEASTAEGRREKPGYDFYPVRAMLEDEFEQIWDKQAGFWPDVLTDERKRHLFRVMFYQRPLKPPVVGKCSFNPSEERLPKAHPLFQQFRLYKEVNELELVMSDQSHRKLTLDERDALVAHLRGVRSAGFSALRRTLKLSERSVRFNKEYEGRDKLLGDEIHAVMSDKALFGNRWSAMPTEQQWEIIEKLREEGDPLVLHQWLVEHTGLSDEAAEKVADAKLPEGYGRLGASAISAVLDELVNGVAHDETGREVPVVESEAIQRVFGKHQPDKLKADGLLPKYQEILQRRIPPGTNDPDDEYDIRKGRITNPTVHIGLNQLRAVTNRLIARYGRPERIHLELARELNQSAEQKRDATARNARDRRDAERRSALLREFGQADNGFNRQLLKQWEELNPQNPLDRRCIYSGTVITPTMLFSGAVDIDHILPWSRTLDDSQANRILCTREANREKRNFAPAEVPAWADRYDDILERAQRLPPNKRWRFARDAMDRFEKDRDFLDRQLTDTQYLARLAHDYLGALFPDEEVDEDGVVKRRNHIVVVTGRMTEMLRRKWGLNGILPDHNFADPTKVKNRKDHRHHAIDAAVIGVTSRTLLKRVADAARDGEAQGAEDALRTVAPPWPHFREDLKAVVDRIVVSHKPDHGTLPRKGEFGRTAGQLHNDTAYGLTGEVDARGNPIVVRRKPFLSLQPKDLPAVRDEELRSALENATRGLSGRDFTAALMKFRQAGGHHYKGIRRVRMVESLSVIPICDKDGRPYKGYKGDANFRYDIWEMPDGRWVADVVSMFDAHRPGVDWQKRRPHPAARKILSLKQNDMVAYDDPRRGPTIGIVVKFGQNGQITLVPHNEAGDLKSRDALPNSVEEALARGAEPDKDGFVAFDPFKYYAPTASGLKKIGLRQVRVDEVGRVFDPGPRDVKSARAQAAGN

SEQ ID NO: 15389 - protein, 1036 aa, unidentified
  REGION 1..1036: note = Cas Enzyme sequence
MVTKSVTFCQSFSSGMDWGKTLKSLGIDLGIASCGWALIETDVAQGQIIACGARTFDAPETDKERTPTNQLRRQFRGMRRVMRRRRQRMAQLRMLFQENGLLTDAKRDALRFPGLDPWQLRVAALDRRLTPEELAVTLGHIARHRGFRSNKKNQGNEAGDDGRVLKAAAANQEILSKYRSVAEMFDKDDRFARRKRNRDGEYTQSVNRIDLEHEARLIFSRQRALGSAHADVHLQEKFAELAFNQNPLADSEDKVGFCPFEKKERRAAKRAYSFEVFRFLSRLNALRIGDARQERALTEAELAAAMEGFGSQRGMTFARLRKLIGLPDSEAFRDVPRDEEGGRDVVNRSAGNGCMQGSATLRAAIGEHNWKTLLQRPEKLDEIAFIITFRATPESIEKGLFEAGHDPDMTHAIMAAVEKGAFASFTGAGHVSAKACRAIIPGLQRGLVYSAACKATGFDPTARPVTEISSINNPVAKRAVFEALKQVKAIIAKHGKPDRIHIEMARDVGKSKEERDKITSGIEKRNKERNTLRAAFNDTVGGEPSGPEDMLRFELWTEQKGRCLYTDQAIPPSAIRAKDNSVQVDHILPWSRFGDDIFINKTLCFAKANQEKKGRTPFEWLKDDPERWAKFVACVETNKGMKGRKKRNYLLRDASAAEEKFRSRNLNDTRYACRILMEHLAREYFEGTKHMVVGRPGALTDKLRRAWGLQDLKKVLEPDGEKRKHDDRHHALDAIIVAAITDSAVQRLTQAFKESEDRGSHRDFADFPPPWPGFIEDVRRHFREILVSRAERGRARGEAHAATISQLKQTDDGPVIYERKAVDKLTLKDLERVKDPDRNAALIAALRAWIEAGKPKSTPPLSPKGDPIRKVRLITTDKPAVAVRGGNAERGEMVRVDVFRKANKRGVFEFFLVPIYPHQVADEKEWPAPPNRAARAAPTEDQWSEITAAHEFIFSIGPRTFLEVEKRDGTIIDGYFMGMDRATASIAISAHHSTKNVKKSIGVLGLKRFEKFRIDRLGNRHAVPQETRTWHGAVCT

SEQ ID NO: 15390 - protein, 1020 aa, unidentified
  REGION 1..1020: note = Cas Enzyme sequence
MDWGKTVKSLGIDLGIASCGWALIETDVAQGQIIACGARTFDAPETDKERTPTNQLRRQFRGMRRVMRRRRQRMAQLRMLFQENGLLTDAKRDALRFPGLDPWQLRVAALDRRLTPDELAVTLGHIARHRGFRSNKKNQGNEAGDDGRVLKAAAANQEILSKYRSVAEMFDKDDRFARRKRNRDGEYTQSVNRIDLEHEARLIFSRQRALGSAHADAHLQEKFAELAFNQNPLADSEDKVGFCPFEKKERRAAKRAYSFEVFRFLSRLNALRIGDARQERALTEAELAAAMEGFGSQRGMTFARLRKLIGLPEGEAFRDVPRDEEGGRDVVNRSAGNGCMQGSSILRAALGEHNWKTLLQRPEKLDEIAFIITFRATPESIEKGLFEAGLDPDMLHAIMAAVEKGAFASFTGAGHVSARACRAIIPGLQRGLVYSEACAAAGYDPTARPVTEISSINNPVAKRAIFEALKQVKAIIAKHGKPDRIHIEMARDVGKSKEERDKITSGIEKRNKERNTLRAAFNDTVGGEPSGPEDMLRFELWTEQKGRCLYTDQAIPPGAIRAKDNSVQVDHILPWSRFGDDSFINKTLCFAKANQEKKGRTPFEWLKDDPERWAKFVACVETNKGMKGRKKRNYLLRDASAAEEKFRSRNLNDTRYACRILMEHLAREYFEGTKHMVVGRPGALTDKLRRAWGLQDLKKVLEPDGEKRKHDDRHHALDAIIVAAITDSAVQRLTQAFKESEDRGSHRDFADFPPPWPGFIEDVRRHFREILVSRAERGRARGEAHAATISQLKQTDDGPLIYERKAVDKLTLKDLERVKDPDRNAALIAALRAWIEGGKPKSTPPLSPKGDPIRKIRLITTDKPAVAVRGGNAERGEMVRVDVFRKANKRGVFEYFLVPIYPHQVADEKAWPTPPNRAARAAPTEDQWSEITAAHEFIFSIGPRTFLEVEKRDGTIIDGYFMGMDRATASIAISAHHSTKNVKKSIGVLGLKRFEKFRIDRLGNRHAVPQETRTWHGAVC

SEQ ID NO: 15391 - protein, 1074 aa, unidentified
  REGION 1..1074: note = Cas Enzyme sequence
MASVGWAVIELDPTQREGAITACGSRMFNSPEGQSSTGKPILKNAERRTHRGQRRIVRRRRQRMAEIRRLFAQYGVLENDHRDALSNAGTDPWELRAQALERALQPRELALALGHIAKHRGFKSNRKGEKIPNRPNEHAGAKAKSTEEKEKQGTLLGVARTKQRLEEHSEDHPVYRTVGQMFARDPRYAGRKRNRENDYTRSIGRNELEDEVKMIFAMQRRHGNRLATSELEKAFTGIAFYQRPLQSSLDLVGECPFVAGEKRASAFAPSFEKFRLLSKLATLRIVRDREARPLEPDQIAAALAVYGTTKGYTWQALRKALGLSDEARFDRIGPSKEGNDFVRSKGAALGTKTLVDILVPAIGGVETKSLLARGEPLDQAMAAIAFNEDIAEIREALIEIGLSGKAVDALSEAALDGAFNFVKGAGHISSAAARRLNPHLQRGLRYDQACAAEGWDHAEQREWKLGDIRSPVAQKAAREMLKQVKVLEREYGPFDRVHVEMAREVGKGIEERGRIESGNNRRRAERQKAEADLKECLKIDHVSGEDILRYELWKEQNARCLYTGRGIPPQSILASDNTVQVDHILPFSRFADNSFLNKTLCFTKANQDKKDRTPFEWKDAEDPADWERFRAEVDSLKGMKGIKKRNYLMMDATERENTFLERNLNDTRYALRVVLGLLRRAYPDFEDGAMPDGKPRMRRQVYARPGAITSALRRVWGVESLKKDENGERKPDDRHHALDAIITACCSEYLLQQATRHAQRQERRGEKFELRDLPPPWGEPEAFRREVEHAVGGVFVSRPESGRLRGKAHDATVKQIREVDGEETLYERKAVGDLKPDDLDRIPVPEPYGKVADPKKLRDRMIENLRSWMEAKADLEARIKAIKGKSDEKTALQEKLASLKPLSPKGDVIRKVRLESRSKKAVEVRGGSADREGMVRLDVFARSNSNGIKRFFFVPIYRYEVVSERTAPRRYFKRGTHNSEWPLLDNEHIFCFSLCPGSLITFSTADGLMTAYYRSFDINDGRVSYSEHHDYRINTQRRLATTTLAELNKVHVDRLGNIHEIKQETRTWRGKACI

SEQ ID NO: 15392 - protein, 973 aa, unidentified
  REGION 1..973: note = Cas Enzyme sequence
MNRVRELLTRHGALPVAERDALAEAARRLAETSPDGRASPWRLRAAAHDRALSNDELAVVLGHIARHRGFRSNSKREAGANAPDETSKMKKAMEQTREGLAKYRAFGEMIASDPKFAERKRNRDKDYSHTPKRSDLEDETRAIFAAQRRFGQRAASDALESDFADLAFSQRPLQDSETLLGDCPFEPGEKRTSKQAPSFELFRFLSRLVTLRLTTGRMDRALSADEIARASRDFGQATKGVTFTALRRKLDLDPNARFAGVPADREKNDVAARKGEAAAGTHALRQALGEAPWASLMRTPEKLDRIAEVLSFREDFARIAEGLREIGLDPLVCERLLDATRDGAFSQFGGAAHISAKAARAIIPGLREGLDYSEACARVGYDHAARPIVALKDINSPVARRAFLESIKQVRAILRAFGPIDEVNIELARAVGKSAEERAKLTQGIEDRNKEKDRRAREASDLLGATVSADELLRYELCKEQNFKCVYCDAGIAPDGFSANDARYQVDHILPWSRFGDDSYRNKTLCCVACNQHKRGRTPSEWFDEDKTPGEWEAFAARVEGFKEMKGLKKRNFKLKDAAAVEDKFKARNLTDTQWATRLLADELKRMFPSKGDERRVFTRPGAITSKLRRAWGLEGQKKVDGARVADDRHHAIDAIVLAATTEGLLQWMTGQVQQREREGRGDDIFHVAQPWRGFREDSIRAIYGEGGVGGVFVSRAERPRARGKAHDATIRQVREIDGEAVVFERKAIEKLTEADLDKIPVPAPYGAVVDPMKLRDATVAALRAWIAAGKPKGEDKLPRSPKGDIIRKVRVESKNKVGIRLNGGAVDRGEMARVDVFRKANKKGVWQYYLVPIYPHEIATMDAPPMRAVVAYKDEGDWAVMDSTFEFLWSIESMVFLQAVKTSGEIVDGYFRGLHRGTGAVALSSHKNSEEVATGIGVKTLASFKKYRIDRLGLSRTEVTREVRTWHGKACT

SEQ ID NO: 15393 - protein, 1029 aa, unidentified
  REGION 1..1029: note = Cas Enzyme sequence
VRIFGIDGGIATIGWAVLDQSSDSMTIVAAGTRTFDAPETDKERTPTNAVRRLHRGQRRVIRRRRLRMNELRRLFHGAGLLPDATRDALAPRVGEPRTDPWHLRAQGLDRALTGAELAIALGHIARHRGFRSNAKREAGANAADETSKMKKGIAAIQERMAGHRSVGEMFAKDFPDRKHNRGLNFDRSILRSDQEHEVRDLFAAQRRLGNGAATEALESQFASIAFFQRPLQDSEHMVGPCLFEAGEKCTARRSYAFEMFRLLSRLAALKLSTRGHDDRTLNAEEVALASADFGRQKKLTWKWLRKTLDLDPSVRFAGVTEKDESNDFVARSGNAAEGSYTLRELLGDAGWRVMMHNPVQRDRVAEVLTFREDPGSIREGLIQAGVEPLIVDTLMHGVDIGAFSQFTRAGHISAKAARRLIPPLSQGKVYSAACEDIGYDHAARPEVSLEDVRNPVARKAVTEMLKQVRAMMHAFGGLPDFIHVELARDIGKGVEERDKISKGIEDRNKQRDRLRKELEETILGRTASLEDLVRYELWKEQNGFCLYTGDYIEPSLIAAGDNRVQVDHILPWSRFGDDSFWNKTLCMAAANQAKCGRTPFEWFEADKPEEWALYAERVERCKEMRGRKKGAFYLRKNAKEVEDTFRSRNLNDTRYATRLLLDLLARLYPVDGKRHVLARPGPLTAKLRRAWGLDDLKKDEKGNRLDDDRHHALDAIVVAATSESWLNKLTKAAQKAERQGLRRGWDFDQVPLPAHGFREIVREVVEGVFVSRAERRRARGEAHAATIKQVREVDGKDVVFERKLVEKLSLQDLDNIPVPAPYGKIADPGKLRDELVAELRRWIEAGKPKGDLPKSPKGDVIRKVRVASKDKVAVSVRGGTADRGDMARVDVFAKASKKGKREYYLVPIYPHQVADREKWPVPPDRAVVAYKDDAEWAPIDSTFQFLFCLYGNSLLEITKSDGEVIFGYFKGVHRGTGALAIAPHHDARSIRGGIGAKTLLSFRKKTVDRLGRHVVIETEVRTWHGEVCT

SEQ ID NO: 15394 - protein, 1080 aa, unidentified
  REGION 1..1080: note = Cas Enzyme sequence
MRVLGLDGGIASIGWAFIEIEENNDGKSARGGIIDAGTWMFDAPEEKSQTGTKLKSELRRTFRGQRRVIRRRRQRMNEVRRILHRHSLLPSAERDALKQPGLDPWKIRAEALDRLLSPVELAVALGHIARHRGFKSNSKGAKSTDAADDDSKKMKKAAASTQEKLARFETPARMMCEDESFLVPGTDVRRFRNREGDYSRSLMRDDLAAEVRALFRAQRRLQADHATKELEDEYMDETRENGAFHQRPLQDSEKLVGPCPFEPEEKRSPKRGYSFELFRFLSRLNHLTLREGREERTLTVDEIRTAAADFGVTAKFTFAALRKKLRLPETTVFVGVKTNEEKNDVVARSSEAAAGTARLRRIIVDALGELAWGALVNAPERLDKIAEIITFRNDLDRIREGLQAAGFYAALIEALVKAAGNGALDAFTGAGHISAKAARNIIPGLYKGLTYDKACAQAGYDHTASRERNAFDVGVHGKEALKKILQEERISRELVGSPTARKALIEAVKQIKAVIEKYGVPDRVHVELARDVGKSIDERREIHFGIEKRNKQKDKLRELFEREVGRAPQDGDRGKEELLRFELWNEQKGRCLYSDAYISPTQLVASDNSVQVDHILPWSRFGDDSFLNKTLCTAKANQEKKGRTPYEWFKTDKTEADWDAFVARVESIQYMKGFKKRNYKLKTAEEAAEKFRNRNLNDTRWTCRLLAEALKQLYPANEKNAKDEGVRRIFARPGALTDRLRRAWGLQWFKKNEKGERIPDDRHHALDAIIVAATTESLLQRATREVQEIERKKAHYDPAKNGYDLMKNITAPWPDFREQALEAVEKVFVARAERRRARGKAHDATIRHIATRDGEQKAYERKKVADLKLSDLERVKDADRNAALVESLRKWIAADKPKDNPPLSPKGDPISKVRLVTKNKVNISLDTGNPDRLATVDRGEMARVDVFRKANKKGKYEYYLVPIYPHEIATMDVPPTRAVQGGGDDDKWPEIDSTFEFLWSINQLSLLEITKPDGEVIRSYFRSLDRNTGALTVSDISNSTATRKGIGTRTLLVFKKLHLDRLGRIFEVERELRTWRGKVC

SEQ ID NO: 15395 - protein, 972 aa, unidentified
  REGION 1..972: note = Cas Enzyme sequence
MNRVRELLTRHGALPAADRDGLAEAARRLAEAQADASPWRLRAAAHDRPLSNDELAIVLGHIARHRGFRSNSKREAGANAPDETSKMKKAMEQTREGLAKYRAFGEMIAEDPKFAQRKRNRDKDYSHTPKRSDIEDETRKIFAAQRRFGQPAANEAFERDFAKLAFSQRPLQDSEKMLGDCPFEPSQKRTSKQAPSFELFRFLSRLVTLRLTTGRTDRPLSPDEIARASRDFGQATKGVTFAALRRMLDLDPGARFVGVPVDREKYDVATRKGEAAAGTHALRQALGDAPWASLARTPEKLDRIAEVLSFREDFARIADGLREIGLDPLVSERSLEATRDGAFSHFGGAAHISAKAARAIIPGLREGLGYSEACARVGYDHAARPTVALKDINSPVARRAFLEAIKQVRAILRAFGPIDEVNVELARAVGKSAEERAKLTQGIEDRNKEKDKRAKEALEILGATASPDELLRYELCKEQNFRCVYCDAEIAPRGFAANDTRYQVDHILPWSRFGDDSYRNKTLCCAACNQRKRGRTPSEWFDDDKKPGEWDAFAARVEGFKEMKGLKKRNFKLRDVNREVEDKFKTRNLTDTQWATRLLAIELERMFPPKAKERRVYARPGAITSKLRRAWGLEGQKKVNGERVTDDRHHAIDAVVLAATTEGLLQWMTKQVQQREREGRGDDIFHVAPPWRGFREDSIRAIYGEGDVGGIFVSRAERPRARGKAHDATIRQIREIDGEEVVFERKAIEKLTEADLDRIPVPVPYGAIVDPKKLRDATVAALRAWIAAGKPKGEDKLPRSPKGDVIRKVRVESKIKVGIRLNGGAVDRGEMARVDVFRKANKKGVWQYYLVPIYPHEIATMDAPPMRAVVAYRDEGNWPVMDSTFEFLWSIESMTFLEVVKSSGELVEGYFRGLDRTTGAIALAKDCNPDDLSRGLGVKTLSSFKKFRVDRLGLSRTEVTREVRTWRGRACT

SEQ ID NO: 15396 - protein, 1052 aa, unidentified
  REGION 1..1052: note = Cas Enzyme sequence
VAERILGIDLGIASCGWGIIEFATGAGRVVSAGVRCFDAPLVDKTGEPKSAQRRAARGARRVIRRRRQRMSAIRRLLHEHGFLAESSPDALHSALKRISPVGAHPPITPWSLRAAAHVRRLTKDELAIALGHIARHRGFRSNSKREAGANAADETSKMKKAMEATREGLAQYRSFGDMVANDPKFANRKRNRDKDYSHTAKRSDLEDEVRAILSAQRRFGNTALSDEFAAKFAERAFSQRPLQDSEELVGKCIFEPDEMRTARRAPSFELFRYLSRLAHLRITIGRTERPLSPEEITVAAIDFGVSTKTITFKALRKTLDLDPNARFAGIPADKETLDVAARTGGAAYGTKTLRDALGEAPWLSLSKTPEKLDRIAEVLSFREDLGSIRDGLSEIGLDTLVVDCLIDKTNEGAFKDFTRAGHVSALACRNIIPGLREGLVYSDACTRVGYDHAARPQFDLKDVNSPVTRRAFSEAIKQVRAVAREYGPIDFVHIELARSVGKSAEERAKLTKGIEDRNVEKEKRRKEAADHLGRNVSDDELLRYELAKEQNFKCIYSGDAIDPRGIAANDMRYQVDHILPWSRFGDDSYINKTLCTTKANQDKRGRTPFEWFEADKTENDWTEYAARVEALKEVKGRKKRNYVLKNAAEIEEKFKARNLTDTQWVTRLLADELKQMFPSRPERRAADGAEERRIYARPGAITSKLRRAWGLERLKKNEAGVRVADDRHHAVDALVLAATTESLLQSMTKEVQNREKEGREDDIFHVTQPWPGFRMDVIRTIHGENGTGGVFVSRAERRRARGKAHDATIKQIRKIDGENVVYIRKAVENLTEKDLDLIPVPAPYGKIADPEKLRDEMVASLRAWIAAGKPKGEAKAPRSPKGDIIRKVRLATKDKVAVSISGGTVDRGDMARVDVFRKQNKKGKWEFYVVPIYPHQIATMDEPPNRAVVAYKSEEEWTLIDTSFEFLWTLNAMSYVEIVKPSGEFFEGYFRGLHRGTGAMNISSNKTLEKAGSNDGLGVKTLSSFKKFTIDRLGRKYEVLREVRTWRGKACT

SEQ ID NO: 15397 - protein, 1033 aa, unidentified
  REGION 1..1033: note = Cas Enzyme sequence
IDLGIASCGWGVIEAAENEGEIIATGVRCFDAPLVDKTGEPKSAMRRVARGQRRVIRRRRQRMNAIRKLLHVNGLLPDSSTDALHHALRRVSPANCNPQISPWTLRSALHERLLTNDELAVVLGHIARHRGFRSNSKSEAGANAADETSKMKRAMEATREGLAKYHSFGDMLANDPKFANRKRNRDKDYSHTAKRSDLEDEIRTIFSTQQRFGNKATTEKLAQAFSNAAFSQRALQDSEKLVGNCLFEQDQLRTARRAPSFELFRFLQRLAHLRISVGRIERPLTQEEIALASNGFGETKKTITFGSLRETLDLDPNARFAGVPKDKESKLDVAARTGGAAYGTKTLKDALGEAPWQSLVKTPEKLDRIAEILTFREDLDNIRKGLDEIGLDGVIVQCLLDAAAKGDFKDFTRAAHISALACRSIVPGLREGLAYSDSCARVGYDHAARPSVQLTEIGSPVTRKAFGEAIKQIRTVAREYGPIDLVHIELARDVGKSAEERREIQDGIEKRTAEKEKRRGEAAEHLGRAVSDDELLRYELAKEQNFKCIYSGDPIEPKGVAANDTRYQVDHILPWSRFGDDSYINKTLCTTKANQDKRGRTPFEWFDAERNEPEWMEYVARVEALKEVKGRKKRNYTLKDAASVEEKFKARNLTDTQWATRLLADELKRMFPVSEGERRVYTRPGAITSKLRRAWGLEGMKKVDDERVPDDRHHAVDALVLAATTESLLNRMTKEVQQREKEGRQDDIFHVRQPWPGFRIDVERAVRGENGTGGVFVSRAERMRARGKAHDATIKQIRNIDGEKVVFERKAIEKLTEKDLEKIPVPAPYGKIADPQKLRDDMVETLRQWIAAGKPKDKLPRSPKGDFIRKVRVETKDKVAVELSGGTVDRGDMARVDVFRKKNKKGNWEFYVVPIYPHQIATMEKPPDRAVKGGGEETEWAILDTNSQFLWSLYSMSFLEIVKSDGEAIEGYFRSLDRNTGAVTVSPQITSDEIRKGIGVKTLSSLRKFTIDRLGRKFEVSREVRTWRGKACT

SEQ ID NO: 15398 - protein, 1020 aa, unidentified
  REGION 1..1020: note = Cas Enzyme sequence
VRILGLDGGIASLGWAIIEEAEKGGRIIACGSRCFDAPETDKERIPTNQIRRQKRGARRVIRRRAQRMAELRRLLHAHGLLAGTQRDALQLGICPWQARAEGLDRALTTAEWASALGHIARHRGFRSNSKQDRGANAADETSRMKAAIAATQQRLGRYRSVAEMFATDPGFTARKRNRDGDYSRSVLRSDLEHEVRRLFEAQRRLGNALASEALEVAFSIVAFFQRPLQNSDHLVGACPFVTGERRAARRAPSFEKFRLLSRLNALRLTRPFAERLSVDELAFVEAAFGATKKLTFKALRKLLKLDAAVRFDGVGAEEEDRDLVSRSGNAAEGTAALREALGPLWGGLAATPERLDKAAEVLTFRDDLTAIREGLDAAELGEEATGAIMAALEAGKFSAFKGAGHVSAAAARAILPGLRQGMVYSEACAAAGFDHAARPTTRLADIRNPVARKALGEMLKTVRAIVRMHGLPDMIHVELARDVGKSAEERDEITRGIEKTNKQRDRNRDHFVELLKREPRADELLRYELWKEQSCRCLYTDEQIPAHALVATDNSVQVDHILPWSRFGDDSFFNKTLCLARANQLKKGRTPYEWFSAERTPKDWEAFSARVDGCQAMKGRKKRGFYLRKNAAEVEEAFRNRNLGDTAYTTRVLLDVLKGLYPDDGQVHVRARPGALTSKLRRGWGLQGLKKDAQGKRLEDDRHHALDAIVLAATSQSMVQKLTRAFQEAERQGLARDFSGEFVPAPWPGFRLDAEAAVAAVQVSRPERRSTPGEAHAATIKRVTPDAEGNPVVSVRKRVEDLKEVDLDRIPVPKPYGRIADPSKLRDLMIAAIREWWAAGKPKDAPPRMSNGDPIRKVRVETTDKPAVSVRGGTADRGDMVRVDVFRETDAKGRARFHMVPVYPHQLVALERPPARAVVAYKPEAEWTDVSGEGFEFRFSLFNNSLIEVTKPNGEIIGGYFKGLHRSTAALTIAKITSPSLISQGIGSKTLMSLRKLHIDRLGSIAEIPRETRTWRGAAC

SEQ ID NO: 15399 - protein, 1025 aa, unidentified
  REGION 1..1025: note = Cas Enzyme sequence
MRIFGLDGGIASIGWAVLDVEDGSARIVAAGVRMFDAPETDKERTPTNAVRRLHRGQRRVIRRRRQRMAALRLMFQRHGLITEAHRDSLKRPGLDPWRLRAEGLERPLSGIEMAVALGHIARHRGFRSNAKREAGANAADETSKMKKAIETTRERLGQWQTVGQMFACDPIYADRKHNRGLNFDRSIQRSDHEIEVDLWVAAQRRLGNALATEELQAAYADKAFSQLPLQNSEHLLAACPFEPDQKRTARRCYAFEMFRLLSRLAAIRLTVRGQEQPPLSPEQISLVAADFGRQKSLSYRWLRKTLDLDPGVRFAGVAEKDEKNDFVARSGAAAEGTYALREVLGDAGWRVLMHNPVMRDRIGEVLTFREDPGSIRRGLAEAGVEGLILEALMDGLDKGRFHAFTGAGHISAKAARALILPLSRGLVYSEACKEVDYDHARRVEVKLDDVRNPVARKALTEMLKQVRAMKAAFGLPDFIHVELARDIGKSAEERDKITKGIEDRNKERDKSRQRLEADILGRAASMEELVRFELWNEQNGFCLYTGDYIPPDAIAAGDNRVQVDHILPWSRFGDDSFMNKTLCFTHANQAKRGRTPFEWFDAEGLDWPLFAERVERCKEMKGRKKGGFYLRKNAAEVEERFRNRNLGDTRYATRLLLDMLARMYPKDGKRHVLARPGALTAKLRRAWGVEDLKKDAAGNRLEDDRHHALDAIVVAAVSEATLQALTRAAQEAERRGEGRGFDFALVCPPAAGFREAVQAVLKGVFVSRAERRRARGEAHAATIKQVREVDGAQVVFERKAVEKLTLADLDNIPVPEPYGKIGDPAKLRNEMVADLRRWIEAGKPKDDLPRSPKGDVIRKVRVANRDKVAVEVRGGTADRGDMARVDVFAKADKRGRRRYFLVPVYPHQIADWKTFPRPPDRAVIAYEAEKDWTQIDGSYQFLFSLHANSLVEAAKADGEVILGYFKGLHRGTGAIALAPHENPRQIRGGIGAKTLMRFRKLAVDRFGYTSEISREDRTWHGEVCT

SEQ ID NO: 15400 - protein, 1097 aa, unidentified
  REGION 1..1097: note = Cas Enzyme sequence
MVMGERQRILGIDLGIASCGWAIIEFDGNIWRIVHVGVWEWDAPEYIDKGKTRKSNLKERGVTRRRRRLLDVRQKRMHDLRQLLAEYNILKRTDRNALHFPKLNPWRLRKEALERKLSAEEWAVVLGHMAGHRAYWSNAKRKKNETDDDRKKLLKALKENEREFETARMERTARTVGEWLANKDTQRNRSGDFRHSIKREWVKQEAALLFKRQHELGNPFALSSLCDRYAPLAFEQGAITPPEIGPCTFEPHEPRAAKHSYSFEQFRLLQRLTNIRIISAPDVPPRSLTEAEIEKIESKLGIQAKITYTTIRRALKLPDKESFARINDAEQEEHEIVTGSKSGQTAPGTRALQTVIMTNFGAREWESLIAKPDALDAIASAIAHRDDLELIRTELEKLDIKPAVIETLAKQSDGGDLGFFKGTGHLSVKALRKLIPHLFAGRDYHNAQIAAGYDPSKDRYSRRPGIVGEGPQAVAAWLKKDQLEELIRNQVVSRAVREVFKQVLALWRAEGPFDAVHLEMARDVGRSAAERDKIDADNIKRRDRRNALRNAFIENFKKNPSDREFERWTLWTEQKGKCPYTPFKDAHIPCDAVVDGDDRVERDHILPGSRFGLESLDNKVLCLTGANRDKSSFTPYQWMSKNLGKLSWDDFCNQARVIFKDNPRKLDNLLIIDTTKLEKSLSSRALNDTRWISKFLLAGFEKLGTTDHPLRVQPVNAALVGTLRWAWGLAGWKHDPKNRSKRQSDDRHHAIDAAIVATIDAGLVNRLTRAYQRAEQRGEYFEARGFKPPWDTFREELLNQLYGDGAAKARPSEFTPDSTIGVLVSRGERRRARGQMHKETIYSLTSVNGTAADTTRRVKIERKAVDDRLTLDDLSLLKNADRNYKLADLLRSWIEKGHPADEQPVWKYKLSDGTERYEPIRSVSLVTSDSPAISPKRLRRKGDDKEVAFAAVDRIEMVRIDVFENGDADADARYLFVPIYVHQTVDPKPPDRAFKRDRPYIDWPITRSNDNFLFSIYKFSLVEIKTDRKKPLLGYYRGFDVDDGRIKLTPQYSRDEKLSDRFSPTTISSIRKFTVDRLGRKFPVSREVRTWRGKACT

SEQ ID NO: 15401 - protein, 1041 aa, unidentified
  REGION 1..1041: note = Cas Enzyme sequence
MEGSARILGIDLGIASCGWGVIEVKDETGRVIAAGVRCFDPPLVEKTGEPKSAERRAARGQRRVIRRRRQRMIAIRNLLHKHALLPDAKDDALAHALRRISPPGRNPQVTPWMLRAVAHDRLLTDDEFAVVLGHIARHRGFRSNSKREATTNAADETSKMKKAMEETREGLAKYRSFGEMLALDPKFTERKRNRDKDYSHTAKRSDLEDEVKKIFQAQRRFQNARATEELERQFIDKAFSQRPLQDSEDKVGNCPFEPDQKRTSKRAPSFEQFRFLQRLVNLRITVGRAERPLTADEIGIVLKRFGEQKSYTYKTLRKDLDLDPNARFSAVSRNNENLDIAARKGQSAYGTCTLRDVLGEAPWQSLLKTPEKLDRIAEILTFREDLESIRRGLAELGLDSALLDCLMNAAREGAFTEFKGAAHISALAARKLIPGLREGLVYSDACARVGYDHTARPAISLDQIGSPVTRRAFAEAIKQVRAVAREYGPFDAIHVELARDVGKSAEERAEITRGIEERNAEKDRRRKEAADLLKRDISDDELLRYELAKEQNFKCVYCDGAIAPTGFAANDTRWQVDHILPWSRFGDDSYLNKTLCCVKCNQDKRGRTPFEWFSEDKTEKDWESFVARLDNLKEMRKGLKKRNFKLRDAASVEEKFKERNLTDTKWVTRLLADELKRMFPAPEGKRRVFTRPGAITSKLRRAWGLEGAKKENGERVPDDRHHAVDALVLAATTESLLQRMTKEIQKREREGRADDIFHVQQPWPGFRLDVMRTVYGENGSGGVFVSRAERRRARGKAHDATIKQIREIDGEQVVFERRPIEKLTEKDLERIPIPEPYGKVVDPKKLRDQTVEALRAWIAAGKPKDNPPRSPKGDIIRKVRVATKDKVALEINGGTVDRGEMARVDIFRKANHKGQWEYFAVPIYPHQIATMEQPPNKYVKGATNEDEWPVIDSSYEFLWSLQPMNYLEIVKGNGECVEGYYRSLDRATGAINLSPMKTNDELIRSIGIKTLANFKKFMIDRLGRKFEVQRELRTWRGKVCT

SEQ ID NO: 15402 - protein, 970 aa, unidentified
  REGION 1..970: note = Cas Enzyme sequence
MIAIRNLLHKHALLPDAKDDALAHALRRISPPGRNPQVTPWMLRAVAHDRLLTDDEFAVVLGHIARHRGFRSNSKREATTNAADETSKMKKAMEETREGLAKYRSFGEMLALDPKFTERKRNRDKDYSHTAKRSDLEDEVKKIFQAQRRFQNARATEELERQFIDKAFSQRPLQDSEDKVGNCPFEPDQKRTSKRAPSFEQFRFLQRLVNLRITVGRAERPLTADEIGIVLKRFGEQKSYTYKTLRKDLDLDPNARFSAVSRNNENLDIAARKGQSAYGTCTLRDVLGEAPWQSLLKTPEKLDRIAEILTFREDLESIRRGLAELGLDSALLDCLMNAAREGAFTEFKGAAHISALAARKLIPGLREGLVYSDACARVGYDHTARPAISLDQIGSPVTRRAFAEAIKQVRAVAREYGPFDAIHVELARDVGKSAEERAEITRGIEERNAEKDRRRKEAADLLKRDISDDELLRYELAKEQNFKCVYCDGAIAPTGFAANDTRWQVDHILPWSRFGDDSYLNKTLCCVKCNQDKRGRTPFEWFSEDKTEKDWESFVARLDNLKEMRKGLKKRNFKLRDAASVEEKFKERNLTDTKWVTRLLADELKRMFPAPEGKRRVFTRPGAITSKLRRAWGLEGAKKENGERVPDDRHHAVDALVLAATTESLLQRMTKEIQKREREGRADDIFHVQQPWPGFRLDVMRTVYGENGSGGVFVSRAERRRARGKAHDATIKQIREIDGEQVVFERRPIEKLTEKDLERIPIPEPYGKVVDPKKLRDQTVEALRAWIAAGKPKDNPPRSPKGDIIRKVRVATKDKVALEINGGTVDRGEMARVDIFRKANHKGQWEYFAVPIYPHQIATMEQPPNKYVKGATNEDEWPVIDSSYEFLWSLQPMNYLEIVKGNGECVEGYYRSLDRATGAINLSPMKTNDELIRSIGIKTLANFKKFMIDRLGRKFEVQRELRTWRGKVCT

SEQ ID NO: 15403 - protein, 1067 aa, unidentified
  REGION 1..1067: note = Cas Enzyme sequence
MKIAENLVLGIDLGISSLGWAIIDAVNKLIIDAGVWTFNSPETDKEKTPTNQIRQQARSARTVTKRRRQRMNHIREMLVEAGLLPNASKDVIAQQLIQSKTSPWALRAEGLNRKLTGAELAVCLYHIGKHRGFQSNRKGGDNAAAGEDQKALKAMEGLGQQIAAYRTFGEALFKDAELSRHKRNTPNNYGRTPQRKWLRDEVALLFDKQRQFGSDFASGELEAMFAKLAFTQGALQDQADRVRDCPFEHGEKRASKHSPSFEKFRFLQKLAHMRLYMKGMEETALSPEQIQSLEAKFGTVAKFTYKAVRDILDLDPNVRFRAVAKDEESHDVATRKSGGAVGTRVLKAALGPLYDHLTPEQLDDAMFAIAFHESNDSVENALKKVGLPEAVLAALTAAVADNDFRDVKGAAHISAKACRAIITGLRTGAVYSDACEMAGYDHSAPDASPLAQLRREVKGLSPSEIRRKFSALMSDPKQSLIGSPVARKALIEAVKQFVALVNDHPALQGKLPGKVHVELARDVGKSATERNDIKNGIEKRNKALDKAAEKFEECFGRPPRRGSQDLLTYELAQEQGWKCLYTGEAIEPACLFDGQTYQIDHILPWSRFGDDSFINLTLCLARANQAKKHQTPYEWASSGQPGAPDLDLYLARVEACKEMRGRKKRNYTLKNAADVEDLFRSRNLNDTRWACKLYLQSLQLFYPSDEDARRLFARPGSLTSKARKAWGLERLKKDADGNRLEDDRHHALDAITVAAISESMLQALTYAHQQAEDGGSGRAFERFDPPWPDFRAQVIAMLGTILVARAEERRVSGQTHLDTIRGLDETTQTVFERLSPEKLLDQVKKEAEKSDWKTALEKRFVKPERSQAIINALLNWQDAGRPTDHPPLGPTGDRIDKIKVISASGKPAVIVRGGTADRGDMARVDVFSKPNPKGKKQYFLVPIYPHQVASEITPPDRAVTAHKPESSWPQIDTSYQFECSLIRKCWIEVTKSDGEVIEGYYRGLDRGSGNIEISPHYSLQKVTRGIGARNLHNLSKYQVNRLGTKHLIAKEKRTWRGEVYISGKPPE

SEQ ID NO: 15404 - protein, 1046 aa, unidentified
  REGION 1..1046: note = Cas Enzyme sequence
MTGEKMPERTLGLDIGIASCGWGVLDAEAGAIVAAGVRCFDAPLVDKTGEPKSAGRRLARGQRRVIRRRRQRMNAVRRLLAEAGLLASSDSKALHAAAREIAPQSPWTLRAAALERKLTAAECSVVLGHIARHRGFRSNAKTVAGNAADETSKMKKAMAKTSEKLAQYRSFGDMVANDPAFAARKRNRDKDFSLTPYRSDLEAEVKAIFTAQRRFGNSPLTEELQHSFLNIAFTQRPLQDSEKLVGKCPFEPGEMRAARRAPSFEMFRFLSRLAALELSVGRSARRLEPHEIAAAAAKFGETKTITFKALRKLLDIDPNARFSAPETDRDGKALDVVARTGGAAYGTKTLRDVLGDAAWASLRKAPEKLDRIAEILSFREDLDSIRKGLAETGLENAVIDRLVEAAEAGDFKEFTRAGHISAKACRAIIPHLMEGLVYSEACKRAGYDHAARPQTSLKDVNSPVTRRAFLETIKQVRAILREHGPIDYVHIELARDVGKSAQERKELQDGLEDRTAAKERRREEASKILGRRATDDELLRYELALEQQWKCVYSGDPIAPDGFAANDARYQVDHILPWSRFGDDSYLNKTLCTAKANQDKRGRTPFEWYSADKPEADWNSYAARVEGLGDIKGLKKRNYLLKNAEAVEERFKARNLTDTQWVTRLLADELKRMFPPRPERRKGDVEERRVFTRPGAITSKLRRAWGLDGLKKDADGERLPDDRHHAVDALVLAATTESLLQRMTREIQQREREGRADDIFHVQQPWPGFRMDVVKSVYGENGVGGVFVSRAERRRARGKAHDATIKQVREIGGEKSVYIRKNVLDLKESDLDLIPVPSPYGKIADPQKLRDQMVETLRAWLALPPAERKKNPPLSPRGDVIRKVRLLTKDKVAVEINGGTVDRGEMARVDVFRKKNAKGKWEFYVVPIYPHQIATMDAPPMKYARGATDEADWPEINADFEFLWALNPMDYLELVKPNGEAVEGYFRGLDRATASINASPFHTNQVMIRSIGLKTLSSFRKFRIDRMGRKTEVLREVRTWRGKACT

SEQ ID NO: 15405 - protein, 1037 aa, unidentified
  REGION 1..1037: note = Cas Enzyme sequence
MRVLGLDCGIASVGWAVLEYDRTEESGKIVAAGTRMFDTPETDKERRPKSELRRMYRGQRKVIRRRRQRMNAVRELLNRHGLLETSKSDALQFCGVDPWNARAKATDSILSKTELAIALGHIARHRGFKSNAKSRGENAAEDSKMKKAMAATQEKFAGRTFGQTIATDPAFAGRKRNREGDFSHTPMRADLAAEVRTIFSAQRRLGSHCATAELEREFLDETRENAPFHQRGLQDSEKLLADCAFEPGEKRTAKRAYSFELFRFLSRLNTLEIREGRQTRRLTPEEVGRAAGHFGANKKYSFKALRKVLTLSDTATFADLRLEDEKNDVTSRHGEAAYGTDTLREVLQGAAWESLVKTPAKLDRIAEVISFREDLGNIRKGLDEIGLEPAVIEKLMEEIARGTFDKFTGAGHISSKACRNLVPHLARGMVYSDACRQCNYDHTASRERNAFNVGVTGKAALKKILSGQVIDRSLVGSPIARKALIEAVKQVKAIVEEYGIPDVIHVELARDVGKGIEERREIERGIEKRNKEKERLRTRFAEDVGRPCTSAEDLLRYELWLEQNGRCVYSDAAISPKDIVASSNLVQVDHILPWSRFGDDSFNNKTLCTARANQEKRGRTPYEWYSRDKSEADWDAYLARVRALPGLKGFKRRNYTIMDASAVEEKFRSRNLNDTRWTARLLAEALRPLWPASDNRRVFTRPGVLTDRMRRGWGLQWSKKNDKGERIPDDRHHALDAIICAATTERMMQALTRVFQKEEAQGSPRDFRELPEPWPGFRDEALRVVENVFVSRAERRRARGEAHAATIRSVSERDGEKLVFERKRIADLKESDLARVKDAETRNARIVESLREWIAAGKPETSPPLSPKGDPISKVTLRTNKKPDLIVREGAVDRGEMARVDVFRKKNKKGVWQYFLVPIYPHQIATMDSPPNRACTAFKDEVEWPVVDEAFEFVWSLIPMNYLEIETGKKEPFAGYFRGFDRGTGAIKISSHVNSDDATAGIGTRTLLTFNKYLVDRLGRLSLVERESRTWRGKVCT

SEQ ID NO: 15406 - protein, 1072 aa, unidentified
  REGION 1..1072: note = Cas Enzyme sequence
MQIAENIVIGFDLGIASVGWAIIDEIEKVILDAGVWTFNAPETDDKKVPLNQKRQEARSMRRTIKHRRQRMNDVREFLFEQKLLPSNSKSIAHEIASRLKTSPWTLRSEALKRKLTDEELGLVLYHIARHRGFQSNRKGGENAESGEDQKALKAMQGLGQSIAAYSTFGQALNEDAQLSIRKRNVTNDYGKTPKRDWLRNELAIIAERQNGFGNNLPSHIIEEFIVKAFTQRPLQGQADRVANCPFEKDQKRSSKHSPSFEYFRFLQKLNHISLWMPGAPDWTLNSEEIQKVAKEFGNQASYTYKSLRKTLELDANARFRGIAKEDESQDIATRKSASAVGTRALKHALSGLYDTIDTASLDDAMFAIGFHETNESVGTALSKLNLPQNVYDALMVAVSNNQFKDAKGAAHISAKACRNIIPGLLQGRVYSDACADAGYDHTAPDASPLVQLKKEMIGKSPSEIRKAFSAILSDPKQHLIGSPVAKKALIEAVKQFVAIVNNHNALGGKLPGKVHVEMARDVGKSADERRKIEQGIEKRNKTLDNVAKDFKETFGYEPRRGTQDLLTFELAQEQGWRCIYSDEPIDKNRVFDGISYQIDHILPWSRFGDDSYANKTLCTARANQAKKHRTPVEWAQSNENGAPNLDEYLARVESCKEMKGIKKRNYTLKNAKDVEEKFRTRNLNDTRWACRLFLQSLDLFYEDAQMKNPDGKEIRRLYARPGSIIAKARQAWGVESLKKDENGKRREDDRHHAIDAITIAVMSESMLQALTKAHQIAEDRGSVRAFENFEKPWPMFRDDVIVGINKVLVARAEDRKVSGQKHLDTIRALDEETQVVYERLTPEKLLDQTTKKSDESEWHELICARFERPERSKHIIDELLRWEGEGRLLDNLPKGPTGDNIGKIRVIANGAKPAVRVRGGTADRGDMARVDVFSKANAKGKKQFFLVPIYPHQVAGDDAPPNKAVAANTPEENWPELDSSYQFEFSIVQKSWIEAIKTDGTVIEGYYRGLDRSTGGIHVSPHNTLQKLTRNTGTRSLNSFTKYAIDRLGTKHKVEKEVRTWRGKPWDWPQET

SEQ ID NO: 15407 - protein, 1040 aa, unidentified
  REGION 1..1040: note = Cas Enzyme sequence
MAKSINERLLDLAGRYPLDETLVFGLDVGIASLGSAVAWHGPNGGSVGFAGSRCFEAPEEPKTKVLKNKTRRDKRLLRRVTRRRRRRMADVRTLLIESGLLESIDPEAFHPHRAAPDPWQARAAGLDRRLEDEALAAALLHIAKHRGFKSTKKSDAGQNAPDDNKKMLGAIAANQELLAQYQTIGQMVASDAKFANRKRNRSAEYTHTFARGDLQDEVKKLFAAQRRLGNSKATKDLEERYIGIVFYQRPLQDSEDLVGMCPFEPAEKRSPRHAPSFEKFRVLAKLNTIKVREADGSLRRLTREELGKAIADFGGGSKSLTWNALATKIVLPKGASFDGIDEKKSKNDFAASKGCAAGTKTLRDALGPAGWDAVKDNSALLDNIAAIIAFREDIGRIEEAIDALDLEPVVRKALMDAVRAGAFGAFKGAGHISAKAARNILPHLLEGNVYSEACAAAGYDHTQSRRIGIDDIRNPVVRRSLREALKQVEALVHRFSIRPGRIVVELARAVGKSAEERVEITRGIEKRTAEKERHRKELKETLALNREPTEEELTQFELWKEQNYRCIYTDSAISPAEILSDATQIDHILPRSRSQDNSYANRVLCLTKANQDKKQRTPWEWKVRDEKDHAWWESFEARVNALHIKRHKKNLLKMRNFDERQQGFVERNLNDTKYAARALLSALRNLYGDEDEPDPASDGYLRKRRRLFARPGQITAILRRAWGLDSLKDRADDRHHALDALICAAARTDWLLNTLTRQYQQVETENRAKWTPWVPDPWPDFRGEAIGAYDTVFVARSERRRGRGQGHKDTIYRVGEDNGRKVTYERKAVTDLTKADLARLKDADGGNRPLAEALASWFEKGKPADDPPRSAKGDPVRKVLLKRKGIDPSGFTLGGGHVDNGDMVRVDVFANNGKFYLVPVYRHQAMNFGVWPLPPNKAVEIRKPVSEWSEIDLEHEFRFSLYPDSYVALVTNQGEAVEGYFRGLNINDAGILLSHHCLRQESRKFGSKTLRSLRKFHIDRFGGKHEIARETRTWHGAVCT

SEQ ID NO: 15408 - protein, 1055 aa, unidentified
  REGION 1..1055: note = Cas Enzyme sequence
MDIHENRTLGIDLGIASCGWAVIEQGEDCVGRIVAMGSRTWDAPETDKERTPTNQLRRGHRGMRRVLKRRRQRMSEIRRLFRSHGLIDVQGPPTGLRIAQLDPWSLRAEGLDRKLTGPELAVALGHIAKHRGFKSNRKGERGANASDDSSKMLKAINETRDRLARYRTVGEMFARDEHYADRKRNRDGQFTHSVLRDDQAREVVLLFDVQRRIGNPLASTELEAAFTKAAFFQRPLQDSEHLLGSCPFEPTEKRCAKRAPSFERFRLLSRLRALTLSEGREERTLTPDQIAKAERDFGLQKSFTFKRLRDKLGLSEETSFGGVARADEGRDFVGRASNAAEGTASLRGVIVDAAGESAWRSLQNAPEKLDAIAAVITFREEIESIRRGLAEIGLEPTVLTALMAGIEDGRPLKAFSGAAHISAKAARAMLPHLREGMTYDKAAAAAGYVHTDRAGPGSADGTLHERMVHDIKWVDANVSNPVARKAVIEAVKQVHAIVAAHGLPGAIHVELAREVGKSKEERDEIKSGIDKRNAAKDRLRAQFKETCGHEPSSAEDLLRFELWTEQAGRCLYSDRAIAPHQIVASDNSVQVDHILPWSRSGDDSFVNKTLCFTTANQNKRGLTPHEWFGTTDVERWEKYRGVIESNNAIKGRKKRNYLLKDSSVLTEKFRPRNLNDTKYATRLLLDLLARLYPESDRFTGVPRKPEEERRKRRLFSRPGPLTDRLRRAWGLQGLKKGEDGKRIADDRHHALDAVIVAVTSEARLNQLTRLVQERENAGLPRDFGSVDPPWPDFRDEAQTMMSQVFVSRAERRRARGEAHAQTVRRIEDAADAQVVYERKSVDALTEADLERVKDPDRNVALIASLRQWISDKKPKDRRPLSPKGDPIAKVRLITTKKVDVLVRNGVAERGEMVRVDVFRKKNKRDAWEYYLVPIYPHQVFDPEDWPGPPNAAIQAYKAEADWPDMSKGHEFLWSICPFSFVEVEKPDGTFINGYFRGADRTTGAISLSPHYTRDETIRGIGAKTLRSMNKISVDRLGNRTEILREKRTWRGAVCT

SEQ ID NO: 15409 - protein, 1055 aa, unidentified
  REGION 1..1055: note = Cas Enzyme sequence
MDIHENRTLGIDLGIASCGWAVIEQGEDCVGRIVAMGSRTWDAPETDKERTPTNQLRRGHRGMRRVLKRRRQRMSEIRRLFRSHGLIDVQGPPTGLRIAQLDPWSLRAEGLDRKLTGPELAVALGHIAKHRGFKSNRKGERGANASDDSSKMLKAINETRDRLARYRTVGEMFARDEHYADRKRNRDGQFTHSVLRDDQAREVVLLFDVQRRIGNPLASTELEAAFTKAAFFQRPLQDSEHLLGSCPFEPTEKRCAKRAPSFERFRLLSRLRALTLSEGREERTLTPDQIAKAERDFGLQKSFTFKRLRDKLGLSEETSFGGVARADEGRDFVGRASNAAEGTASLRGVIVDAAGESAWRSLQNAPEKLDAIAAVITFREEIESIRRGLAEIGLEPTVLTALMAGIEDGRPLKAFSGAAHISAKAARAMLPHLREGMTYDKAAAAAGYVHTDRAGPGSADGTLHERMVHDIKWVDANVSNPVARKAVIEAVKQVHAIVAAHGLPGAIHVELAREVGKSKEERDEIKSGIDKRNAAKDRLRAQFKETCGHEPSSAEDLLRFELWTEQAGRCLYSDRAIAPHQIVASDNSVQVDHILPWSRSGDDSFVNKTLCFTTANQNKRGLTPHEWFGTTDVERWEKYRGVIESNNAIKGRKKRNYLLKDSSVLTEKFRPRNLNDTKYATRLLLDLLARLYPESDRFTGVPRKPEEERRKRRLFSRPGPLTDRLRRAWGLQGLKKGEDGKRIADDRHHALDAVIVAVTSEARLNQLTRLVQESENAGLPRDFGSVDPPWPDFRDEAQTMMSQVFVSRAERRRARGEAHAQTVRRIEDAADAQVVYERKSVDALTEADLERVKDPDRNVALIASLRQWISDKKPKDRRPLSPKGDPIAKVRLITTKKVDVLVRNGVAERGEMVRVDVFRKKNKRDAWEYYLVPIYPHQVFDPEDWPGPPNAAIQAYKAEADWPDMSKGHEFLWSICPFSFVEVEKPDGTFINGYFRGADRTTGAISLSPHYTRDETIRGIGAKTLRSMNKISVDRLGNRTEILREKRTWRGAVCT

SEQ ID NO: 15410 - protein, 1054 aa, unidentified
  REGION 1..1054: note = Cas Enzyme sequence
MTTRLGLDVGTNSIGWCLVDVEADRIIDLGSRIFSDGREPKSGESLAVARRDARAMRRRRDRYLRRRSVFLEELVRFGLMPSDVDQARLEAAKDPYDLRLRALDQALTPHEVGRALFHLNQRRGFKSNRKAERKAKETEDGKIEGGAKALDAAMAEVGARTLGEFLAGRATKRVRLNGENQAYDFYPQRRHVRAEFDAIWAAQAPRHPGVMTDEARDRLAQVLFFQRDLKDQEIGFCTFAGWNGVPEGERRLPKAHPLFQERRLYEEVNNLRIVSPGAADRELTLDEREKLILRLRVTRKSSFSALGKLINLGDGERFNKESETRKDLLGDEVFAEMSDKKRFGNQWSHFDLATQLKIIDRVQGEENPDVLFEWLKSEYGLDDDAAVSVGKAHLSEGYGRFGETATRRLIDALKAEIITYDKAALAAGFNHSDQRTGEVWDQLPYYGQVLTGEIAPGKAEYGDADERRFGKITNPTVHIGLRQLQKLVNAIIARHGRPDEIVVELARELKLNDEEKKKHEARIRRDTAAAIARGELLAHEGITDTGANRMLMRVWEDLNPGNPLDRRCPYCGQQIGIRQLFNDEADVDHIIPYSQSLDDSAGNKVVAHRSCNRQKGDKTPYERWGHDDARWEIISAQVARMHRSKQWRFGPDARARMEKDGGFLARQLTDTQYLARLTRKYMAGLYAPDEGVRVYVTPGRMTAMLRRVWGLNSLLPDHNFVENEHSNAPKNRLDHRHHTIDAAVIAVTSRSLLQRIATAAAKAEEKELERLFEDLDPPWERYRDELKDRLSRVTVSHKPDHGRKGKPSRHKDVTAGRLHNDTAYGLTGETAADGKTPIVVHRVPFTSLKPGDIADPSRIPDEALRDSLYDATRDLSGKSYDQALARFAAEHPVFKGIRRVRVREPLTVIAIRDRAGRAYKAYAGSSNDRYVVWRMPDAKWESRVVPTFSAHQRDFVDKRPHPAAKRILCLRQNDILAVEPGGGKTEFMRVVKFTLNGQVTLVPHNEGGKLDVRHKDPKDRLQITNPTASGLKRMKARQIRIDPLGRVFDPGPRE

SEQ ID NO: 15411 - protein, 1054 aa, unidentified; identical to SEQ ID NO: 15410
  REGION 1..1054: note = Cas Enzyme sequence

SEQ ID NO: 15412 - protein, 1077 aa, unidentified
  REGION 1..1077: note = Cas Enzyme sequence
MHGLALDMGTNSIGWAVLRLDDRGEPCGIIDAGVRIFSDGREPKSGTSLAEGRRVARGMARRRDRYKRRRRAVLDTLTQFGLMPDTAEARKALVAETNDRSGTIAANVYALRARALDEKLPPFHIGRALFHLNQRRGFKSNRKTDRRDNEQGQIASGISRLGTAMDAAGARTLGEFLFKRREAGSWVRVRPSRMSGEDGKEEEGYGFYPERSFLEAEFDAIWAAQAEHHPALLTPERGEHLKRVMFFQRPLKRPKVGKCSFNPSEERLPKGHPLFQQFRLVKEINELRLVLPDLSSRNLTLYERDALVKQLTSQREATFASLRKTIKAPHGARFNKETESRTKLKGDEVAAELSAKSRFGQGWFEFAPERRTEIVLKLLEVEDPLALHAWLEAEFSLGPEQRDAIVGARLPDGYARLGPTALTEILAELRAEVIPEAEAAKRAGYDHALAKTGDALPELPKYQEVLARRIPPGSEDPDDPYDVRKGRITNPTIHIGLNQLQKLTNALIRKYGRPEQIALELARELKLSEDEKRKVNLDIARNTREAERRSEHLRELGQADNGYNRLLLKLWEELNPEQPLARECIYCGEPIGIATLFSAAVDVDHILPWSQTLDDSQANRIVCHKECNHQKGNHAPADVHQWTGRYDAILARAQRLPRNKRWRFGRDAMDKFKEEESFIARQLTDTQYLSRLAHEYLGALYDDEEPDEWGVFQRRNHVRVIPGRMTEMLRRQWGLNTVLSDHNAKNRNDHRHHAIDAIVVGVTTRSLLQRIATAAGGREALALEETIGKIEPPWPTFRDDVKAVIDRIVVSHKPDHGSLPRPGEGGRTAGQLHNDTAYGFTGETRKGVPLVVHRIPFGSITEKELPLIRDRRLADALYGAIRGLSGKDLTAALQAFAASGPYKGIRHVRIVEPVSVVPIRDAEGRAYKGYKGDANYRYDVWELPNGKWVEDVITMFDAHRPKSNGEDRRPHPAARRVLSLHQNDMVAYEHPDQGYTIARVVKFSPGMVAFAGNREGGALKARDADRDDPFKYFYKSAGAMKAVKLRQVRVDETGRVFDPGPQDRDSRAARRGIGRSA

SEQ ID NO: 15413 - protein, 991 aa, unidentified
  REGION 1..991: note = Cas Enzyme sequence
TMAEVFCDVLKVDPLGARKSSIERVRHLGAAFPREGVEAEVERILRAHLGALPQLDERFVEAVLRDYTALPGPDYRLPARYGQRLADGARSPGGLLFGQLVPRFDNRIIAHCPITYERVWQRVKAEGGGKERAKHEAEKLSKVPGIGCPEFHRFRWAMQLANVQVATGDARKTRDLSVAERTAVHAEMEKHGSLTPGDFKKAVRALTNKAPDNLDRLLALPDADRSLILDPARKLVSGGVLAVLWPHLAATAQRHLLTDLRRGKSVTARTLLARAAGAQGALDRWWDGEALKKLRRGQTERTREHALDEPHAIPPANGRAPHTREVMREVADFILKTDRHPAEGTDGAPDNGPLFRSENIRHAQLQRALDEQTNNHLVRHRLKLLERLHEDLITAYAAGDRTRVGRVTIEVNRDVKEMSGKTAQKQAKIQGQQTAHFRSVEKKLEAAYAGLGVHVGPGLIRKGRIAEDLAWTCPYTGATYDALDLLHRRVDKDHIIPRSQRASDSLDSLIITFAEVNKMKGQRTAVRFIEEFQGKPVEGRPNIMIKTLARYTKDMEALETFKGHDDDQRRKKNRKRLLLLRDYVEKEFTPGDLTKTSQLVRLGAQALQRHYLAVEQPPVIASLPGNVTGAVRKSWNLLGCLATANPRVLNDADLDEAGRAKMHTKTDIRGITRLHHALDACVLGFASLFLPTDGGAQALLVKRRLNAEEQQRARGHFGNMIAITQEGELRMADLAPHLKEQICARLKERRVVQHLPADLSGLRAKETVWRVFDPADPHPNAQRLARWLAQAEVKVPAPDAKTALIICRKRRAAEAATEESAGGKVFRETKTWRWVYDVKDKSALLGLAPEGEPADAKLKAIKAVKVMGDNFGLALDPEPTLIRPHKVWHQLTALREKNGGKQVRVLRKGSLIRIERAKSAKVDYCGVWMVRGTQLDQRSGFLVDLSPADQIRYRSQPGCFKNVSVATLIKCGLEVLKAPLCGIGKEDGGCD

SEQ ID NO: 15414 - protein, 1121 aa, unidentified
  REGION 1..1121: note = Cas Enzyme sequence
LLPKGIGAQKLLKYLFSFDLGTNSIGWWVYELDPTGEPSASKDGGVRIFSDGREPKSGNSLAEGRRVARGMARRRDRYKRRRKAVLRTLSEYGLMPADPKARAALVAETGDAKEGQQASDVYTLRARALDTRLPLHHIGRALFHLQQRRGFKSNRKADRKANDNDKGAIALGADRLIFEMREDGARTLGEFLAKRRGHDPSARGNVRVRIDIDSGDQTTDDGKPAKPGYNFYPQRAMLEHEFNCIWDAQAAHWPDVLTDARKAHLFRVMFYQRPLKAPIVGRCSFNPSEQRLAKAHPLFQAFRLYKEVNELEIVMPDQSHRKLTLDERNALIAKLRSVKSAGFPALHRTLKLSERGARFNKEGEARDKLLGDEIYSALADKTIFGGRWAKLSVERQWEIVEKLREEADPFALHQWLVEHAGLSDDEAVKAADVKLPEGYGRLGPTALKAMLEELKAEVITEAEAAKRAGYDHVLARVGDAVDVLPRYQDILERRIPPGTNDPDDDYDIRKGRITNPTVHIALNQLRAVTNRLIARYGKPERIHIELARELNQSEEQKRKATSENAKNRREAERRSAILKEFGQPDNGHNRQLLKQWEELNPENPLDRRCIYSGTVITPAMLFSGAVDIDHILPWSRTLDDSQANRLLCTREANREKRNYAPAEVPQWTDRYDDILARAQRLPPNKRWRFAHDAMARFAKDRDFLDRQLTDTQYLARLAHDYLGALYPDEEPDGDGVVKRRNHVVVVTGRMTEMLRRKWGLNGILPDHNFADPTKAKNRKDHRHHAVDAAVIGTISRSLLKRIADAAREGEAQGAEDAIRAIQPPWPSFRDDLKAVVDRIIVSHKPDHGTLPKPGDRGRTAGRLHNDTAYGLAKDDDGNPIAVHRKPFLSLEPKDLPSIRDPQLREWLEANTKGLSGKDFTARLMKLRKDGDNRRARRKKPGRYSGSPFQRIRRVRVVERLALIPIHDATGRAYKGYKGDANFRYDVWEMPDGKWQADVVTMFDAHRPDIDWQARRPHPAARKVLSLKQNDMVAYEQPGVGFAIGRVVKFNTAGQIYFAGHLEAGALKARDADPDDPFKYFSKSANGLRDVKARQIRVDEAGRMSDPGPRDRSSRGRKAPPG

SEQ ID NO: 15415 - protein, 1062 aa, unidentified
  REGION 1..1062: note = Cas Enzyme sequence
MGMKKHVRYRLGLDLGANSLGWCIVQLDDDNNPIGLIRIGVRLFRDGRNPKDMASLAVARRMARGMRRRRDRWLKRQKRFMAALIDYGLMPADETARKALSTIDPYSLRKRGLDEALTPHELGRALFHLNQRRGFKSNRKVDKADDKDSGKIKSALKDVRERLTAQGARTIGEWLAVRHSERQPVRARLRGQGAKAAYDLYIGRDMIADEFDKLWAAQTALQPAICTAAAGAELREILLRQRPLRPVKPGRCTLEPDDERAPLALPSAQRFRILQELNNLRFETALGESQALSLEQRNLFAKLLEGMTGDGKRDKADAHGLLKFDTMRRMLGLGDHTKCNLESDKREGLKGNATSLTLAKSDRFGAGWHSLALDQQDAIVDKLLTVESESEIVSWLMQEHGLAEANAIKLANTGLADGHSNLGRRALARVLPPLQANVITFDKAVIAAGYAHHSQLHSGEYFGNTALPYYGQLLQSAVGFGSGDPKDTDEKRYGRIANPTVHIGLNQVRRLVNAVIERYGPPTQIALEVTRELKQSQEQKDRVQKQQAENQRQRDADRADLAQWGQRDTGGNLLRMKLWLELKRAGDGIARCPYTGRVIGQDKLFSEEVEIEHILPFSLTLDDSIPNKTLSYREANRYKKNGTPFEAFGQSLHGFDWESIQQRASALPHNKKWRFAANAMEMFREKHGDDFLARHLTDTAYLSRTAKAYLSYVCHPNDVWVTPGRLTALLRGKWGLNPKGAKDRNDHRHHAIDATVIAVTDRGLLQKMSTLSGQERLERLRDRILVPYPWEGFKEAIEAALPRVVVSYKPDHGHQAGLHNDTAYGFAEPYEAGKASKVVHRVPLLSLKKPTDLESIRDHSLRERIKSATGGTEGKEFETKLAAFASKTGVSRVRVTETLTVVPLHRDVRAGERGGEDRSQPYKAYKGDGNYCVEIYRDENGKWCSNILTSFEAAKIARHSSARLRQKSWAVNGRPLVMRLCADDTVAMELDGGARKLFRVNNFSTNGVFFAELHEGNTDERNRKKIDGYHYISKSASSLFTAKARRIFVTELGFVLDPGFKP

SEQ ID NO: 15416 - protein, 1003 aa, unidentified
  REGION 1..1003: note = Cas Enzyme sequence
MEITINREIGKLGLPRYLVLGMDPGIASCGFALIDTANHEILDLGVRLFDSPTHPKTGQSLAVIRRGFRSTRRNIDRTQARLKHCLQVLKAYGLIPQDATKEYFHTTKGDKQPLKLRVDGLDRLLNDREWALVLYSLCKRRGYIPHGEGSQDKSSEGGKVLSALAANKEAIAETSCRTVGEWLAQQPQSRNRGGNYDKCVTHAQLIEETHILFDAQRSFGSKYASPEFETAYIEVCDWERSRKDFDRRTYDLVGHCSYFPTEKRAARCTLTSELVSAYGALGNITIIHENGTSRALSATERDECIAILFSCEPIRGNKDCAVKFGALRKALDLSSGDYFKGVPAADEKTREVYKPKGWRVLRNTLNATNPILLQRLRDDRNLADAVMEAVAYSSALPVLQEQLQGLPLSEAEIEALCRLPYSSKALNGYGNRSKKALDMLLDCLEEPEVLNLTQAENDCGLLGLRIAGAQLERSDRLMPYETWIERTGRTNNNPVVIRSMSQMRKVVNAICRKWGVPNEIHVELDRELRLPQRAKDEIAKANKKNEKNRERIAGQIAELRGCTADEVTGKQIEKYRLWEEQEYFDLYTGAKIEVDRLISDDTYTQIDHILPFSRTGENSRNNKVLVLAKSNQDKREQTPYEWMSHDGAPSWDAFERRVQENQKLSRRKKNFLLEKDLDTKEGEFLARSFTDTAYMSREVCAYLADCLLFPDDGAKAHVVPTTGRATAWLRRRWGLNFGSNGEKDRSDDRHHATDACVIAACSRSLVIKTARINQETHWSITRGMNETQRRDAIMKALESVMPWETFANEVRAAHDFVVPTRFVPRKGKGELFEQTVYRYAGVNAQGKDIARKASSDKDIVMGNAVVSADEKSVIKVSEMLCLRLWHDPEAKKGQGAWYADPVYKADIPALKDGTYVPRIAKAHTGRKAWKPVPESAMKKPPLEIYLGDLVQIGDFVGRFSGYNIDNANWSFVDRLTRIKISCPTVGKLSNDMSPFVVRESPIK

SEQ ID NO: 15417 - protein, 1003 aa, unidentified
  REGION 1..1003: note = Cas Enzyme sequence
MEITINREIGKLGLPRHLVLGMDPGIASCGFALIDTANHEILDLGVRLFDSPTHPKTGQSLAVIRRGFRSTRRNIDRTQARLKHCLQVLKAYGLIPQDATKEYFHTTKGDKQPLKLRVDGLDRLLNDREWALVLYSLCKRRGYIPHGEGSQDKSSEGGKVLSALAANKEAIAETSCRTVGEWLAQQPQSRNRGGNYDKCVTHAQLIEETHILFDAQRSFGSKYASPEFEAAYIEVCDWERSRKDFDRRTYDLVGHCSYFPTEKRAARCTLTSELVSAYGALGNITIIHENGTSRALSATERDECIAILFSCEPIRGNKDCAVKFGALRKALDLSSGDYFKGVPAADEKTREVYKPKGWRVLRNTLNAANPILLQRLRDDRDLADAVMEAVAYSSALPVLQEQLQGLPLSEAEIEALCRLPYSSKALNGYGNRSKKALDVLLDCLEEPEVLNLTQAENDCGLLGLRIAGAQLERSDRLMPYETWIERTGRTNNNPVVIRAMSQMRKVVNAICRKWGVPNEIHVELDRELRLPQRAKDEIAKANKKNEKNRERIAGQIAELRGCTADEVTGKQIEKYRLWEEQECFDLYTGAKIEVDRLISDDTYTQIDHILPFSRTGENSRNNKVLVLAKSNQDKREQTPYEWMSHDGAPSWDAFERRVQENQKLSRRKKNFLLEKDLDTKEGEFLARSFTDTAYMSREVCAYLADCLLFPDDGAKAHVVPTTGRATAWLRRRWGLNFGSNGEKDRSDDRHHATDACVIAACSRSLVIKTARINQETHWSITRGMNETQRRDAIMKALESVMPWETFANEVRAAHDFVVPTRFVPRKGKGELFEQTVYRYAGVNAQGKDLARKASSDKNIVMGNAVVSADEKSVIKVSEMLCLRLWHDPEAKKGQGAWYADPVYKADIPALKDGTYVPRIAKAHTGRKAWKPVPESAMKKPPLEIYLGDLVQIGDFVGRFSGYNIDNANWSFVDRLTRIKISCPTVGKLSNDMSPFVVRESPIK

SEQ ID NO: 15418 - protein, 1003 aa, unidentified
  REGION 1..1003: note = Cas Enzyme sequence
MEITINREIGKLGLPRHLVLGMDPGIASCGFALIDTANHEILDLGVRLFDSPTHPKTGQSLAVIRRGFRSTRRNIDRTQARLKHCLQVLKAYGLIPQDATKEYFHTTKGDKQPLKLRVDGLDRLLNDREWALVLYSLCKRRGYIPHGEGNQDKSSEGGKVLSALADNKEAIAETSCRTVGKWLAQQPQSRNRGGNYDKCVTHAQLIEETHILFDAQRSFGSKYASPEFEAAYIEVCDWERSRKDFDRRTYDLVGHCSYFPTEKRAARCTLTSELVSAYGALGNITIIHENGTSRALSATERDECIAILFSCEPIRGNKDCAVKFGALRKALDLSSGDYFKGVPAADEKTREVYKPKGWRVLRNTLNATNPILLQRLRDDRNLADAVMEAVAYSSALPVLQEQLQGLPLSEAEIEALCRLPYSSKALNGYGNRSKKALDMLLDCLEEPEVLNLTQAENDCGLLGLRIAGAQLERSDRLMPYETWIERTGRTNNNPVVIRAMSQMRKVVNAICRKWGVPNEIHVELDRELRLPQRAKVEIAKANKKNEKNRERIAGQIAELRGCTADEVTGKQIEKYRLWEEQECFDLYTGAKIEVDRLISDDTYTQIDHILPFSRTGENSRNNKVLVLAKSNQDKREQTPYEWMSHDGAPSWDAFERRVQENQKLSRRKKNFLLEKDLDTKEGEFLARSFTDTAYMSREVCAYLADCLLFPDDGAKAHVVPTTGRATAWLRRRWGLNFGSNGEKDRSDDRHHATDACVIAACSRSLVIKTARINQETHWSITRGMNETQRRDAIMKALESVMPWETFANEVRAAHDFVVPTRFVPRKGKGELFEQTVYRYAGVNAQGKDIARKASSDKDIVMGNAVVSADEKSVITVREMLCLRLWHDPEAKKGQGAWYADPVYKADIPALKDGTYVPRIAKAHTGRKAWKPVPESAMKKPPLEIYLGDLVQIGDFVGRFSGYNIDNANWSFVDRLTRIKISCPTVGKLSNDMSPFVVRESPIK

SEQ ID NO: 15419 - protein, 1003 aa, unidentified
  REGION 1..1003: note = Cas Enzyme sequence
MEITINREIGKLGLPRHLVLGMDPGIASCGFALIDTANHEILDLGVRLFDSPTHPKTGQSLAVIRRGFRSTRRNIDRTQARLKHCLQVLKAYGLIPQDATKEYFHTTKGDKQPLKLRVDGLDRLLNDREWALVLYSLCKRRGYIPHGEGNQDKSSEGGKVLSALAANKEAIAETSCRTVGEWLAQQPQSRNRGGNYDKYVTHAQLIEETHILFDAQRSFGSKYASPEFEAAYIEVCDWERSRKDFDRRTYDLVGHCSYFPTEKRAARCTLTSELVSAYGALGNITIIHENGTSRALSATERDECIAILFSCEPIRGNKDCAVKFGALRKALDLSSGDYFKGVPAADEKTREVYKPKGWRVLRNTLNAANPILLQRLRDDRDLADAVMEAVAYSSALPVLQEQLQGLPLSEAEIEALCRLPYSSKALNGYGNRSKKALDMLLDCLEEPEVLNLTQAENDCGLLGLRIAGAQLERSDRLMPYETWIERTGRTNNNPVVIRSMSQMRKVVNAICRKWGVPNEIHVELDRELRLPQRAKDEIAKANKKNEKNRERIAGQIAELRGCTADEVTGKQIEKYRLWEEQEYFDLYTGAKIEVDRLISDDTYTQIDHILPFSRTGENSRNNKVLVLAKSNQDKREQTPYEWMSHDGAPSWDAFERRVQENQKLSRRKKNFLLEKDLDTKEGEFLARSFTDTAYMSREVCAYLADCLLFPDDGAKAHVVPTTGRATAWLRRRWGLNFGSNGEKDRSDDRHHATDACVIAACSPSLVIKTARINQETHWSITRGMNETQRRDAIMKALESVMPWETFANEVRAAHDFVVPTRFVPRKGKGELFEQTVYRYAGVNAQGKDIARKASSDKDIVMGNAVVSADEKSVIKVSEMLCLRLWHDPEAKKGQGAWYADPVYKADIPALKDGTYVPRIAKAHTGRKAWKPVPESAMAKPPLEIYFGDLVQIGDFIGRFSGYNINNANWSFTDRLTRLNLSCPTVGQLNNDLSPVVIRESPIK

SEQ ID NO: 15420 - protein, 1004 aa, unidentified
  REGION 1..1004: note = Cas Enzyme sequence
MEITINREIGKLGLPRHLVLGMDPGIASCGFALIDTANHEILDLGVRLFDSPTHPKTGQSLAVIRRGFRSTRRNIDRTQARLKHCLQVLKAYGLIPQDATKEYFHTTKGDKQPLKLRVDGLGRLLNDREWALVLYSLCKRRGYIPHGEGNQDKSSEGGKVLSALAANKETIAETSCRTVGEWLAQQPQSRNRGGNYDKCVTHAQLIEETHILFDAQRSFGSKYASPEFEAAYIEVCDWERSRKDFDRRTYDLVGHCSYFPTEKRAARCTLTSELVSAYGALGNITIIHENGTSRALSATERDECIAILFSCEPIRGNKDCAVKFGALRKALDLSSGDYFKGVPAADEKTREVYKPKGWRALRNTLNAANPILLQRLRDDHDLADAVMEAVAYSSALPVLQEQLQGLPLSEAEIEALCRLPYSSKALNGYGNRSKKALDMLLDCLEEPEVLNLTQAENDCGLLGLRIAGSQLERSDRLMPYETWIEHTGRTNNNPVVIRSMSQMRKVVNAICRKWGVPNEIHVELDRELRLPQRAKDEIAKANKKNEKNRERIAGQIAELRGCTADEVTGKQIEKYRLWEEQECFDLYTGAKIEVDRLISDDTYTQIDHILPFSRTGENSRNNKVLVLAKSNQDKREQTPYEWMSHDGAPSWGAFERRVQENQKLSRRKKNFLLEKDLDTKEGEFLARSFTDTAYMSREVCAYLADCLLFPDDGAKAHVVPTTGRATAWLRRRWGLNFGSNGEKDRSDDRHHATDACVIAACSRSLVIKTARINQETHWSITRGMNETQRRDAIMKALESVMPWETFANEVRAAHDFVVPTRFVPRKGKGELFEQTVYRYAGVNAQGKDIARKASSDKDIVMGNAVVSADEKSVIKVSEMLCLRLWHDPEAKKGQGAWYADPVYKADIPALKDGTYVPRIAKQNYGRKVWKAIPDSLLIQKPLEIYLGDLIRVGDKLGRYNGYNIAKANWSFVDALTKKEIAFPSVGMLSNELRPIVIRKSILDN

SEQ ID NO: 15421 - protein, 1155 aa, unidentified
  REGION 1..1155: note = Cas Enzyme sequence
MKYRLGLDLGVGSIGSAIIELDNEGNAKDIIDAGVRIFEVSEGAEERRLKRTARKNLVRTKKRLELLAKKLFENGLWPDENPEGTDKLKSKSPYKTRTDALNERLASPYYVGRAVLHIAKHRGAGFVSASEETEEEILEEGEKSKAKKSSYDMMLHHLKETNSKTIGEFFYNKIISGKGNDKTVRQKKYAIEKNIVDYAIPRYLVKDEFNQIWDKQAEFYPQMKKENLKKEIYDILFYERPAAPYATGKCIYFREEDRLLKAHPLSEMRRIYEEVNNIRILNDMGKRKLTLEERNAIVNELLLKGQNAGKQAIKKLLNLSAQHKISLVDDRVIKAYLYSHPEFANNEHLQNMNEDELSSFIEFLAEPKISKDKNTRLYNEDTLIEYLKPILKIDDEKEIGNLLTKLPKGRGMLGISATKIILEKLKEDVLTHREITDKLAETDKRFMAEEEIARQNQGKCFQLPYYGEILQTDTAPLPPLMINNNKSLNPDEIKWGKIANPAVHMILNQIRLVVNEIIKIYGKPYDINIELGRDVGMSTKKKKEFENRQKQNEKLNEEAKNHLKEHKIAINNKNILKYKLAKEQGWKDAYNPIQNISSVFTGMEIEHIIPQAKGGTDTYNNLCLVNRNDNLNKGDRYAYEYFEETKTPEEIREILKNARSRTPDKSWRFEADAREKYEESGDKEESTRYLTDTRYVAKMAQRYLRAVVDCSDCDEVMQNRILAVKGGQTAKLRQRWNLYGLEYNLMGLDIPRYVDCSPYWLELNTGEIINGINKPDIDGKWKFFDKAKNKEWQPKPRIDHRHHAMDAITVACANRGLIQRMAEENDINKIHYPLPLTSVKSAADFRRKVIFCLKDVKVSHKPNHSKAEQFHKETGRTVLCQNPDDPNSLITVYSRKILQVVKSAKDLTKLLIPEIIKNEWHEDIAEHKAKQAKLVQDFELYMNTAEQILIAENEQGVTEGRKEIKITEGRILLKAFRIIQDKGLWKGDKFRCYENNSSLVYIKKHGVAYEGRNNHCVDFYKKDSKVGWEVIKRFDANQADFEPQWKKEGGKIIWSIQQGDILELDTPDEWKQYTDKERCLAKVKKFSEGKFCIDYITDARMTSPKDKTLEYMFVNSIEKGLSYYISHKARKVELTPFGKVKKKHKVLWNGTKTAA

SEQ ID NO: 15422 - protein, 1155 aa, unidentified
  REGION 1..1155: note = Cas Enzyme sequence
MKYRLGLDLGVGSIGSAIIELDNEGNAKDIIDAGVRIFEVSEGAEERRLKRTARKNLVRTKKRLELLAKKLFENGLWPDENPEGTDKLKSKSPYKIRTDALNEQLASPYYVGRAVLHIAKHRGAGFVSASEETEEEILEEGEKSKAKKSSYDMMLHHLKETNSKTIGEFFYNKIISGKGNDKTVRQKKYAIEKNIVDYAIPRYLVKDEFNQIWDKQAEFYPQMKKENLKKEIYDILFYERPAAPYATGKCIYFREEDRLLKAHPLSEMRRIYEEVNNIRILNDMCKRKLTLEERDSIVNELLLKGQNAGKQAIKKLLNLSAQHKISLVDDRVIKAYLYSRPEFANIEYLQNMNEDELSSFIEFLAEPKMSKDKNARLYNEDALIEYLKPILKIDDEKEIGNLLTKLPKGRGMLGISATKIILKKLKEDVLTHREITDKLAETDKRFMAEEEIARQNQGKCFQLPYYGEILQTDTAPLPPLMINNNKSLNPDEIKWGKIANPAVHMILNQIRLVVNEIIRIYGKPYDINIELGRDVGMSTKKKKEFENRQKQNEKLNEEAKNYLKEHKIAINNKNILKYKLAKDQGWKDAYNPTQNISSVFTGMEIEHIIPQAKGGTDTYNNLCLVNRNDNLNKGDRYAYEYFEEAKMPEEIREILKNARSRTPDKSWRFEADAREKYEESGDKEESTRYLTDTRYVAKMAQRYLRAVVDCSDCDEVMQNRILAVKGGQTAKLRQRWNLYGLEYDLMGLDIPRYVDCSPYWLEQNTGEIIDGINKPDIDGKWKFFDKAKNKEWQPKPRIDHRHHAMDAITVACANRGLIQKMAEENDINKIHYPLPLTSVESVADFRRKVISCLKNVKVSHKPNHSKAGQFHKETGRTVLCQNPEDPNSLITVYSRKILQVVKSAKDLTKLLIPETIKNEWHEDIAEHKAKQAKLVQDFELYMNTAEQILIAENEQGVAEGKKEIKITEGRILLKAFRIIQDKGLWKGDKFRCYSNSSSMINIPKHGVAYEAQNNHCVDFYVKDGKVGWEVIKRFDANQADFEPQWKKEGGKIIWSVQQGDILELDTPDEWKQYTDKERCLAKVKKFSEGKFCIDYIADARMTSPKDKTLEYMFVNSIEKGLSYYTSHKTRKVELTPFGKIKKKHKVLWNGTKTAA

SEQ ID NO: 15423 - protein, 1155 aa, unidentified
  REGION 1..1155: note = Cas Enzyme sequence
MKYRLGLDLGVGSIGSAVIELDNEGNAKDIIDAGVRIFEVSEGAEERRLKRTARKNLVRTKKRLELLAKKLFENGLWPNENPEGTDKLKSKSPYKIRTDALNERLASPYYVGRAVLHIAKHRGAGFVSATEETEEEILEEGEKSKAKKSSYDMMLHHLKETNSRTIGEFFYNKIISGKGNYKTVRQKKYAIEKNIVDYAIPRYLVKDEFNQIWDKQAEFYPQMKKENLKKEIYDILFYERPAAPYATGKCIYFREEDRLLKAHPLSEMRRIYEEVNNIRILNDMGKRKLTLEERDSIVNELLLKGQNAGKQAIKKLLNLSAQHKISLVDDRVIKAYLYSRPEFANNEHLQNMNEDELSSFIEFLAEPKMSKDKNARLYNEDALIEYLKPILKIDDEKEIGNLLTKLPKGRGMLGISATKIILEKLKEDVLTHREITDKLAETDKRFMAEEEIARQNQGKCFQLPYYGEILQTDTAPLPPLMINNNQSLNPDEIKWGKIANPAVHMILNQIRLVVNEIIKIYGKPYDINIELGRDVGMSTKKKKEFENRQKQNERLNEEAKNYLKEHKIAINNKNILKYKLAKEQGWKDAYNPTQNISSVFTGMEIEHIIPQAKGGTDTYNNLCLVNRNDNLNKGDRYAYEYFEEAKTPEEIREILKNARSRTPDKSWRFEADAREKYEENGDKEESTRYLTDTRYVAKMAQRYLRAVVDCSDCDEVMQNRILAIKGGQTAKLRQRWNLYGLEYDLMGLDIPRYVACSPYWLEQDTGEIIDGINKPDIDGKWKFFDKAKNKEWQPKPRIDHRHHAMDAITVACANRGLIQRMAEENDINKIHYPLPLTSVESVADFRRKVISCLKDVKVSHKPNHSKAGQFHKETGRTVLCQNPDDPNSLITVYSRKILQVVKSAKDLTKLLIPETIKNEWHKDIAEHKAKQAKLVQDFELYMNTAEQILIAENEQGVAEGKKEIKITEGRILLKAFRIIQDKGLWKGDKFKCYSNSSSMINIPKHGVAYEAQNNHCVDFYVKSGKIGWEVIKRFDANQADFEPLWKKEGGKIIWSVQQGDILELDTPDEWKQYTDKERCLAKIKKFSEGKFCIDYITDARMTSPKDKTLQYMFVNTLEKGLSYYTSHKARKVELTPFGKIKKKHKVLWNGPKTAA

SEQ ID NO: 15424 - protein, 1018 aa, unidentified
  REGION 1..1018: note = Cas Enzyme sequence
LGSRVFEAGVTGTAGDIETGKDESRAVARRDARLQRRQTFRRAQRRRRLLRLLIETGLLPPGKIEPRAEVHEYFQEFDKGLRERHLGPGKPQKRVEHHIFFYRLRAKSLDEQLPLHDFGRVLYQLGQRRGFKSNRRAGGKKDEDQGQVKSAIHELAAKMEETGARTLGEYLASLDPEEERIRRRWTRRNMYEEELQQIWESQAKFHPELTPELYQRVFKAMFDQRPLRSQKHLVGECPLIRHRKRCPQAARSAQRFRLLQKLNDLCVTEPREIERSLTTEERDTVLSALLGQGDHLDKRGDLSFAKLRTLLGLPKGTRFNLERGEEKKIAGHRTDHKLRPLFGPRWDQMPEEEKDGIVDALAGIEDPKHVERIARERWGLAAEAAATLAETTFEPGYAAFSRAAMRRLTARMEDGTSFATARKELFPESFTAAKPLDRLPVVAHHLRQLRNPAVHRALVEMRKVVNAVIRRWGVPEQIRLEMARELKMPRERRQRYAKTIREREQERRSAEEEICRITGRDRANRREIEKYLLWKECGYTCPYTGMSISPNDLFGEAPQFDIEHIWPFPRSLDDSFLNKTLCHVKENRDRKGNKTPYEAYAADPERWERICKRVQDFQGPVREEKLRRFRAEAIPEVFSSRHLNDTRYAARLAANLLGTLYGGEVDAQGTRRVRVSAGGVTAFLRNELDLNRVLGDGGEKVRGDHRHHAVDAVAIGLTNNAMVQALADAAERAPAERRRRFGRIPEPWPGFLGEVRQEVELLHVSHRVSRRVSGALHEESYHSPPIPTPQGDVHRKRVALEKISSGQVKNIADPTVRALVEAQLDELGATNPSRAFSVEANLPVFALPDGRVVKIKAVRVDVPQKALKIGKPGHERYVLSDSNHHMAVVAVLDAEGNPKSWEGHIVPLFEAMRRLRAGEPVVRCEWGEGRRFECSLAPGECFQLPNSDGAWELFRVRTLYGSNPTSTNIECVSAQDARQKKDIRSAKDWHKESLNKLMRKGLRKVSVNPLGQIFPSHD

SEQ ID NO: 15425 - protein, 1041 aa, unidentified
  REGION 1..1041: note = Cas Enzyme sequence
METPTRKPFVLGLDLGARSVGWAVVDLQEGEPAGLRAAGSRCFEAGVSGSIDEGRDEARGQQRRQARQVRRQLARRQLRRTQLLRTLVANGLLPPLEGFDSLAIHRYLAAFDQGLRSRHLSADDRVGHQVLFYRLRTRALDEVLELHDFGRVLYQFGQRRGFLSGRKRRMKEGEEEGLVRKSIAALAEEMQAAGARTLGEYLAGLDPFTQRLRARWTARSMYEQEFAALWASQARFHDALTDGLRKKLAEVFFFQRPLKSQKGRVGECDLVPGRKRAPLACREAQRFRILQAVNNLRVARPGESEVELSPDERKRLLEALTAKGDLTFARVRKVLGLPKETEINLERGGEKRLVGHRTDAKMAAAFGARWEALGEPERDRIVDEVLSMEDPEALGRKAEKVWGLDPAAAAVLRETTFEPGYAAFSRKALRQLLPAMEAGEAVETARRRLFPEAVAARPAIGSLPRVEEALPALRNPAVARALTELRKVVNAIVRKWGVPEVVRIELARDLRNSRERRYRMARENRERETSREKAREEIRRSTGIAAPSRSDIEKYLLAEECGWECPYTGRRIGMTELFGEHPAFDIEHIWPLSRSLDNSFLNKTLCFHEENREHKRNRTPMEAYGNDTARFEQILARVGQFRGSARFVKLARFAADEIPSDFTERQLQDTRYATRMAMRYLGTLYGGTVDADGRRRVQAGAGGLTAIVRNELGLNSILGDGGLKSRDDHRHHAVDALAIALLDPGLVQRLQRAAERAPSHRRRHFAPLDPPWEGFLPEVQRVVDEVVVSHRTGRKISGALHKETNYSREIRTLDENGGIRWVRRLRRPVHLLTARQVEKIADHAVREAVRRKLEEVGGKADRLEEDPPVLEQPDGRRIPIRRVRVEESVNPRRVGSEGRERHVETDANHHMAIFARLDADGAEVAWEAEVVSQLEAQRRLRSGEPVIRWETEPGRSFKFSLSPGDTIELELNGVRRLLHVRSVWMEGETGRIACVNLADARQIADLRKASSWFRPMLSGLRSGGCRKVEVSPLGEVFPAGG

SEQ ID NO: 15426 - protein, 1120 aa, unidentified
  REGION 1..1120: note = Cas Enzyme sequence
MSFATTPWEGMELIWGLDLGVGSIGWSVIRQSTSPESSALKIIDIGSRIFPAGSAGDYRSGREESRATQRRLARAMRNQRHERRRRLGELIQELQKIGFLPQGPVQRPTERDAFFKTLDATLRPSAKAPRQEQHTWLYRIASQGIAGEALPPHALGRVLYHAARLRGFQSNARERAKAKADKKAGAVYSGIRGLRAELQASGEEHLVSYFSKLDPEAEGQRIRGRYTAREDRRADIRALLESQSHHHAVLQNTEYREHLLHLIFQQRPLQDASRFIGLCALDGVTPRGEMGLPSLQRLRVLQRINDLEVTPPGEQTRPLTGIERAKVRDYLFVHDDITFTQLRRLLGFPAKRPQRKGDSTRTPFHEFNFERENSEERILGDRTYGVVAPVLGEAWGRFSLAQKDALVADWLGADTEDEAKERLITRHGLSEDQATALVEVALETSRGRFCAASARSLCERLDTMDDTPVRLATALKALRADRGLSTSAADKGLDFLPPYLPTHAEVEAFHDSPHSLRNPTILRVLRELRLVANALIRKHGKPDRIRIEFARELKNPARKRQEIDRKQKARAAERERARQQLVENGYRPSVAAVSSADIEKWLLGEECAWHCPYSGEPISPNRVFAPQSDVHVEHIIPRALSLDNSFANKTLAVADWNARKARRSPHAAFSSSDHWPDILRRVSGFIGAGSRGKLARFQWDDEELQRRYGGFTARHLQETAWAARLAKEYLAVLFGAEATDAVDATGTRRIETISGIATGLFRQAWNCSEALLQSPKLPKLPTDAPDRPRTGAADKIRADHRHHAIDALVVALTSPAAVRNLSMALEREVDLKGLRLPSPAPDFDAQLRSALEKITVSHRVNRRATGALHQATYYQAPRADGRRFQRVALEDISAPEKLQAIIDARVRAAVLAAWDKRGDFRGDPSKWFAAPANLPRLPTGAIIKRVTLPIDRIETVALGPVDDPNRQLHVKTGGNFCVVVVESAPTGKKTQATWSFRPITLLDAARQIMSRPGGVNAPPLKPAQMLTGEHRLKAGDKVLFTLRSSEAILLRKGARQGVVIIGDVGAAGIEGALHNDARGASIRKLLGASERIRLSPSALKAADPEKVTIGPLGEIHPARD

SEQ ID NO: 15427 - protein, 1078 aa, unidentified
  REGION 1..1078: note = Cas Enzyme sequence
MDTQPSPDYVLGIDLGSNSLGWAMIGLEDGQPAKLLRAGVRVFEAGMEGNIESGQEESRNLKRREARLHRRQLWRRARRLRRVFNLLQRFGLLPPGEGSLPEKRQDFLNELDKTILSSPWFAAKKISGVYPEPEQTLPYILRSAALDERLEPHFLGRALYHLAQRRGFLSTRKKAKAAKEEEGVVKQGISDLRRKMEEAKARTLGDYFSRIPPSEERIRGRWTSRAMYEEEFQQIWNAQAKFHGELPTDERKKLLFQAIFYQRPLKDQPELIGHCELEPEERRAAAYLVTSQRFRLLQTVNNLKLLPPGEPERDLTPADRAKLIEALELHGDQTFPHIRKLLGLTRNYGFNLERGGEKSIKGNRTNADFYAVFGERWSRMSPEERQRAILDVRSIQKPETLLRRAREYWKLDEEAAQRFCDISLEPDYLNLSRRAMEKLLPLLEDGITYGEARRLLYPERFQAVEPLPLLPPVQDALTEIRNPAVTRCLTELRKVTNAIVRQYGKPAEIHIELTRDLKQPKKRRQDRADRMRANEKARKAAAKRIVEEAGISDPSPDDIRKVLLAEECRWECPYTGKSISMRKLVGPESEFQIEHIIPFTRSLDNSFLNLTLCHVEENKVKANKTPYEAYSGDPDCYERILERVKRFQGDKGAIAQKLRRFMMTPEQVEEFLAGFTARQLTDTAYASRLAADYLGLVYGGVVDQAHARRVQATSGQVTAYLRNLWLLNTILRDGETTHGGYATKPRDDHRHHAVDAVAIALTSPGTVKQLSDAAQRAPLERRRRFASLQSPWPDFVDSVRQEIDRIIVSHRVSKKVSGALHEETIYSAPVAAGGTCPDLIGSPPGAALKGGATDVRHVRKPLASLTKTEVEDIVDPGVRQRVQDRLEELGGDIKKFAKSENLPFLLAKDGRRIPIKRVRLRKKTPTVTLGEGRRAREVTPGSNHHIEIFAELDEHGEEVEWDGQVVSMFEAHQRMKAGQPIVQKDHGPDHLFKFSLAQGEVVECDDKQQGRSLFVFRKVTQFTAGGIQIGFAPLNDARKAREMQVSRAWLWTTPNTLGERHTRKVLVSPLGEVSEAHD

SEQ ID NO: 15428 - protein, 999 aa, unidentified
  REGION 1..999: note = Cas Enzyme sequence
MRDFRDFLTESGIVSPDQLETAFTPASGEPTPYQLRYEGLDRQLSAREWARVLSQLCKRRGYKSMKLAQDSPDKDKDEGRVKAAIAENAARMAERGYRTFGEMLWLDERFAESRRNRGDYKGVASREQVLDEVRLLFEAQRAYGNPFASTALEDRYIEILQQQQPILEGDAIRAKVGRCSIDRTNPRISAACPTFERFRLVDKLLNVRYTLPGSGRRIPLDKGQRDLIIEKALGRTAKLTYADIRKICGLPEAARFVGVRYGSNPTDVSAEAKEKIPLPRAWHEMRRALSGLPAEAWENLSNDIDRLDDIAEILTYYKYDESVLRELRGLGLPEDVVFALSGLRFSGHGHLSRQTLRAILPFMEDGLPYSDACAAAGLHHSQHVRGEKRTKLPPIPVDDVRNPVVLRALAQTRKVLNAIIREFGHIEELHIEFARDVAQSYEDRRRIEKTQKENRARNESVLEDIEKEFGITNPRPLDIVKYKLWKEQGGRCVYSGTYIDPARMLSGEPGVAEVDHILPHSRSFDDSFMNKVLVTTTENRNKRERTPYEYLGGDPQRWHEFEERVLSMHLPRPKRERLLRIDFDERASEEFRERNLNDTRYIARYFKSFVAENLSFAGDSKAPVVTVNGRATAYLRTAWQLQKVRAEGDLHHALDAAVIAATTRSMIQQVSRFFSVKPLRNHHGEYIDATTGEIVPAKHVPEPWDGFGDQLRQRMSARWGQDPFGELQTIDEGAPRPILVSRMPSRAVRGEIHKETVRRIEGVDDKGLIRTSKRVRLEDLTMNTLDNMVGRSRDRELYEALAERLAAFGGDGKKAFAEPFYKPSKPGREAPRVKAIRVYDPPSSGGIEIRGGFADNSTMVRTDVFERDGRFYLVPVYLKDTVEDELPMRAIVQGKPESEWREIDDSYRFVFSLHLNDPIRLVRKSGGSSIAMGGYFKGVDRSSACINLEAHDSSWKKHGQGVAMGIESFEKYSIDPLGRTAHLVKQEKRRGFSDGSGKQ

SEQ ID NO: 15429 - protein, 1153 aa, unidentified
  REGION 1..1153: note = Cas Enzyme sequence
MAVTLPKDDVRYKVGIDVGLNSIGFCAVEVDDDDQPIRLLNSLVFRHDAGIDPASRKDALTRKNVSGVARRNRRANRETKKRLVALDRLLSEEFGWPLPNLEEYPDPYEPWHVRARLLDSYIADDAKRKEMLSIAMRHIARHRGWRNPYMKPASLASLPYPSEFLTNLNQDVSRAIGRKFASDATQGQLVDAFILGSSSLATTPELQVLEESEKDNSKNKPRDIVLGRVRGDKGVIEGKLHQSDNAEEIRRICATQKISQDQVERLIEAVFKAKDPREVGAANKLVGHDKLPGQGKYIRAERAHPAFQKFNIVATLTNLRINEAGSKRTLSSKELQTLTNYLSNVGPNDEVTWFDVAEKLKINRSDLQGTARASYDGQAALKYPPIDVTSVSIKKSKVKALKDWWKQASEDQRGQLIDYLPNSGRSDTPQTDHELDDLTKLTQSFSKKDLEELEKISLPAGRAAYSVNSLTKLTQLMLEEGIDLHEARKRLFNIGDDWKPTPEPINSPVGNPAVDRVLKQVARWIDAATERWGIPVSVNIEHVRGGLVSEKVVRELIRDNEARHKKNMEVAEEIAKRLGLSGRALRSHTVKYFALRRQNCQCLYCGTKISFETAEMDHIVPRSNGGSNNKSSNLAAVCRTCNASKSNIPFAVWVSSGKAGPGVSLEGTKERVNSLLLTKTDLQKEDDSLVEIYSKKEGEKFKKEIIARLESKKPEEEFDGRSLESVAWMAVELHERILGYYESLLKDSGQKVPRVGVYRGAITAEARKASGFENRVELLGGKGKTRLDRRHHAMDALVIALMNQSVSKLLSWRMQLRDSQRISGMPETWKEFHGFNRNDYRHWDAWAKAMRIAVELFNDALEKDDVHFSENKRLGISLAKAHDDTIKSLCSYVLGGAFSAELIDRAETPALWTALTKQPDFDVKNGLPEDPTRCITVNGKQFGPTDEVNFFASGAPAIKVRGGFAGIGDTIHHARIYRIDGKKTTYAMVRVFQTDLRRMKHKDLFTEPLKPSAISMRTASKTIRKAFADGTATQIGWLVEGDEIRIETDRYPSNDIGVLLRKYPEASSWRVCSFKTPTKVRLRPNLISKEGLSEKYFDADTLKAGRKIIDYPGWIVAINALLEKGMVTVIRRNTLGEERWVSRAHLPVSVDLS

SEQ ID NO: 15430 - protein, 1326 aa, unidentified
  REGION 1..1326: note = Cas Enzyme sequence
RGEEEETPNKLVEYYSLKVEKVEDSGERKGKDTWYNVHLENGMIYRRTSNIPLDWEGKTKEFIVTTDLEADGSPKKDKEGNIKRSFRAPKDDDWTLIKKKTEADIDKIKMTVGAYIYDTLLQKPDQKIRGKLVRTIERKYYKNELYQILKTQSEFHEELRDKQLYIACLNELYPNNEPRRNSISTRDFCHLFIEDIIFYQRPLKSKKSLIDNCPYEENRYIDKESGEIKHASIKCIAKSHPLYQEFRLWQFIVNLRIYRKETDVDVTQELLPTEADYVTLFEWLNEKKEIDQKAFFKSPPFGFKKTTSNYRWNYVEDKPYPCNETHAQIIARLGKAHIPKAFLSKEKEETLWHILYSIEDKQEIEKALHSFANKNNLSEEFIEQFKNFPPFKKEYGSYSAKAIKKLLPLMRMGKYWSIENIDNGTRIRINKIIDGEYDENIRERVRQKAINLTDITHFRALPLWLACYLVYDRHSEVKDIVKWKTPKDIDLYLKSFKQHSLRNPIVEQVITETLRTVRDIWQQVGHIDEIHIELGREMKNPADKRARMSQQMIKNENTNLRIKALLTEFLNPEFGIENVRPYSPSQQDLLRIYEEGVLNSILELPEDIGIILGKFNQTDTLKRPTRSEILRYKLWLEQKYRSPYTGEMIPLSKLFTPAYEIEHIIPQSRYFDDSLSNKVICESEINKLKDRSLGYEFIKNHHGEKVELAFDKPVEVLSVEAYEKLVHESYSHNRSKMKKLLMEDIPDQFIERQLNDSRYISKVVKSLLSNIVREENEQEAISKNVIPCTGGITDRLKKDWGINDVWNKIVLPRFIRLNELTESTRFTSINTNNTMIPSMPLELQKGFNKKRIDHRHHAMDAIIIACANRNIVNYLNNVSASKNTKITRRDLQTLLCHKDKTDNNGNYKWVIDKPWETFTQDTLTALQKITVSFKQNLRVINKTTNHYQHYENGKKIVSNQSKGDSWAIRKSMHKETVHGEVNLRMIKTVSFNEALKKPQAIVEMDLKKKILAMLELGYDTKRIKNYFEENKDTWQDINPSKIKVYYFTKETKDRYFAVRKPIDTSFDKKKIKESITDTGIQQIMLRHLETKDNDPTLAFSPDGIDEMNRNILILNKGKKHQPIYKVRVYEKAEKFTVGQKGNKRTKFVEAAKGTNLFFAIYETEEIDKDTKKVIRKRSYSTIPLNVVIERQKQGLSSAPEDENGNLPKYILSPNDLVYVPTQEEINKGEVVMPIDRDRIYKMVDSSGITANFIPASTANLIFALPKATAEIYCNGENCIQNEYGIGSPQSKNQKAITGEMVKEICFPIKVDRLGNIIQVGSCILTN

SEQ ID NO: 15431 - protein, 1053 aa, unidentified
  REGION 1..1053: note = Cas Enzyme sequence
MRVLGLDCGIASVGWGLIDVEGSSGDKPPKGEIVAAGTWMFDAPEEKSQTGTKLKSEMRRTFRGQRRVIRRRRMRMNEVRRLLQRHELLTSSSKDALKLPGLDPWKIRAQGLDRLLSKSEMAVALGHIARHRGFKSNSKGATTTDQASDDSKMKKAIAETQAKLSKYSTVAKLMAEDESYVIRNTPMKNGATEVVRRFRNRSGDYSRTLMRDDLAAEVRTLFRSQQRFQSTFATKSLEDEFTSIAFYQRPLQDSWHLVGPCPFEKEEKRSSKRGYSFELFRFLARLNNLSLIEGKDERRFTADELRTAVSDFGTTAKVTYSALRKKLKLSEETSFVAVSQDDEKKLDVVARSGEAAAGTSRLRRLITENLSDGAWGSLVSNPNKLDKIAEIISFRNDLTAIKAGLIDSGIEENIVSLLVRAASDGSLDIFTGAGHISAKAAGNIIPGLLEGLTYDKACNKAGYDHTVSREQNAFDVGVHGKEALKKILSQKRISPELVGSPTARKALIEAVKQVKAIVEKYGIPDRVHIELSRDVGKSIEERSKITSGINKRNQDKDKLREQFAEKIGRPPQDGDRGAEELLRFELWKEQNGFCLYSETYISPEDLFSGKNMAQIDHILPWHRFGDDSFTNKTLCSTKANQDKKGRTPYEWFKAEKSEKEWYEFVARVDTIKSMKGFKKRNYKLKNAEEVAEKFRSRNLNDTRWTCRLLAEALKQMYPKGIKDEKGVEKRRVYARPGVLTNKLRRAWGLQWIKKDEKGARIPDDRHHALDAIIVAATTEGLLQRATREVQEIERKGLPYDLSKSIFYPWPQFRDETIACIDQIFVCRAERRRARGKAHEATIRQISTRDGQQAVYERKNVSDLKLTDLENIKDADRNIAIIKSLRVWIETGKPKDNPPLSPKGDPITKIRLLTKNKVNIPFDTGNPDRLATVDRGEMARVDVFRKANKKGKYEYYLVPVYPHEILGNKIPPARAVSASKPETEWPLIDSSYEFLWSLVPMSYIHATSAKGELFEGYYRGLNRSVGAIQISAPNNSSELIQGIGARTLLEFKKY

SEQ ID NO: 15432 - protein, 1076 aa, unidentified
  REGION 1..1076: note = Cas Enzyme sequence
MSEGEMAWRLGIDLGTNSLGWWAFGVTREGRRWRVRDSLGGGVYIFPDGREPARAGRVGDSNAVARRLSRGMRRNRDRRRARLRAFMRELIALDLIPEGVEGRKSLFQHRKDAADPESLNPYRLRAEALERRLEPFELGRALLHLGLRRGFKSNRKEQAEDEGGNLKERIDDLRNVLNGRTLGRFLWDRFCEERKREADGGKARGIRFRGGQEFYPDRAMYAAEFDAIRERQAPHHALTEQDWNRLRDRYVLFQWPLKPVERGACEFIPGEPRHWKDTPIGHDFRIYQELNALRWRDENLAEHPLDREQREGILQLLLTRKSEVKFASLRGRTQKRRDGSPLFASGSSFNIESEKRKGLKQHVIGAAMTGDAALAPLWARRCSDEGDGGLLDDIFEALHSEQDPEALKIRLSDRWGLDEETVDALMGLRLGRATASVSRQFMEQLVPVMRDQGLMYWEAVAELVDADGAALHHSHRPVEGDRDCLPYYGEVLRGSMLGADPAADPNDQPEKHFGRINNPTVHVALNSLRRVVNCLVERFGEAPVEIHVELSRDLKNSREKRDIETARQARNQRENERIKTELKKHGIANPSGLDVKKVKLWEELGDTEMARRCPFSGRTISFAQLLNGEAEIEHILPFKRTLDDSTANLTVAMRWANRLKGNRTPHEAFSTDAYVKEGIAWEDVRAAAKRLPPNKAWRFGPAAMGRFEEEQDFIARQLTDNAYIARSAVKYLGCLKGVEQIVPNRGGLTALLRGKWRLNGILSDDNMKSREDHRHHAVDAAVIGLADRSVLNEVSRLTARGADDRTRIEVPGLSEDIEAAIRQRVPEIVVSYKPDHGWQGAMFKETAYGFVRLEGRDSDFPEHNLVVRKPLTDLKPNELASIRDAMIRKSVQDCLSAAEKAGEKPEKAIARFASESGIGSVRILVRDQTVRPVPSPPYKPYKWYEPDSYICCDIWRCPRGKPGRWKPGAYEWRGEYWLPSETADGVPAAEIRKPHPAAKHVARLYKYDLVAFDDGTETRIMRVAGFSTTDNRLDLRPHNLSDPDRKYLSINVVAKSGLRKLHVSPDGRVKGLGRRP

SEQ ID NO: 15433 - protein, 1060 aa, unidentified
  REGION 1..1060: note = Cas Enzyme sequence
MARILGLDIGIGSCGWAIVDTEAVDATTGEVAQEFTVVGCGARCFEVPEEPDTKELKNKGRRLARGQRRVTRRRRRRIAEIRALFVQTGLPGLPPPPKMLPKGDTVRRERERQAGLVWHLRREALDRALGRDEWAQVLIHLAKHRGFKSLSKREALDNMSDAGKALQGIASLQQATVGYRTLGETLATDPRFVTRKRNTSGDYSHTPLRADVEREARELFAAQRRHGNPVADADLERRYLEIAFRQLPLRSSLDMVGECRFEPVERRAPKQAPSFERFRFLQTLNNLRIHERRVGLRPLSANERRLALSLYATKQELKYRDLRKKLGLATELHFDGLAATKDPEAKTLASFLGSMKLKEALGPDRFAALLQDAPAQLDSAMSAIVFQSSDNQVEAELGRAGLHADDIATLLDRIVLFAQCRGAGHVSALACRRLLPHLEAGHVYSEACRLAGYDHTALGRIDLAALPNPVVRKVIGECLKQVRVLFREFGMADRVHVEMARDLGKSREDRQEMYRAGQERGAERDRHRDQYEELVGHRPNDEELLRYELWLEQDHRCLYTGDYISPAQLRATDNSIQIDHILPYSRSGDDSFRNKALVTAKANQDKRDRSLWEWFGESDAKRWQDLETRIDLLRKASGLHKEKARKLLLKSFAEREEAYRARHLQDTRYIIRVFRLLLEQHWPVLRTRADEERRIFTQPGALTALVRRGLGLDDAKRGGRLGDRDHALDAMVVAWTSPTVVKRLTDEAKVLELEARAKLVPELLADPREKERLRRAILAAAEGVFVSRPESRRGRGPAHGDTLYAFAPNGDGSVTRFQRVAVTKVERRHLERLKDPKRSRALKEAAEAWLANAERLGFKPGKLEKYAAQHPLCMPTRNGVPGPAVRHLTMQLPDRVKGGMTVQRGTSEGHVDVATMVRVDVFTKDGKFHLVPIYAWQVADRVGWPAPPNKAIKAAAAERDWDELDQSYEFRFSLYPGALIEARRLDKNGQVLEHHLGYFRSVDRTNGRVSYSPPANYASAAQERYTTKTLSSFRKFHVDRLGRRFEIVREPRLWRGEVCS

SEQ ID NO: 15434 - protein, 1080 aa, unidentified
  REGION 1..1080: note = Cas Enzyme sequence
LLNAVKPHEVAAVQYRAAFDLGETSIGWALYRLEMDKNGAARPIALVDLGVRLFENGRDPQTKASLGSLRRAPRGARRRRDRFLQRRQFLYSLLEQFGLMPTEKSARAQFFALDPYALRSRAISGGLSMQELGRVIVHLNQRRGFKSNRIADRDDAEDGKIASASAALKSELEAKGFATLGAFLADRQSASKVRDRNTVRIRLGGKGAAAAYEFYPQRDMVEHEFDTVWAVHAAKYPSHLSDQRRQQLKSVLFFQRDLRPVPPGRCTFFPDEPRLAKSRTLAQEFVIYQKLNQIRVGDEGAPLTLAQRDELAALLMSGKSLKWDRIRKTLKLHSGVSINLEEGGEKELVGNPIPGRFAGTKSKPGPFPGDAWLKLSRAVQDGIIEKCDSTGSPEELAEWGKAAFGLDQDAASRLAKVRLPDKHVNVSACACSLIVEQLKKDVVVYSEACTRAGLDHSDFEDGEFFDHLPPYNRILSMQRHLGFGTGDPDDPPDRRHGRIANPTVHIALNQLRRVLNEIIDRHGKPTEIVLEIARDLRKSQREKDAIQRENEANRKANAEMLADLEKEGLYRDGDRGVGEKLLRMKLWKEFGEPQNRRCPYTGEMISLQMLFSDAVEIEHILPLSRTLDDSPANLTVALRKANRLKRNLAPDEAAARFPEIFDKEAMKERTRSMPANKRWRFDDGAMRTFEEQKSFVDRQLRSTQYLSRIAREYASKLFPVEENGVRRTHVWVVTGALTFNLRRKWGLNLGDHNRKNRDDHRHHALDAAVIGVTDRSLVQRLSTIAAREEAEGVDRFFADLEEPYFGFREQVMASVEKLRDRISHRAQHGRIDPSDPTKSAGRLHEDTNYGLVKDKPENAKDLERGNVVRRKAVTDLTPTEIEKIRDLALQKEIAAAVAGASDDKERAAALAAWSEKTGVRRVRLLKQEAGVIAVKNRKTGLPYRYVSPAENAWIDIVETADGVWRGLAVDIFAAHRGAGKDWRTEYPDAKFIMRLRKGDTVRLFDADGANRVKRVVQIKAAASQLFLAPVNEGGLLQKRHENPEDPFRWDIATISRLKQRRAQRVRFTAAGRLKTAPHGR

SEQ ID NO: 15435 - protein, 1095 aa, unidentified
  REGION 1..1095: note = Cas Enzyme sequence
MITLGIDLGTDSLGWCLIDTVGEPLETQQGSIIAIGARIFGDGREPKSGASLAVDRRAARAMRRRRDRYLSRRAALLRTLTEYGLMPADEEARRQLVRDTNDGRSKNGGPRAPGKTGDMSASVHGLRARALGEKLTPHQIGRVLFNLNQRRGFKSNRKTDRRDNDQGKIEVGVNRLGKAMLDAGAQTFGQFLHGRRLEGKSIRTRLRPETGEDAKGDGYDFYPSRAELEREFDRVCEAQARYHPDLLDDERITHLRAIIFYQRPLKPVVAGRCSYNPDETRLARAHPLFQAFRLYKEVNELALVGEDQQARKLTTEQRDTLVHKLRSARTASFTGLRKALKLGAEFRFNKESETRTGLLGDEIHVAMSDKKCFGNRWSGFSSDKQWEILSRLRDEEDLVTLREWLVEQCGLDAEQASAVAKVSLPEGFGRLGALTDALKNETDKDGAVITEAEAARRCGYDHSDKGDRNFPGYEALPNYQEVLERHIPPGTGNPDDVYDIFKGRITNPSVHIALNQLRRVVNALIRHYGKPDRIAIELGRELKLSDRQKDEIDRKIRKNTRDAEERSTKLAELGQPDTGYNRLRLKLWEELNRDQPLNRVCIYSGEPITAAMLFTAQVDVDHILPYSKTLDDSEANKILCLTAANRQKRNRAPAEIAEWASRYDEVLARAGALPRNKSWRFARDAMEKFAEQEGFLARQLTDMQYGARMALTYLASLYPTEEADAEGLLRKHSRVRALPGRMTEMLRRKWGLNELLPDHNIGGGDPVKEKNCKDHRHHAIDAFVIACTSRSLIQKIATASAALEKEGAERVVAKIGDPWPGFREELRFKVNAALVSHRPDHGTVSHGGGQTAGKLHNDTAYGLTGEKDEKGNDLVVSRKPLSAFKAAKDLDGIRDRQLREALQEATYGLSGRDFEQAVHRLAGQERLEGKPNPFRNLRHIRVIEPLKTIPIRDEAGRAYKGYKGDSNHRYDVWRLPDGKWVSEVVTTFDAHQPGWQSAVRQQYPTAKKMLSLKQDDAVAADGSGERIIYRVVKFNTAGQIYLAAHNEAGALKARDTEPNDPFKYVSKAASGLKAINARQVRVDEIGQLFDPGPRG

SEQ ID NO: 15436 - protein, 1080 aa, unidentified
  REGION 1..1080: note = Cas Enzyme sequence
MILGIDLGTNGIGWCLLDQKHILAAGSRIFSDGREPKSGNSLAEGRRVARGAARRRDRYKRRRKAVLRTLTEFGLMPADAKARAALVAETNDVKAGQTANDVYALRARALDEQLPLQHIGRALFQLQQRRGFQSNRKADRKADSNEKGKIALGSEQLHLAMQSVNARTLGEFLAGRRGDDPRSRGTVRVRIDAEAGLDAKAPYDFYPDRAVLEDEFGQIWDKQAAFWPAVLTDERKAHLFRVMFYQRPLKAAIVGKCSFNPSEQRLAKAHPLFQAFRLIKEANELELVMPDQSHQKLTLDQRNVLLTLLRQKKSITFKTLSGRLKLSERGATFNKEGEGRDKLLGDEIYAAMSDKTIFGNRWADFPMERQWEIIAKLRDETEPLLLHAWLIDKAGLTEEAAAKAADAKLPEGYGRLGQTAMTEMLAFLKAEVIPESKAAELAGYDHALMRTGDAVDELPKYQEILERRIPPGTNEPGDEYDVRMGRITNPTVHIALNQLRALTNRLIGRFGRPERIHIELARELNQSDDQKKEATKQNAKNRRDAERRSVFLAEHGQPDNGFNRQLLKQWEELNPHPANRRCIYSGTVISPKMLFSGAVDIDHILPWSRTLDDSQANRILCTRAANREKRNFTPAEVPTWAGRYDEILERAQQLPPNKRWRFAHDAMERFEKDRDFLDRQLTDTQYLARLAHDYLGALYPDEEADGDGVVKRRNHVVVVTGRMTEMLRRKWGLNNILPDHNFSDPTKGKNRKDHRHHAIDAAVIAATSRSLLQRIATAAGQDEEEGAENALRSIDPPWPSFRDDLKAVIDEVIVSHKPDHGTLPKPGERGKTAGQLHNDTAYGLTDETDARGNSVVVRRKPFLTLEAKDLPSIRDEQLRALLEEETFGLSGKDFQAALLRFRRKEGHDYGGIRRVRMTETLSVIPIRDKDGHAYKGYKGDANFRYDVWEMPDGKWQADVVTMFVAHRPDMDWQKRRPHPAAKKVLSLKQNDMVAYDDPGGGGTTIGRVVKFNTAGQLYLAGNREAGALKARDAEANDPFKYLSKAASGLRDIKARQVRVDETGRVFDPGPQAGKKRKQKR

SEQ ID NO: 15437 - protein, 1068 aa, unidentified
  REGION 1..1068: note = Cas Enzyme sequence
VNYSLGLDIGTNSIGWCIVGYSEDGIADHIKAIGVRIFSDGRDPKSKSSLALARREKRAMRRSRDRFLRRRQALLNLLVEYDLLPQDRFERKQLELVNPYITRAAALDGPLQLHHIGRCLFHLNQRRGFKSNRKTDKGDPESGKIAFATSKLRAAMGESGARTFGEFLAERLQNGQPLRIRMRDDEGPEKANGDASEGYAFYPDRALLEEEFRSIWDTQKQYHPDALTSERFEALFQCVFFQRPLRLPEVGRCMLLGTERRLAKSDPLFQKRRLLEELNALMIERGPGVVPERLTVEQRNTLLMAMHGKRSVAFTSLRKTLKISDAVFNKERAGRDKLTGDEVFAELANKDRFGPFWSEVDLERQRAIVSKLRDEQDSEKLIAWLISECDLEEDRARKIAGASLPEGYGRVGETATRALIRELTAPREDGRVVVYSEAVERAPELGHHSDFRTGEIRDLLPYYGEVLERHIIPGSGDPDEKNIEKRLGKLTNPTVHIGLNQLRRVINAIILTYGHPSEIIVELARDLKTSDDQKRDIKARQRKDYQDALLRGQKLRELGQPDTGSNRALLKLWEQLGKDPLDRRCIYTGQVIGAAMLFSDGVDIDHILPWSKTLDDSNANKLVCIAGANRAKRNRTPFEAWGSSSEWEAILQRADRLPGNMKWRFNPDAMKKFGEESGFLARHLIDTQHLSRLAKQYLEAVAPDRVWVSTGKLTAMLRRHWGLNSLLPDHNYAKTVHEKNRTDHRHHAIDAAVIGVLSLSLIQKVAREAGLREEKGVQDVIDSIAEPWEGFRKDLGEAVSHIIVSHRPDHGDPGEVSGKRNQQTAGGLHNDTAYGLTGEKDSNGNRLVVHRVSLSAIKPSHLEESGTRIRDDHIRALLRDATQGLTGKDFEQAIVAFARSHEDLRGMRRVRVIEPLSVIEIKDRQGIAYKGYKGDANYRYDVWRLPDGKWVSDVVSMFDAHSPQDAKQPRRPHPAAKRKLSLHQDDILKLEHPRSGELVGRVVGFSQNGQVTLAAHNEAGDLKMRDRSSDDEDPFKYYSPTAGGLKKAKARQIRIDEIGRVWDPGFSD

SEQ ID NO: 15438 - protein, 962 aa, unidentified
  REGION 1..962: note = Cas Enzyme sequence
LDGPLQLHHIGRCLFHLNQRRGFKSNRKTDKGDPESGKIAFATSKLRAAMGESGARTFGEFLAERLQNGQPLRIRMRDDEGPEKANGDASEGYAFYPDRALLEEEFRSIWDTQKQYHPDALTSERFEALFQCVFFQRPLRLPEVGRCMLLGTERRLAKSDPLFQKRRLLEELNALMIERGPGVVPERLTVEQRNTLLMAMHGKRSVAFTSLRKTLKISDAVFNKERAGRDKLTGDEVFAELANKDRFGPFWSEVDLERQRAIVSKLRDEQDSEKLIAWLISECDLEEDRARKIAGASLPEGYGRVGETATRALIRELTAPREDGRVVVYSEAVERAPELGHHSDFRTGEIRDLLPYYGEVLERHIIPGSGDPDEKNIEKRLGKLTNPTVHIGLNQLRRVINAIILTYGHPSEIIVELARDLKTSDDQKRDIKARQRKDYQDALLRGQKLRELGQPDTGSNRALLKLWEQLGKDPLDRRCIYTGQVIGAAMLFSDGVDIDHILPWSKTLDDSNANKLVCIAGANRAKRNRTPFEAWGSSSEWEAILQRADRLPGNMKWRFNPDAMKKFGEESGFLARHLIDTQHLSRLAKQYLEAVAPDRVWVSTGKLTAMLRRHWGLNSLLPDHNYAKTVHEKNRTDHRHHAIDAAVIGVLSLSLIQKVAREAGLREEKGVQDVIDSIAEPWEGFRKDLGEAVSHIIVSHRPDHGDPGEVSGKRNQQTAGGLHNDTAYGLTGEKDSNGNRLVVHRVSLSAIKPSHLEESGTRIRDDHIRALLRDATQGLTGKDFEQAIVAFARSHEDLRGMRRVRVIEPLSVIEIKDRQGIAYKGYKGDANYRYDVWRLPDGKWVSDVVSMFDAHSPQDAKQPRRPHPAAKRKLSLHQDDILKLEHPRSGELVGRVVGFSQNGQVTLAAHNEAGDLKMRDRSSDDEDPFKYYSPTAGGLKKAKARQIRIDEIGRVWDPGFSD

SEQ ID NO: 15439 - protein, 1144 aa, unidentified
  REGION 1..1144: note = Cas Enzyme sequence
MEGEMRFPYRLGIDIGTNSIGWCVLDLDKSGHPRGVRRMGVRIFSDGRDPQSGTSLAAERRLPRGQRRRRDRYLDRRADLMAALVRHGLMSADKAERKKLEDLDPYELRAKGLDEGLPLHHFGRAIFHLNQRRGFKSNRKTDKPADPDKAKETAGMKDAIGILEREIADSGCRTLGSYLYATARKGRSVRGSKDGTVQPMLTVRARPHAAKGGRNAYDFYPSRAMYEQEFDALWAAQAARHPELAAAARDEIRDILFFQRPLKPVDPGKCALDATDKRAPLALPIVQQFRILQELANLRLEDPLGQTVRRLTLHERDKLFAELRTKEKVPFGGTQKKPGLRKLLDLDSRWKINLEDQRRPELRGDGVSKRLADPTCFGAGWHDLPESRQTEIVSALLDEPEESKVVARAMAEWGLGEAQARAVSAVPLTDGYGRVGLKALRKIVPIMLSESDAEGGLLHYSEAAERAGYDHSDCRTGEIFDQMPYYGEVLSNYVAEIKSPNASADEKAHGRIANPTVHIGLNQLRKLVNALIREYGKPDEVVVELARDLKLNAEEKERIKKEQTENKRKNDARREKLAELGMLNRSDGILRLRLWEELGDNPADRRCLYTGEQISVQRLFSDAVEIEHILPFQDMLDDSPANLTVSMRYANRAKGKRSPHAAFHDSPEIAGHRYDWDAIVKRAASLPANKRWRFKDDAVELVRNRSLRDLTRSKGLLPKEALDDIERSGAFLGRHLIDTAYLARVARQYLWTACENPDDVWVIPGRLTEFIRRKWGLNKLLYGNRPDPDDGAAPGQAPKRRDDHRHHAIDAFVVGLTDRSLLQRVSTAAGRAEERTIEDMPEPWDRFRDDLKAWLDRMVISFKPEHGTQGRLHEDTAYGIVKHPEKEGGATLVYRKALDSLNANEIERIRDKALRQKLKDSLGALLFDGTLLDAANETLKQAKRGRDPAAIAEATANVKKLKDLKKSQKKSAAKDLKTALAAFGREYGIRHVRLLKTEASFVAIENQDCHPYKAVSAGDNQRVEIYARPDGTWGAEVVTVFNANQRDYEPHWRREIAGARHVATYHKDDLVRLQVDGSDRTMRVASIWEKYLQLAGHVDTNLAERYRSGEFKWTFANYEKLREQGVRKVTVDVLGRVHDPGPPA

SEQ ID NO: 15440 - protein, 1106 aa, unidentified
  REGION 1..1106: note = Cas Enzyme sequence
MGVRIFSDGRDPQSGTSLAAERRLPRGQRRRRDRYLDRRADLMAALVRHGLMSADKAERKKLEDLDPYELRAKGLDEGLPLHHFGRAIFHLNQRRGFKSNRKTDKPADPDKAKETAGMKDAIGILEREIADSGCRTLGSYLYATARKGRSVRGSKDGTVQPMLTVRARPHAAKGGRNAYDFYPSRAMYEQEFDALWAAQAARHPELAAAARDEIRDILFFQRPLKPVDPGKCALDATDKRAPLALPIVQQFRILQELANLRLEDPLGQTVRRLTLHERDKLFAELRTKEKVPFGGTQKKPGLRKLLDLDSRWKINLEDQRRPELRGDGVSKRLADPTCFGAGWHDLPESRQTEIVSALLDEPEESKVVARAMAEWGLGEAQARAVSAVPLTDGYGRVGLKALRKIVPIMLSESDAEGGLLHYSEAAERAGYDHSDRRTGEIFDQMPYYGEVLSNYVAEIKSPNASADEKAHGRIANPTVHIGLNQLRKLVNALIREYGKPDEVVVELARDLKLNAEEKERIKKEQTENKRKNDARREKLAELGMLNRSDGILRLRLWEELGDNPADRRCLYTGEQISVQRLFSDAVEIEHILPFQDMLDDSPANLTVSMRYANRAKGKRSPHAAFHDSPEIAGHRYDWDAIVKRAASLPANKRWRFKDDAVELVRNRSLRDLTRSKGLLPKEALDDIERSGAFLGRHLIDTAYLARVARQYLWTACENPDDVWVIPGRLTEFIRRKWGLNKLLYGNRPDPDDGAAPGQAPKRRDDHRHHAIDAFVVGLTDRSLLQRVSTAAGRAEERTIEDMPEPWDRFRDDLKAWLDRMVISFKPEHGTQGRLHEDTAYGIVKHPEKEGGATLVYRKALDSLNANEIERIRDKALRQKLKDSLGALLFDGTLLDAANETLKQAKRGRDPAAIAEATANVKKLKDLKKSQKKSAAKDLKTALAAFGREYGIRHVRLLKTEASFVAIENQDCHPYKAVSAGDNQRVEIYARPDGTWGAEVVTVFNANQRDYEPHWRREIAGARHVATYHKDDLVRLQVDGSDRTMRVASIWEKYLQLAGHVDTNLAERYRSGEFKWTFANYEKLREQGVRKVTVDVLGRVHDPGPPA

SEQ ID NO: 15441 - protein, 1074 aa, unidentified
  REGION 1..1074: note = Cas Enzyme sequence
MGTNSIGWCAVELDESGNPCGILDAGVRILTPNDEAGRDPQSKASLAANRREARSARRRRDRFLKRQKRLMETLVDAGLMPADPVARKALESLDPYWLRARALDQKLDLHEIGRAIFHLNQRRGFKSNRIADAGDNEASAMKAGIAALKEALANENARTLGEFLARRHQRDRDGNRQTANPQAVRFRPRVEGAKALYDFYPYRELIEEELETIWAAQSAHHSQLTDALLARIKRIVVEQRPLKAPPVGRCTLRSDEVIDDHLGFSIDLGERTPKAHPLFQRFRILQDASQLRVARPGERERKLSLAEYRAVCAKLMASSGNSVTFDKLRKAAKLPEEMRFNYELAGRKGFQPDLTAVKLSHKNAFGKGWRNLPRDRQIEIVERLLAIEEPDVLHAWLTGICGLDDAAAGFVSSVRLPQGHGQFGRAVLGDLVEIMERGEDVTDPQTGEVYSPPLTYNEAVAALGLHHSRLSDRATHRRLPYYGEALARHVIAKKGAPEGSQDAIGRVPNPTVHIGLNQLRAVVNALIEVHGPPAEIVMELARELKLNKKRKDEIQRENRENERKNDEIRSELEAHGFTDTFGNRLLLKLYAELPPDERVCVYSGVPISKERLFSGAVDIDHILPHSKTLDDSFANKVLCTRESNRSKGNRAPGQAWSGEALQEIVERAERLFPRKAWRFQPDAMDTFEEKGGFQARHLVDTQHMSRMAREYLELVCDRVWVTPGRMTAMLRAKWALNDLLPDHNFTNPNQPKNRKDHRHHAIDAFVLACTSQGLLNRIARESGRAEELELDRLFPKDSFPKPFEGFREALETTLRSIIVSHKPDHGLAPGAQGDVTVTSGRLLEETAYGLVSDEIDGKHYNLVTRKPLAALKPTEIDRVRDARLREQLQELAYSSKRDGTKLEDALAAFERETGIRRVRILKTEKSVRTIEHGAGHKKAYVPGDNHRIEIFELPDGSWAGEGVTAFDANQPGYAPEWRQLHPNARLVMKVHNGDSIEADFGEGRQIFRVYQLEPSAKRIRMVPHNEAGSMQPRHNDPDDPLRWTFGSYSKLRNAGARLVRIDPIGRVQPVVAGS

SEQ ID NO: 15442 - protein, 1048 aa, unidentified
  REGION 1..1048: note = Cas Enzyme sequence
MTANLFDEKLSIGLDVGIGSIGCAAITENAIDALHVRCFQVPETPKDKKLLNALRRGHRSLRTQISRRRKRRNTLAKLLSNGLEVPIEAIKRRDQHDPWTMRAEGLTRLLTPVEFASAILHVAKRRGFKSNSKSDRSGNDAETGKVLSAVEAMKVKAATYETVGLMLATDTDFVAKKRNRSGDYSHTIPRAETEREIRKLFQAQRRLSQTWATSELEESVLETALYQRPLQSSEHLVGSCPFEDGEKRASKLAPSFERFRYLSKLVTLRIISGSAPPRSLSRDELSKAASLFGKTSKITYKAVRKTIALPEIAAFEGVPREKPANRSLYEGADVSASRGSCAGTYAMSRVLAPLAGEIGWQKLLVETETLDRVAAKITFREEVRATQNSQSSIEIGFQEQQIPEDWVEPLLTAIEEGVFREFSGAGHVSALAARRISPYLAQGKVYSEACAEVGYDHSEQRVPRLNDITNPVVRKSVAESWRLLQAVIRKLGRLPGRITVEMARDVGKPVEVRNAITKYNLERESTRKEGRQQYLELVGKEPTNDELLAFELWREQNHICLYSGTTISPAQLDLSKKELEVDHALPRSRSQDSSYQNKVLCLITMNQQKGNRTPHEWLTSEASSDTLSWDEYEAWVERLTQMKGIKKRNLLMRDFASREEQFVSRNLNDTRYAARVLRALCETLYVDETPDEQGRRRRRVFTRPGALVAGVRRVWGLERLKKNIDGGREGDLHHAVDAACIAALGNDEGLTQRLTRIYQSLESKGISTRNKDPIEPPWPNFREDVEQAVARVHVSRSEERKTTGEGHQATIRRVKASIDGDGNRHRRVFERKDIMKVTAKDLERLDPIRQVHLKTALADWLDQDKKTRLPFPRMPTLAGSPGPEIRKLRLPISMNAGVMVRGGIAANGDMARVDVFRDSRGYWLVPVYTHQINTPSKYPIPPNRACVAGKAEEDWEVMKEEAFIFSLYSWSLVEAVKSNGDVIRGYFRALDRSNAGITISDHAYSAVEGQTRTGTKTLKSFRKFRVDILGNLHNKEQQVRRWPGVASI

SEQ ID NO: 15443 - protein, 1049 aa, unidentified
  REGION 1..1049: note = Cas Enzyme sequence
MKKETNRPYRLGLDVGTNSLGWFMVWLNEAGEPIGLGPGGVRIFPDGMTNDKKASNAAERRLARGQRRNRDRYLERRRTLMSTMIDGGLMPKDEAARKALVDLDPYDLRARAITEKLPLHHIGRALFHLNQRRGFKSNRKSDGANDEKGAIKEASSRLREAMAAANAQTLGVFLNGMHREREGVRVRNTSSGNKATYDFYPTRDLLVDEFEAIWRQQSKHHSQLTDTVRERVCDTIFFQRPLKSPPIGKCTLDPAQNPGDADGFRLAKAHPLSQRFRIWQEVRNLTVGETGSTPRDLTKEEADTIALALLQSNAVTFDKIRKLLRLPEGARFNLESERRKELLGDQTAKRLGAKKLYGKTWRGFPLERQIEIVERLLSEQNEEALIEWLVFETGVDRDLAEQIADAPLPDGYGRLGHRAVAAILPYMQAGMRYHDAALAAGYDHAKAPTGEILDRLPYYGEWLQDQVIGTGDHRDKKEDRWGRFPNPTVHIGLGQVRRVVNALIKKYGPPEQIVVELARNLKNSKKQKDEIEKQQKSNQRKNDRRRDQIKAAGHNVNHDTLLRMRLWEELNEDDVLDRRCPFTGEVISIKRLFSPEVEVEHLIPFQTSWDDSAANKTLCLRDANRAKGKKTAHDAFGHSPMINGRAYDWVEISARAANLPGNKKWRFEPDADKRFEEQGGFLARQLMETSWLARLTRHYLSCVTNPNEVWVIPGRLTAMIRGKWGLNSLLPDHNFKNAKNRADHRHHAIDAVVAGLTDRGLLQGMSRAYDDARDKIEVPLPWETFRDDLDAVLKRMIVSHKPEHGREGKLHEASAYGLNRHQQEGEGNLVYRKALTDLNGSEIARIRDDEIRTTLQAYIDENKTEGQKLVEVLAAFGNRTDLPFAPHGIRHVRLTKKEKLEYLVPIRDKEGAAYKAYSSGENLFVELYETSDGKWHGEPVTVFQANQKGFKPRWHSQFPEAKFIMQIYKGDLLRLEREGESQIFKVYQLEASANRFKLALHNEAGSLGTRHNDPDDPFRWLIASYNPLHTMGAQKVRVDALGIPWKHQP

SEQ ID NO: 15444 - protein, 951 aa, unidentified
  REGION 1..951: note = Cas Enzyme sequence
FHLNQRRGFLSNRKAEKKEDDKGAIKQAAGKLKEAMEAKKARTLGEFLWHRHQKREGVRARNTASGPKATYDFYPTRDLLKSEFDAIWSAQAPHHPSMTDAAREEIDKVIFYQRPLKQPPVGKCSLDPATEPFEKDPEGYRCPWAHPLAQRFRIYQEVRNLEVGETGRTMTRLTKQQGDLVALALLQNKEMKFDKLRSLLKLSPEAKFNLESERRVTLDGDETAARLSHKSLFGKTWRGLDVQRQIAIVEKLLNEPDDAELVQWLEDKCELAASTAEKVADASLPDGHCRLGLRTIKKLLPLMESGLRYDEAAANAIGGHAKLPTGEVRDKLPYYGEWLSDAVVGSGDRRDKSEKRFGRLPNPTVHIGLGQLRRLVNHLINEFGPPTEVAIEFTRALKLSPKEKAEYQREQRRNQEKNEARKKELAEHGLSANPRNLLKMRLWEELNPRDLLDRKCPFTGEQIGLARLMSDEVEIEHLAPFKESLDDSAANKTVCMRYANRAKRKQWPYNAFGSNPTIDGFTYRWDEIAARAAMLPRNKRWRFDADAREQFEKKGGFLNRQLNETGWLARLAKQYLGAVTNPYNIWVVPGRLTSMIRGKWGLNSLLPDHNYAGVQDKAEDFLAATDDMEFSGVKNRADHRHHAIDGLVAALTDRSLLWKMANAYDDEREKIEIPTPWDKEKLRDDLKAALDRMVVSHKPDHGVQGKLHEDTAYGFVKEPEREGANLVYRKPIEALNENEVERIRDRRLRDMVRAHVVAEKANGVTLADALRKLHAKTDDPHIKHGLRRVRLLKPEKPEYLVPVNDRRTGAPYKAYSAGENFCVEIFETADGKWIGEAVRRFDANQECHGPRWRQEHPDAKLVMRVHKGDLIRLENNGKSEIMVVHRLDAAARRFKLAQHNETGNLDRRHATSNEIDPFRWLMASYGTLKDKGAVPVRVDELGQVWRIQTSH

SEQ ID NO: 15445 - protein, 1056 aa, unidentified
  REGION 1..1056: note = Cas Enzyme sequence
MARQRKYRLGIDVGSNSLGWFVVWLSDQGEPTGLGPGGVRIYPDGRDPQSKTSNAVDRRVARGARRRRDRYLKRRTSLMSLLIAHGLMPKEEAPRKALENLDPYELRAKALDDKLPPHHVGRALFHLNQRRGFLSNRKTEKGDKESGTIKQAATKLQEAMQTSGARTLGEFFFWRHRARKSVRARNTSTGTKAEYDFYPTRQLLLDEFEAIWNAQARHHPSITQAAHDAIHHAIFYQRPLKQPPVGKCSLDPASSNDDLEGFRCPWAHPLAQRFRIWQEVRNLAIMETGRPSKHLLKEDGDKIAFALLQNNKFSFDKMRTLLKLPEEAKFNLESEKRKELLGDETTAKLSGKSLFGKVWRSFSLDRQIEIVDRLLDEADEETLIAWLIARTQIGADTAGRIATAFLPDSHCRLGLRAIRNILPHMETGMNYPDAAKAAGYDHAQLPTGELSANGRLPYYGEWLQNDVIGSGDERDTNDKRWGRFPNPTVHIGLGQLRRVVNALIGEHGAPAEITVEMTRAFKLSPKKLAEVESEQVDNQRKNDKRAEEIRKLGQQVNARNLLKLRLWEEQNPHDPLDRRCPYTGEVINIARLLSDEVDVDHLIPFSDSWDDSAANKVVCMRYSNRDKGNRTPFEAFGNSKGAPYDWEAISLRAAALPKSKRWRFEPGARERFEKSGGFQARQLNETGWLARVATHYFAAVCDPYAVHVLPGKLTAMIRGKWGLNDLLPDHNYSDTKNRKDHRHHAIDALVAALTDRKLLHRMSSAYDDERQKIEIPLPWPTLRDDLDSKLKAMTVSHKPDHGVEGQLHEDTAYGEIDDPDKEDGANLVYRKGFLALNEREIGRIRDRRLRSLVQAHVEQEKREGKDLKAALQSFSERKNIPGLPNGIRHVRLTKAEKPEYLVPISDKFSNAYKAYSAGENAFVDILESADGKWVAAAMSVFRANQNDLRPDWQNSASGARFVMRVFKGDMLRVDHDGKSKIVKIVRLSPSNNVLYLVAHNEAGNFQERHDDKDDPFRWIFANFDRLREWNAERVRVDELGRVWRVRPDEAARSIAA

SEQ ID NO: 15446 - protein, 1034 aa, unidentified
  REGION 1..1034: note = Cas Enzyme sequence
MRYRLALDLGTTSLGWAMVRLNQDNRPYAVIRVGVRIFSDGRNPKDGASLAVTRRDARAMRRRRDRLLKRKARLMRLLVEHGFFPCDAFERKALERMDPYTLRAAGLDRALSPGEFARALFHLNQRRGFKSNRKADAKDNDSGALKTAVSKLRSTLIEEKCRTVGEWLARRRDAGLTVRARFRQTRVQREDGKTRIDKSYDFYVDRAMIAAEFDALWSAQARLNPAVFNDAARDALRDALLHQRPLRPVVPGRCTLIPDQQRAPLALPSTQRFRIYQEVNNLRILDAHLKERPLTLAERDLVVNALEHHGKRTFTALRSLLGLGTGSRFNLEDAKREDLKGNATAAALARKSLFGQRWFDLPEATQDAVVRRLLDEEDTSKLIAWLTEQTGVDEPTAELIANTSLPDGYGSLSEVALNRILPELRREVVSYVEAARRAGFHHSRLAANQEVEGRTFPTEVVDASTGEIRTFHRFKELPYYGEFLQRHVGFADPRAKPTDLPEKRFGRIANPTVHIGLNQIRTVVNALLARYGHPDEVIVELARDLKMSQRERKEENDRQAANQKRNAMHRETIASALGVLPDNVKRRDIEKLILWEELSRDPADRRCPYSGVQISLAMLLSDQVEVEHILPFSDTLDDSLDNKTVALRAANRVKGNRSPWAAREDFARQGWQYDDILARAASMPRKKPQRFAEDGYQRWLREDKDFLARALNDTRYLSRVASEYLGLICPQATRVIPGRMTAMLRAKFGLNDVLGVGGEKNRNDHRHHAVDACVVAVTDQGMLQAFARASASARAAHLDRLVDTMPLPWPRYRDHVARAVRALWVSHRPDHGYEGRMHNDTAYGLLGDGRVHVHKEVDGKRVREEKALKVIAIASGAAHARHGVLESGAPRPYKGYDPNSNYCLEVVRTEKGKWRSEVVSTFNAYQLARTGSAEVLRHPRQSVTGEPLVMRLIINDVVRLKVRDHIRTMRVATIKSSGTIELADVHEANVDARNRSKDDDFSYVSKMGDSLRSAEARRVTISPIGDLRDPGRVD

SEQ ID NO: 15447 - protein, 1101 aa, unidentified
  REGION 1..1101: note = Cas Enzyme sequence
KNLVRTKKRLELLAKKLFENGLWPDENPEGTDKLKSKSPYKIRTDALNERLASPYYVGRAVLHIAKHRGAGFVSASEETEEEILEEGEKSKAKKSSYDMMLYHLKETNSRTIGEFFYNKIISGKGNNKTVRQKKYAIEKNIVDYAIPRYLVKDEFNQIWDKQAEFYPQMKKENLKKEIYDILFYERPAAPYATGKCIYFREEDRLLKAHPLAEMRRIYEEVNNIRILNDMGKRKLTLEERDSIVNELLLKGQNAGKQAIKKLLNLSAQHKISLVDDRVIKAYLYSRPEFANNEHLQNLNENELSSFIEFLAEPKMSKDKNARLYNEDALIEYLKPILKIDDEKEIGNLLTKLPKGRGMLGISATKIILEKLKEDVLTHREITDKLAETDKRFMAEEEIARQNQGKCFQLPYYGEILQTDTAPLPPLMINNNQSLNPDEIKWGKIANPAVHMILNQIRLVVNEIIKIYGKPYDINIELGRDVGMSTKKKKEFENRQKQNERLNEEAKNYLKEHKIAINNKNILKYKLAKEQGWKDAYNPTQNISSVFTGMEIEHIIPQAKGGTDTYNNLCLVNRNDNLNKGDRYAYEYFEEAKTPEQIREILKNARSRTPDKSWRFEADAHEKYEESGDKEESTRYLTDTRYVAKMAQRYLRAVVDCSDCDEVMQNRILAVKGGQTAKLRQRWNLYGLEYNLMGLDIPRYVDCSPYWLEQDTGEIIDGINKPDIDGKWKFFDKAKNKEWQPKPRIDHRHHAMDAITVACANHGLIQRMAEENDINKIYYPLPLTSVESVADFRRKVISCLKDVKVSHKPNHSKAGQFHKETGRTVLCQNPDDPNSLITVYSRKILQVVKSAKDLTKLLIPETIKNEWHEDIAEHKAKQAKLVQDFELYMNTAEQILIAENEQGVAEGKKEIKITEGRILLKAFRIIQDKGLWKGDKFRCYENNSSLVYIKKHGVAYEGRNNHCVDFYVKDGKVGWEVIKRFDANQADFEPQWKKDGGKIIWSVQQGDILELDTPDEWKQYTDKERCLAKVKKFSEGEFNIDYITDARMTSPKDKTLQYTFVNTLRKGLAYYTSHKARKVELTPFGKIKKKHKVLWNGSKTAA

SEQ ID NO: 15448 - protein, 1146 aa, unidentified
  REGION 1..1146: note = Cas Enzyme sequence
MKYRLGLDLGVGSIGSAIIELDNEGNAKDIIDAGVRIFEVSEGAEERRLKRTARKNLVRTKKRLELLAKKLFENGLWPDENPEGTDKLKSKSPYKIRTDALNERLASPYYIGRAVLHIAKHRGAGFVSASEETEEEILEEGEKSKAKKSSYDMMLYHLKETNSKTIGEFFYNKIISGKGNDKTVRQKKYAIEKNIVDYAIPRYLVKDEFNQIWDKQAEFYPQMKKENLKKEIYDILFYERPAAPYATGKCIYFREEDRLLKAHPLSEMRRIYEEVNNIRILNDMCKRKLTLEERDSIVNELLLKGQNAGKQAIKKLLNLSAQHKISLVDDRVIKAYLYSRPEFANIEYLQNMNEDELSSFIEFLAEPKMSKDKNARLYNEDALIEYLKPILKIDDEKEIGNLLTKLPKGRGMLGISATKIILKKLKEDVLTHREITDKLAETDKRFMAEEEIARQNQGKCFQLPYYGEILQTDTAPLPPLMINNNKSLNPDEIKWGKIANPAVHMILNQIRLVVNEIIRIYGKPYDINIELGRDVGMSTKKKKEFENRQKQNEKLNEEAKNYLKEHKIAINNKNILKYKLAKDQGWKDAYNPTQNISSVFTGMEIEHIIPQAKGGTDTYNNLCLVNRNDNLNKGDRYAYEYFEEAKMPEEIREILKNARSRTPDKSWRFEADAREKYEESGDKEESTRYLTDTRYVAKMAQRYLRAVVDCSDCDEVMQNRILAVKGGQTAKLRQRWNLYGLEYDLMGFDIPRYVACSPYWLEQDTGEIIDGINKPDIDGKWKFFDKAKNKEWQPKPRIDHRHHAMDAITVACANRGLIQKMAEENDINKIHYPLPLTSVESVADFRRKVISCLKNVKVSHKPNHSKTGQFHKETARTVVWTNPKDPSKVIAFYKKRILDTVKSINDIDKLLLSEKIKDEYHPQISKDRQTHKSLVDNFILHLDNARQKLLEENEKKLLDGKKETKITDTMILSKALSIIRKAKLWNSDKYHCYENNSSLVYISKHKITYENGNNHCVDFYVKDGKVGWEVIKRFDANQADFEPQWKKEGGKIIYSIYKGDILELNTPEKWKQYTDKKRCLAKVRKFSSGITIELVNDARDDKNIDKLPDRGLSFYLEHKARKVELTPFGKIKKKHKVLWNGTKTAA

SEQ ID NO: 15449 - protein, 1131 aa, unidentified
  REGION 1..1131: note = Cas Enzyme sequence
MKYRLGLDLGVGSIGSAIIELDNEGNAKDIIDAGVRIFEVSEGAEERRLKRTARKNLVRTKKRLELLAKKLFENGLWPDENPEGTDKLKSKSPYKIRTDALNERLASPYYIGRAVLHIAKHRGAGFVSASEETEEEILEEGEKSKAKKSSYDMMLYHLKETNSKTIGEFFYNKIISGKGNDKTVRQKKYAIEKNIVDYAIPRYLVKDEFNQIWDKQAEFYPQMKKENLKKEIYDILFYERPAAPYATGKCIYFREEDRLLKAHPLSEMRRIYEEVNNIRILNDMGKRKLTLEERDSIVNELLLKGQNAGKQAIKKLLNLSAQHKISLVDDRVIKAYLYSRPEFANIEYLQNMNEDELSSFIEFLAEPKMSKDKNARLYNEDALIEYLKPILKIDDEKEIGNLLTKLPKGRGMLGINATKIILKKLKEDVLTHREITDKLAETDKRFMAEEEIARQNQGKCFQLPYYGEILQTDTAPLPPLMINNNKSLNPDEIKWGKIANPAVHMILNQIRLVVNEIIRIYGKPYDINIELGRDVGMSTKKKKEFENRQKQNEKLNEEAKNYLKEHKIAINNKNILKYKLAKDQGWKDAYNPTQNISSVFTGMEIEHIIPQAKGGTDTYNNLCLVNRNDNLNKGDRYAYEYFEETKTPEEIREILKNARSRTPDKSWRFEADAREKYEESGDKEESTRYLTDTRYVAKMAQRYLRAVVDCSDCDEVMQNRILAVKGGQTAKLRQRWNLLGLEYDLMGLDIPRYFKLSEERVNPYTGEVFDKVKNKEWQPKPRIDHRHHAMDAITVACANRGLIQKMAEENDINKIHYPLPLTSVESVADFRRKVISCLKNVKVSHKPNHSKTGQFHKETARTVVWTNPKDPSKVIAFYKKRILDTVKSINDIDKLLLSEKIKDEYHPQISKDRQTHKSLVDNFILHLDNARQKLLEENEKKLLDGKKETKITDTMILSKALSIIRKAKLWNSDKYHCYENNSSLVYISKHKITYENGNNHCVDFYVKDGKVGWEVIKRFDANQADFEPQWKKEGGKIIYSIYKGDILELNTPEKWKQYTDKKRCLAKVRKFSSGITIELVNDARDDKNIDKLPDRGLSFYLEHKARKVELTPFGKIKKKHKVLWNGTKTAA

SEQ ID NO: 15450 - protein, 998 aa, unidentified
  REGION 1..998: note = Cas Enzyme sequence
IRATRSRIRRMEKALAHSGVLPQEQFDRLHAAGKGDPAPWWVMARWLTGVIPSLSPGEFWQILRWYAHHRGYDANRRWIKEDGEEDSKRTEETRKEMAKAGANTVAEFLCLKSGCKPSDRQPAFGKAFRGSKDSVLFARSTVEAEVRKMVDAHIGKIKGLDANLRNTLVGEADGSWGSTAWFGDKRLPKRYRGSLLFGQLIPRFDNRIISACPFEPEPNNKEVGRKVPSKANWEFLNFRWAMTAANIRIRVAGMERALTSDEMKKFFQACWDEGDIKPATGKDSKIQKNSDKLRAILKKAGLDFSSGDNLDQLVVLPDSLKAFRLVPIGSGLKAFRAIWACANDFQRRWLRNRLLKGDELTPAEIFAKPQPIFVEWKRNAATQTLFQGKDSVLLNESFKGEVPDGRAAYSRPILIKAFEEVMNGKDPREMKGCLFRQGETALEAAVPLDRRTNNHLVRHRIRIAEKLRKDIVKEYAGGQAKAFGQVVIEINRDLPSLSGKNAKEVASAESAKLKNFNDVKKQLESSLAGHKVHMTAGLLRKARIASDLDWTCPFTGQKYSAVELVRGVYDKDHIVPRSSRVSDSLSSLVVTKREVNKFKGNRTGLQFVKEEGGKKIPGTSLSVVSEDRYRSFVENLQPPTRMKDDVRRSDIRKRLMLTAHAPKVDDVGFLPKDLTQTSYLAKLALQELRKGFAADGAKVDVRPLPGLVTATARKTWKLLGCLVPACPEAKDAAGSNDKQAIRKLTHLHHALDAVVLGLSGLLLPREGNVLAALAARNQDEPSRRLLKSKMGEMIVISEDRAQLADLPKVLKDSIGAKLAEGRVAQHIPGTWSGTKSGPTMWGVVEKNEGRVTIRQRNKGMSSTSKTDNKGEWKSLVVPLESVIESSSLSGVLRIEENYGVLLSNPPEILPWNCVYRRLRKSKGLRVFRKGNLLNIPKGRYAGIWCVAGLTLNTKSGILLNLRKPPATDESYENVSLKTLQNNSMEILSSKLTGCPITL

SEQ ID NO: 15451 - protein, 1379 aa, unidentified
  REGION 1..1379: note = Cas Enzyme sequence
MKKILGLDLGSTSIGWALVNEAENDSERSSIIKLGVRVIPLTTDEQGNFEKGKAITTNQDRTSKRSARRNLHRYKLRRKELLKVLEQSGLITRDSILTEEGANSTFRTLELRAKAAVERIEKDEIARVLISINKKRGYKSSRKAKNEDEGQLIDGMKVAMDLHQRSITPGQFALEIFRQGKRFLPDFYRSDLQKEFDQIWRVQSGFYPEILSENLKNQLIGKNQKAVWAICEKPFGIVGAKRNTSGFERKLENYQWRAEATQKQVSLEQLIVVLQEINSQINGSSGYLGSISDRSKELYFNNQTVGQYLFDQIKADRHSRLKGQVFYRKDYENEFDVIWKSQSTYHSELNDELRETVKDIVIFYQRRLKSQKGLISVCDLEGRETEVIVDGKKKSKLIGPKVSPKSSPLFQEFRIWQRLNDLEVISKKDRAKRRLEQDEKQILFEELTVKEKLSKVDALKLLFKNHKELDLNFEKLDGNRTSFKLFEAYQKIIVASGHDDFDFSKMSSNEIKKIVTSIFEGLGIDTRILGFNSNLEGDEFERQPFLQLWHLLYSYEGDNSATGNQSLIKKLKSKFGFEEDYARILSAVTFEDDYGSLSSKAISKILPHLKDGKQYDEAVQWAGYKSHSNSETKEDKANKVLKAKLEILPKNSLRNPVVEKILNQAINVVNSIIEDYGKPDEIRLELARELKKSAKEREELTKTMNSASVEHENIRKTLNAEFGLQYVSRTDIIRYKLWKELEPRAFKTLYTNTYVAPEKLFSKEFDIEHIIPQSRLFDDSFSNKTLELRSANIEKGEKTAFDYVSEKFGDRGLKEYEIRVEELYKGGKEGISKGKYKKLLMKGSEIPDGFVERDLRNSQYIAKKAKELLEEVCRTVNTTTGSVTDRLREDWQLVNVMQELNWDKYQKLGLTYFEFNREGKKLPRIKDWTKRNDHRHHAMDALTVAFTKYNHVQYLNNLNARRDEGKKMSSVIKAIENKELYRDDSNKLKFKPPIPLDDFRAEAKRHLENILVSFKAKNKVVTPQKNKIKGSQKIQTTLTPRGQLHNESIYGSIKQYKTIVSKVGSSFDEEMISKVSKKIFREALSKRLLEFGNDPKKAFTRKNSLEKNPIYLDKLQTQKVPEKVKLVEEVTVYTVRKPIDPNLKLDKIIDEKVKMILEKRLQDFGGDPKKAFVNLDENPIWLNKERGISIKNVTITGVSNAVALHDKKDKFGNLILDKEGKTQPVDFVNTSNNHHVAIYRDSDGNLQENVISFFEASARVNAGLPIIDKSFKRADGWEFLFSIKQNEYFVFPNSQTGFDPQELDLKDDKNFHLVSPNLFRVQKIGSKDYVFRHHLETQLNDLSELEGVVFHRLRSTSRLSKLQKVRINHLGEIVEVGEY

SEQ ID NO: 15452 - protein, 1126 aa, unidentified
  REGION 1..1126: note = Cas Enzyme sequence
MLLISTTNKNAPSPGRSTVTGEPIPYDESLLRKSQAIAAHVHCYNSYLVKVLKSIGWNEMGETNTQTGSYILGIDLGSASLGWAAISLDGAGMATGLLRSGVRLFNPAVTGDIEKGQDESNAVARRTARLIRRQLRRRAARQSELFQLLQRYTLLPPYKGAEADASQQRHSILNALDQELTAKWVKPGNAGAQAAIELPLYLLRKTALDAALEPFELGRVFYHLSQRRGYRSNRKDQASDKGTPGKAKKADDLGAVQGGIKELEDAIRSSGTRTLGEYFTSLDPHSQKVRGRWTARRMYEEEFAAIWAKQVTFHPALLTEELHYKIKHLLFYQRPIKAQSHLIGDCELEPGERRAAWATLEAQQFRVLQKVNDLEIILPGNVTGIPLTPEQRQTVLNLLESSSEATFKKIRKALGLGENIGFNLQRGGETKLKGNLTNSHMADVFAERWLEMSEEDKKQVVEDWRTIEREESLIRRATEHWKLDETGAKWLASRPAPSGYCSISRKAIRKLLPLMMEGKRFKEAENEIWGRRQALKSLRNPAVERALTELRKVVNALIRELGKPTEVRIELARDLKKPRHERAKAVSQNRDREKQRSAAKVKMLQEIGPGFEHPSRADVEKALLWEECQGECPYTGKRFPLSSLFGENPPLQVEHIIPFSRIPDDSFQNKTLCYHEENQIKGNRTPFEAYKDAEQFETILNRVRNWRTPNPGKQRRFELRTLEELEGFSSRQLNDTRYASKLACELVGTLFGGRDIPTESGSRQVVFASSGMVTATLRKGWGLEAILREAAPSANGQNRGKPRTDHRHHAIDAITIALSAPRMIAALSRNNAQDPYWPRNGRTAPKLQSPWNGFVDSIRPHFEQMLVSHRPEHRLTGALHDETNYGRPHKEGGKDVVHIRKQVVGMSAGDIENIVDPAVRESVREKAASFGGDLKKWTPKEGSEDWPLLRTKTGKEIPIKRVRIKKSLGVETIAKGDRARHVALSSNHHVAIFALLDERGGEMRWEPMIVSLFEAMERKRKGQPLIQTRYPVVGEFIFKFSLMGGDTVLLHKDCDHKNNHCNPSVWRLRTIGSNGQLSLVRINDARLKAEIQKAKEWWSPTQDALRKLDAVKVVIDSLGRIHQSGG

SEQ ID NO: 15453 - protein, 1083 aa, unidentified
  REGION 1..1083: note = Cas Enzyme sequence
VEVKKKMKKEKRNYRLGIDMGSTSIGWCMLELDKDNNPCGIINLGVRIFPDGRDDKSKEPLSAARRTYRGMRRNLDRYLMRRQAVLDFFDRQGWLPQTDPERKQVFLLDPIILRKEALERQLTLPEIARAFIHLAKRRGFKSNRKTGEARDTDFMSAIENLKENLQKNNSRTLGEYLWLRNKDISKHEHHKKVPTKFRYDKGLSDEERIFPTRDMVEYEFDVIWDTQAKHYPEMTGELKKELRGIIFFQRPLKKQIVGKCTFEREEDRCIKAHPLFQEFRLRQEINQLELISNTDNSNRNLTQEERDVLYEHLSRKKYETFEKLRKKLLGKTSDEYRFNYETENKKSMQGNLTDYAFNRNKELGAWWNKLGQDGQIKTVEVLLDDTLADEAVQLILLDLGLPAELAADALNAPLPDGYGSLSLKAIEKIIPFLRQGEKYYKACELAGYNHSDYNGEVYDQLPYYGEIKEINTLPLQKITHDDKADEFGRIGNPTVHIALNQLRRIINALIDRYGIPQDISLELARESAPSAKMVNSLKEQLGMKVVKGGYEKDSLYRQYHNLIKRVQDKNAKLNQRLDSELERQGIAVNSENRLKLKLWEELATDDFNRCCVYCGNMISRDDIFKPHIQVEHILPKSRTYDDSYANKTLSHHSCNIDKGERSPWEAFGNKTGKYDWQEICDRSANLPVNKRWRFNENAMQQYADENELIGRMLNDTRYMSKVAAQYLRYVCGKAVTPVTGKLTEELRRKWGLNKLLGESDVKERTDHRHHAIDAFVIALTDRSLVKRYADAIKRSPDRFLQGLGNPYPMFSYEQMKKQVEAIKVSYKPDQVNPAKLRSCHQTAGGLAMETAYSYVGPDPDNKKLALYSIRQDVTSLTPKDIENIKDDTGFVKEQLRSLLSSCPDEKKLKETLTEWANQNNIKKVKVILRANPDSMIPVKDKNGRIYKYYASDENLFADIYHNYNPKQNLDKWDMEIVSSYKAHQPGFTPEWKSRYPWAKLVMRLYKNDVVAYTNDAGQRELRRVRKMTYGIVYLRELCVATKPKGKEDIGEQFSANQLRLKSARKAGVDILGRYFDPFVNEQK

SEQ ID NO: 15454 - protein, 1067 aa, unidentified
  REGION 1..1067: note = Cas Enzyme sequence
MGENYRLGLDLGTNSIGWALLRLDEHGVPCGLLDFGAHIFHDGRDPTSQQSLTADRRVARGARRRRDRYLQRRRRLQALLSDYGLLPISKDERKALGRQDPYTLRARALDGPLKPYELGRTLFHLNQRRGFKSNRLSGEEDEKERSKIAERIGKLREEIDPKTPGRRTLGEWLHRRHARRKPVRFRPESATFYPTREMYEEEFDAIREAQKQNPILTPSQWDALRTIIIHQRPLKPVEVGRCTLDPSEPRAHKALPLAQEFRIYQEVNNLRICEPGQRKERPLREDEREILIQLLLNGSDVKFSSLAKKIGVDDQTRINLASEKRKRLDGDATAKKLGNKNIFGRRRWNQLSGDSSAREETRRRQNEIVKALLDQNRNDNELIATARHEWGLDEEEASSLCRVRLPQGTVHLGETALSRVTPELARGLRYDEAVRRHYRDHSDFSGDGQNSELPYYGKFLHRYVVGGGKEGDESARHGRIGNPTVHIGLNRVRKLVNELIALHGKPDSIVIELARDLKNSLEDRKEISKRQAEAQKANEGRRKAITDAKVQPTPLMIRKIRLWEEQAVGATKQCPFCGGNISVNQALSEKTEIEHLLPFSRTLDDSMANKVLAHTECNRRKGNRSPIEAFGTEKSGKYAYAGILERARSLPGNKAWRFNEDAMERYEREERGFLSRQLNETRYLSRVAREYMTSICPKEKVYVVTGQLTAMLRGKWGITTGKLLGDGKADDEPNKNRNDHRHHAVDALVIALTSRSLLQRVATLAGQNREAGIERLLANFPKPWDGFSHEEIRQRLARVVVSHRPEHGLAGQLHNATAYGMIGRIEEGKGPFSNDKYQVVVTKPIASTKPQPKLLDAVRDTGLKKALKELWAFVEKNEGGEPAEKWKKFTERAASPGELGKFGFCGAKHGVRRVRVTENLTVHPLPRKGLYKAVKPDSNAFMDVFEMPNGKWQAVTITRLAANAPDFKERHNEVKPHPAARRIARLFIGDMVAIAENNDRHICRIQKLSGQDVWLSPHNEANADQRSRDSNNPFKLTKRSVNALRKLCFRKVHVDILGRVRDSGTRS

SEQ ID NO: 15455 - protein, 1106 aa, unidentified
  REGION 1..1106: note = Cas Enzyme sequence
NLTLGFDIGHASIGWCALGADQPSPSTPSILGAGVVTFPTDDCLASNRRQLRRTRRHIRSTRQRVERLKCWLSHRGVLGRTDLDRPGHPAPFLLAAAALRGHRTLSAWELWTVLRWYAHNRGYDGNTRWASHSIEQTEAEADTKKELAARALMQLRGTQTMAETICACLGLDPAESGRRISSHLPYRTLDAAYPRRVVESEVGALLSKQMGSTPGLDAQTLRLVMTRDPLGVEDRALLVAAGIRIPKRYEGGLLFGQLVPRFDNRIIARCPITWATVYDREMTAGRNPQQAQKAAEREAKVPSARTVDFLRYRFARVLANIRAGGAPLPSTVRQALMRLGEERGRFTRTELRKEVEALTGTKETNLESFFNLHPDSESALVVDPAAAVPHTNRVIKALWQILPDPTKAHVLERWRRSLGVRVGDIVALATSQEPDRATEFATHAEKGAPKGKTSSVPAGVQDPLMRVIRPDYPNGRAPYARPVLKRVVEEVLAGFDPTKPLHSTEHPEGETKPQNGVLYQLHDPASRARALQNQRPLPKLTNNHLVRHRLLILGRLLDDIASEFCPDNQNQVTRVVVEVGRDLKEFSGMSAKEIASELKSRLRHFKTAVEHLRREAPGLPMSGGLIRKCRIAMDLGWTCPFTGSIYSAADLPHLEREHVVPFASRATNALYALVLTWPEVNRMKGKRTARGFIQEEQGHPVPGKPNLQLMTLARFDAYVEALDTKGHPDDARRKRARKALLAMADFNERDQGFTSGQLTQSSHLMKLALREVSRRFPLAHTDAIPGVVNAEIRKAWSLSGTLVRACPEVIDPACQTLLPKDQIRGITHLHHAVDAATLTLTAHYFPLQFRGVDVKGKIWEALLRRNKSEEDVRLLTGLKVVRRDSQGQMQLAAPPDTVKDQLAQRLCEWRVVQHVPADRRGAKAELLTWGICSHDGEGDSARITLHQQTSSVVDGRRVILLKEREERAGKLLGLKPKTGDGKLSRIKGVLIVGENYGLALDPEPTIIPFHSVHQALLELRSRNHGKPPRVLRPGMTIKLSGQGARNGLWRIYSVQASLKVDMTRPHIVGRPKNGPSVWREVPVRGLLMNGLEILPPRYTAHPALAT

SEQ ID NO: 15456 - protein, 1149 aa, unidentified
  REGION 1..1149: note = Cas Enzyme sequence
MILSFDIGYASIGWCVLSSSDGPSRDPEFLGTGVVTFPTDDCLASKRRDLRRTRRHIRSTRQRIERMKRWLVHQGVLERQDLDKPGHPAPFLLAAAALQGHRTLSAWELWTVLRWYAHNRGYDGNSRWSREEVTDDDTAKETNAKALMTQHNTKSMAETVCACLKLDPAKANKTISSHLPYKTLNAAYPRTTVQKEVLALLQTHLGKIHGLDEKTLDLLFTPDLLSDEDRDFLKAADVKLPKRYHGGLLFGQLIPRFDNRIISRCPITWAKTYDEAIAEGKSEAQARKLADKFAKVPAAKSKEFLEYRFSRILANIRADGKPVDKELRQQLWDLAEKQGRLTHADIKKAVKQHCGDVSTNLEAYFKLHPDSEEALVLDPVMDEVRKADGSQAKLSPFWIHLSDETRQEVIDQWRTGKAVSLAWIAERAGENPSLAEAFQKEFSELKPKKGQARFSSLNEYLQGVRIAPKIPSGRAPYARPVLRQVAEEIKNGWDATKANKVTEPENGEDKPANGILYDLGIPTSRVRELQNERPIEQLTNNHLVRHRMLILERLLDDLVEEFVSKERPVSRVVVEVARELSQFSGMTAKEIATELNSRLKDFKSAVAYLENHAPEMKVNGSIIRKTRIAMDMNWCCPFTGEKYEVTTLPHMEREHIIPYATRNSNALHALVLTWPQVNRMKGKRTAKQFIMESANLPSRQVQGLERLTLFTPKQFDEFVDKLDTKGHPDDARRKRARKALLATANFEDKELGFTDGALTQTSHLMKLAMRGLTQRFPNVSCDSIPGPVTAEIRKAWNLTGTLALTCPEVIDPHSGETLPKNDIRGLTHMHHALDAATLALAAHYFPLQARGQDQKGKIWQALLRRYRTAEEKAFLHKLGVFDRYERTRRDKDGKEYQVTDVRLRDLSKSVKEQLSRSLAKCRVMQHIPADRSGTKAELLTWGIVSIIGDNALIIQRSNRSLLELDADSPQRRWKDKPPTKEAVKLLKEHGHLLKSNEKRLVKRGINKLTTEKLARLLGPASPEIGGKLLAIRGALVIGDNFAIALMNQSPILIPFHQIHRTLASLTASNGGKLPRLIRIGTLIKIPRGTWKGTWRVISVKNSEAYGISVDLAYPHGIKLVKGNAKVPQMLLDGLEILPRRYTGHPLDNE

SEQ ID NO: 15457 - protein, 1155 aa, unidentified
  REGION 1..1155: note = Cas Enzyme sequence
MGSRVVPLTNLGDDKAFSKGKAFTANQERTARRTMRRGFARYQLRRYRLRRELEKVGMLPDAALIQLPLLELWELRERAATAGRRLTLPELGRVLCHINQKRGYRHVKSDAAAIVGDEGEKKKDSNSAYLAGIRANDEKLQDEHKTVGQYFAEQLRQNQSESPTGGISYRIKDQIFSRQRYIDEYDQIMAAQRVYYPDILTDEFIRMLRDEVIFMQRPLKSCKHLVSLCEFEKQEKVMRVQQDDGKGGRQLVERRVKFGPKVAPKSSPLFQLCRIYEAVNNIRLTRPDGSPRDITPEERDKIVAHLQSSASLSFAALKKLLKEKAIIADQLTTKSGLKGNSTRVALAAALQPYPQYHHLLDMELETRMMSVQLTDEETGEVTEREVAVVTDSYVRQPLYRLWHILYSIEEREAMRRALITQLGMKEEDLDGGLLDQLYRLDFVKPGYGNKSAKFICKLLPQLQQGLGYSEACAAVGYRHSNSPTSEEITERILLEKIPLLQRNELRQPLVEKILNQMINLVNALKAEYGVDEVRVELARELKMSREERERMTRQNGERKKANDKVAEKIQKCGLFPTKSRIRKYMLWEEAGRQCLYCGRSIDEKQCLNGDDMEVEHIIPKSVLYDDSYGNKTCACRRCNKEKGNRTALEYIRAKGWEDEYMERINERLKAKKISYSKYQRLRWLKEDIPSDFLERQLRLTQYISRQAMAILQQGIRRVSASEGGVTARLRSLWGYDDILHTLNLDRYDSMGETERVSREGETTEKLRIKDWSKRKDHRHHAIDALVVASTRQGYIQRLNRVSSESEREAMSGEIEMQKVTKTDKLSLLERWLTQRPHLSVRAVSDKVAEILISYRPGKRVVTRGRNIYRKKTADGREVTCVQRGVLVPRGELMEASLYGKILSQGRERIVKRYPLHTLKGEVVDPRLRELIAEYNQEITSKVKAKGAPLYLDAAEKQEVRSVRCYVDKPSVAKAIPIRFDECGRAITFVQSGNNHHLALYRTPKGKLVGSIVTFWDAVDRARYGIPLVITHPREVMEQVLQRGDIPEQVLSLLPPSDWVFVDSLQQDEMVIIGLSDEELQRALEAQDYRKLSEHLYRVQKLSAGKYFIRYHLDTDVDEDNRSGRIPKFYQLSLDAYKKNNVRKVRVDLLGRISLL

SEQ ID NO: 15458 - protein, 1050 aa, unidentified
  REGION 1..1050: note = Cas Enzyme sequence
VKIDYRLALDLGTNSIGWCIYRLAIDEGSTDERERWRPIRIQRMGARIFSDGRNPKDLASLAMARRVARQQRRRRDRALRRKGKLLDALIELGLLPQDSVQRKALVALDPYVLRAQALTVPLNPHHVGRALFHLARKRGFRSGRKDLTSEDKETGKVKTGIANLKARLAEAGCATVGAYLAQRHAHREPVLARPDASGEYAIYLARELVAEEFDAIWASQHPHNPNVFTAAAAARIRDIILYQRPLRPVEPGKCFFEPDEFRALLAHPQSQRFRILQELANLRIEYAKFDVRSLARDQRNMLLDLLTHGGSSLKDGGRVLTWAELRKLIRAPKGAPINLDTSGRKGLKADSVSIRLSDPTAVGPAWRDCGTAHQDRFLHVLRRIDRLDDLDVALRGQGFDVPVERLAAIFQVAARMEDEFGAVSLKALSKIVPQLESEVIHYDEAVRRGGYRSHSDRYEGLLEPNLPYYGQCLPGYVQPRALPTASPEERQYGRIPNPTVHVGLNQLRRIVNAIIKRYGHPKEIIVEVARELGMSGERRRELIREQEQHRHRGERHADELARLGLKNNRENRQRLQLFEEIAANDPLGAECIYSGERISQARLFSDEIEIDHILPFSRSLDDGIGNKLLCVRRANRDKKQQTPHEAFGASPGRYGWPDILARVERLVPRKARRFSEDAMEAFLRDRDFLDRHLTDTAYFSRVARDYLTAICPPNRIWVSTGKLTAMVRAKLGLNRILSSTGNKERNDHRHHAVDAAVIGICDRRVIRAVATAAARAESNGEWRLVQGIDPPWPGFFEDVRATVDRVIVSHKPEHGLDGGLHNETSYGLVEGPDQKGRSLVAHRIVVTDLKSRADAEKMLDDGPLKQQLVELLSANSGTALKQALAEFIRKSGVKRVRVAERLSVQEIQNPNRAAPKLVKPDGNYCYLVQRKESSGWGGSAVTRLTATRVARPTGGTFPPPASTVMLVRVGDSIAAEKEPGRIGIFRVVKLSGAQLALAPHHEAGALKARDSDPADPFKYWYVSATSLHGAKARVVGVDELGYVNDPGFRE

SEQ ID NO: 15459 - protein, 1045 aa, unidentified
  REGION 1..1045: note = Cas Enzyme sequence
MSLIFGFDIGTTSIGFAAIEFDPGRSEGRILRMGVRIFPEARDPKGTPLNQTRRQKRMMRRQLRRRKDRRRQLNEALQAYGLLPRFGSAEWSEVMALNPVALRARALEEALTPSELGRALYHLAKRRHFRGRDLEESEDGQALAEATGAEEAADEKAARSGREATIQALRSSGKTLGQHLSSTPRGERQRGLHALRRHVEDEFQRMWGSQARFHPELRNEDFQERIRDIVFSQRPVFWRLNTLGECRLDPGQPLAPKGSWASAQRRMLEKLNNLEIAGGNARPLDDAERMAILAPLQVQQSMSWSGARKALEPLFKARGESARNLKFNLELGGDPKLLGNPVEARLASIFGDTWAHHPQKQEIRAGIHERLWAADYGRIGNQRVVIKRAAERASDRRSAAESFASEFGASPGQVAELEKMTFPTGWDAFSLSAILKCLPELERGVRFGALLASPDYAEWRREKFPNRNQPTGEILDRLPSPANPEEQKRIASLRNPTVIRTQNELRKVVNNLIDLVGKPDLIRVELAREVGKGKAERDEILAANRNQEKRRQEAQRRLEENGIPSPSRADIEKWLLWKECQERDPYTGDAISFDALFHQGAFEVEHIWPRSRSLDDSFRNKTLCRKDVNLAKGNRTPFEYYRSDPDAWEAVKVRLDSLTSTRLGEGLSPGKARRFMAEAIPDDFASRQLNDTGYAARQAVAFLKRLWPDVGPTAPVTVQPVTGRVTAHLRRLWGLNNLLGDTGEKNREDHRHHAVDALVVACTHPGVTKALSDYWSRRDGPDGAGSKPTLLPPWPSIRADAGNVIPHILVSHRVRKKVSGGLHLETVYGNTGNDVETKSGVFREFVRRKKVENLTASEFNAIRDPHVRSVLQDFLARHGGVPKKIKWNTYPRVSPDGPEIRSVRILIRQQLELMAEVSTGYADLGSNHHIAIYRRPDGRGEFEVVSLFEAARRLARRAPVINRQRDGAEFCFSLCPGDAVEFPEDHPKRGIRIVQGVWASGVVVLHDNTDASGGSVWRPTASTLPGAGVRKISIDPIGRRRVIRD

SEQ ID NO: 15460 - protein, 1064 aa, unidentified
  REGION 1..1064: note = Cas Enzyme sequence
MAYRLGLDVGTASIGLVAYALDAAEKPVAVAYHAVRIFSEPLRPSKQGGVGEPKKAARRLARQARRQHQRRSRRLRTIACLAPRLGLDPRTLPSNPPNNILELRARAAREPIELGDLLRVFLHLAKHRGYSGGFRVRGDDGEKGIVETGIKQLRDAMAEAASETLGEYLLCRHRKGETTRLKRARLYADRDLVEAEFARIWETQESHHPQLQATENGRSLRDRFHEEVFRQLPLRSPAPLVGHCALEPSLPRSPMAQPAAQAFRIEKQLADLAWVRGRDSESLTQPQRDTIRGLLIAKEEVTFEQIYKALKKADCPPPPGRWLNLSRGGRERLTGDRTTAAFRRLGLLEEWLGLEAIDQLRVINLLADMGSPEVFDQAGWEGRLVSKDNKPRSLAVPVVDFVNRMVASGKFGRLSAMKFDSGRSAYSVKALRTLTALMRDRGLDERHAVDAAYPHANDAPPSILSDLPAHDATGNVVVDVALRQLCHEVNKAIHHLGEPPAEVIVELSRDMRLGLAKRGEVTKRIRRNERARRDARKAIEDHGGTATGTAIRRYLLWTEQDQEWCPYCDRPINLGAALADGQTHFEHILPRALTRIGKQRDYQVLAHNSCNDDKGDHTPWEAWGDGRDTERWMIVETRAERFVQKRLYGKARQLLAMDFESEVLDDDAIAGFSERQFQEGAWIARLAAQWLRQVCPNVAVSRGILTAHLRRVWGLETVIPHTRLADGLPIFDRDGTEISQTDFDRYRSYWEGHPAAERTDRRLDKRVDHRHHLIDALVIGLTTRSLYQRMARHYQQVTESGDGKMRLYAEPPLPDIRKHALEVVEHCNLTHKSDRYPAGPMFKENALAVVLGKDGQRYFAQRKELTALAGPRDSVDTVRKRIETIVSDLTREAVGRAFENRLASGKSAVEALTEEIAHPVNGTTIRRVLMRGDKEEGAVKVTHDNRRSRALGQPLYKHLAPDGYAWLEINPEKPKDQQIRLVRPHEVNRETGQRMNGNPRRFYKSDTVRDPKDGHLFVVRQIKAGPRLILTLITETATAKESRDPRKREVCGDQILRLEVIHHG

SEQ ID NO: 15461 - protein, 1055 aa, unidentified
  REGION 1..1055: note = Cas Enzyme sequence
MPLIFGFDIGTTSVGFAVIERDAHSSAGKILRLGVRVFPEARDPKGTPLNQERRQKRMARRQLRRRRLRRRLLNELLSGAGLLPEFRSSEWQEIMAASPYDLRRRALEAELAPFEVGRAIYHLAQRRHFRGRDLAEEAGGEAEEPDDPDAASDREATLAALKREGLTLGVWLAAKDADARKGKPPMERRRGHHAHRSVIEEEFTRLWSAQAKWHPVLQDEAFRSRVHDAIFAQRPVFWRKSTLGECPFMPGEALCPKGSWLSQQRRMLEKVNNLALTGGNARPLDAEERAAILAKLQSQESMTWAGVRSALRPVFQKRGEKGAERTLIFNLEVGGDRKLPGNLVEARLSRIFGDSWDDHPHQQEIRDAVHRRLRAADYDEIGDQRVVILPHEERLKKRERAAQSFINDFGVTREQADALKALSFPAGWEPYSTRALEAFLPHLEAGVRFGALVNGPEWEAWRDETFPERNRPTGEILDRLPSPAVREERERIAKLRNPTVVRTQNELRKVVNNLIGVYGKPDLIRIELARDVGRSKREREQAQNGIRRNEKRRREAAADFVAKGIAQPSHADIEKWLLWKECNCRCPYTGDHIGWDDLFGHQPRFDVEHIWPRWKSFDDSFRNKTLCRKDKNLAKSNRTPFEAFGNDPEWDRMKDRVWALVKEGKMAPGKAKRFCDERPLPDDFVTRQINDTGYAAREIMAQLKRLWPDVGPTAPVTVQAVTGRVTAQLRRLWELNNILGDDGEKTRADHRHHAIDALVVACCDPGMTNRLSRYWQAKDDPRAMRPDLPPPWPTIRADAERAVAEIVVSHRVRKKVSGPLHAEMPFGHTGKQLEENGNTYSIISKRMPVEKLTEETLRVKSINDLTRTAKFLIQDESVRRALLNHLVTTGLPPAKAYPPYPKKGTNGPEIRKIRALSKRQANLLAESRSGWLDIDANHHIAIYRLPNGKAAFEVVSLFEASRRLARCEPIVRRDQRDGATFVMSLAPGDAIEFPEGPRAGIWVVTGAWASGQVIIERHDDAVGATTTRPTANSLLREGARKVCIDPIGRARPAGD

SEQ ID NO: 15462 - protein, 954 aa, unidentified
  REGION 1..954: note = Cas Enzyme sequence
MRGRTKENEDPYDPYVLRARAIDPAEKLTEFEIGRALYHLAGRRHFLAKSVQEEDTGIEAQQDEDEKKARSNREQTLRQLEEQGLTLGQLLSKRGPHERKRGAHATRQKVREEFDLIIEAQKNHHPPLGNPKFSSVLQQSIFFQRPVFWRKNTLGTCSLLPEASLCPKGSWLSHQRRMLEKLNNLEIAGGNQRRLDSEERAAILETLQARSSMRWAEVRRALAPLYRNRGEAGAEKTLKFNLEIGKEKSLLGNALEFQLVKVFGEDWNHHPRRDELRNAVHERLWKADYNERGERVEIVPDGLREEAREAAARSLQRDFLLGDDHVKQLMQLKLAPGWEPYSTQALQKILPLLQRGERFGAIINGADFEEWREQTFPNRDQPTGEVMNLLPSPSDKMEQSRLNNLRNPTVIRIQNELRKVTNNLIRRYGKPDLIRVELARDVGLSKRDREEMHAGMKRMEARRNKAKIELNYCGVDSNKRNIEKWMLWDECGRQCPYTGQMISFDDLFRTGMFEVEHIWPRQRSVDDSFMNKTLCHRDENRRKQDRIPDEYLNEDEMAALRQRLDGCQRTKANPSGMTAGKIKRFLAKSIPDDFASRQLNDTSYAARETVASLKRLWPDIGPGAPVKVQTVSGKVTAKLRKFWGLNNILGLDGEKNREDHRHHAVDALVVALTHPGVTQVLSHYWRSEREQVPETRIVPPLPDLIAQTKNAVNKIVVSHRIQRKVSGPLHEETVFGETDEVEISHKKEYRLYVTRKPLESLGAGSFGNGDGRIRDPQLRKRLEVWNKDRGGVPKKAFVAPPFPARGKDGVRIQKVRVLNRRLPSLMTNRSTGLSESGLVHHIIIWRNSEGAVKFDAVSLGVAAERKARREPIVQRNGLTNAQFLMSLSKKEALRISGDIFIVESIWSNGQVVLIDHRDAKEKPDATQKTVGSLIKLGAEKISIDPIGIVHPASD

SEQ ID NO: 15463 - protein, 954 aa, unidentified
  REGION 1..954: note = Cas Enzyme sequence
MRGRTKENEDPYDPYVLRARAIDPAEKLTEFEIGRALYHLAGRRHFLAKSVQEEDTGIEAQQDEDEKEARSNREQTLRQLEEQGLTLGQLLSKRGPHERKRGAHATRQKVREEFDLIIEAQKNHHPPLGNPKFSSVLQQSIFFQRPVFWRKNTLGTCSLLPEASLCPKGSWLSHQRRMLEKLNNLEIAGGNQRRLDSEERAAILETLQARSSMRWAEVRRALAPLYRNRGEAGAEKTLKFNLEIGKEKSLLGNALEFQLVKVFGEDWNHHPRRDELRNAVHERLWKADYNERGERVEIVPDGLREEAREAAALSLQRDFLLGDDHVKQLMQLKLAPGWEPYSTQALQKILPLLQRGERFGAIINGADFEEWREQTFPNRDQPTGEVMNLLPSPSDKMEQSRLNNLRNPTVIRIQNELRKVTNNLIRRYGKPDLIRVELARDVGLSKRDREEMHAGMKRMEARRNKAKIELNDCGVDSNKRNIEKWMLWDECGRQCPYTGQMISFDDLFRTGMFEVEHIWPRQRSVDDSFMNKTLCHRDENRRKQDRIPDEYLNEDEMAALRQRLDGCQRTKANPSGMTAGKIKRFLAKSIPDDFASRQLNDTSYAARETVASLKRLWPDIGPGAPVKVQTVSGKVTAKLRKFWGLNNILGLDGEKNREDHRHHAVDALVVALTHPGVTQVLSHYWRSEREQVPETRIVPPLPDLIAQTKNAVNKIVVSHRIQRKVSGPLHEETVFGETDEVEISHKKEYRLYVTRKPLESLGAGSFGNGDGRIRDPQLRKRLEVWNKDRGGVPKKAFVAPPFPARGKDGVRIQKVRVLNRRLPSLMTNRSTGLSESGLVHHIIIWRNSEGAVKFDAVSLGVAAERKARREPIVQRNGLTNAQFLMSLSKKEALRISGDIFIVESIWSNGQVVLIDHRDAKEKPDATQKTVGSLIKLGAEKISIDPIGIVHPASD

SEQ ID NO: 15464 - protein, 1049 aa, unidentified
  REGION 1..1049: note = Cas Enzyme sequence
VQLIFGFDIGTTSIGFAVVEHERTISRGCIKRTGVRIFPEPRNPKNKIPLNQKRRMARLHRRQLRRRRQRKAEVFRLLHESGFLPSRDSEEWQELMRGRTKENEDPYDPYVLRARAIDPAEKLTEFEIGRALYHLAGRRHFLAKSVQEEDTGIEAQQDEDEKKARSNREQTLRQLEEQGLTLGQLLSKRGPHERKRGAHATRQKVREEFDLIIEAQKNHHPPLGNPKFSSVLQQSIFFQRPVFWRKNTLGTCSLLPEASLCPKGSWLSHQRRMLEKLNNLEIAGGNQRRLDSEERAAILETLQARSSMRWAEVRRALAPLYRNRGEAGAEKTLKFNLEIGKEKSLLGNALEFQLVKVFGEDWNHHPRRDELRNAVHERLWKADYNERGERVEIVPDGLREEAREAAARSLQRDFLLGDDHVKQLMQLKLAPGWEPYSTQALQKILPLLQRGERFGAIINGADFEEWREQTFPNRDQPTGEVMNLLPSPSDKMEQSRLNNLRNPTVIRIQNELRKVTNNLIRRYGKPDLIRVELARDVGLSKRDREEMHAGMKRMEARRNKAKIELNYCGVDSNKRNIEKWMLWDECGRQCPYTGQMISFDDLFRTGMFEVEHIWPRQRSVDDSFMNKTLCHRDENRRKQDRIPDEYLNEDEMAALRQRLDGCQRTKANPSGMTAGKIKRFLAKSIPDDFASRQLNDTSYAARETVASLKRLWPDIGPGAPVKVQTVSGKVTAKLRKFWGLNNILGLDGEKNREDHRHHAVDALVVALTHPGVTQVLSHYWRSEREQVPETRIVPPLPDLIAQTKNAVNKIVVSHRIQRKVSGPLHEETVFGETDEVEISHKKEYRLYVTRKPLESLGAGSFGNGDGRIRDPQLRKRLEVWNKDRGGVPKKAFVAPPFPARGKDGVRIQKVRVLNRRLPSLMTNRSTGLSESGLVHHIIIWRNSEGAVKFDAVSLGVAAERKARREPIVQRNGLTNAQFLMSLSKKEALRISGDIFIVESIWSNGQVVLIDHRDAKEKPDATQKTVGSLIKLGAEKISIDPIGIVHPASD

SEQ ID NO: 15465 - protein, 1049 aa, unidentified
  REGION 1..1049: note = Cas Enzyme sequence
VQLIFGFDIGTTSIGFAVVEYERTISRGCIKRTGVRIFPEPRNPKNKIPLNQKRRMARLHRRQLRRRRQRKAEVFRLLHESGFLPSRDSEEWQELMRGRTKENEDPYDPYVLRARAIDPAEKLTEFEIGRALYHLAGRRHFLAKSVQEEDTGIEAQQDEDEKEARSNREQTLRQLEEQGLTLGQLLSKRGPHERKRGAHATRQKVREEFDLIIEAQKNHHPPLGNPKFSSVLQQSIFFQRPVFWRKNTLGTCSLLPEASLCPKGSWLSHQRRMLEKLNNLEIAGGNQRRLDSEERAAILETLQARSSMRWAEVRRALAPLYRNRGEAGAEKTLKFNLEIGKEKSLLGNALEFQLVKVFGEDWNHHPRRDELRNAVHERLWKADYNERGERVEIVPDGLREEAREAAALSLQRDFLLGDDHVKQLMQLKLAPGWEPYSTQALQKILPLLQRGERFGAIINGADFEEWREQTFPNRDQPTGEVMNLLPSPSDKMEQSRLNNLRNPTVIRIQNELRKVTNNLIRRYGKPDLIRVELARDVGLSKRDREEMHAGMKRMEARRNKAKIELNDCGVDSNKRNIEKWMLWDECGRQCPYTGQMISFDDLFRTGMFEVEHIWPRQRSVDDSFMNKTLCHRDENRRKQDRIPDEYLNEDEMAALRQRLDGCQRTKANPSGMTAGKIKRFLAKSIPDDFASRQLNDTSYAARETVASLKRLWPDIGPGAPVKVQTVSGKVTAKLRKFWGLNNILGLDGEKNREDHRHHAVDALVVALTHPGVTQVLSHYWRSEREQVPETRIVPPLPDLIAQTKNAVNKIVVSHRIQRKVSGPLHEETVFGETDEVEISHKKEYRLYVTRKPLESLGAGSFGNGDGRIRDPQLRKRLEVWNKDRGGVPKKAFVAPPFPARGKDGVRIQKVRVLNRRLPSLMTNRSTGLSESGLVHHIIIWRNSEGAVKFDAVSLGVAAERKARREPIVQRNGLTNAQFLMSLSKKEALRISGDIFIVESIWSNGQVVLIDHRDAKEKPDATQKTVGSLIKLGAEKISIDPIGIVHPASD

SEQ ID NO: 15466 - protein, 1048 aa, unidentified
  REGION 1..1048: note = Cas Enzyme sequence
MQWRLGLDLGTNSIGWTILATDDPQSRSLDRWRLIDGGVRIFPDSREPAKGGRVGDALAVERRMARGMRRTRDRRLNRMAYLMRELKRLDLMPTDTEACKALEALDPYELRAAALERPLSPHELGRTLFHLAKRRGFKSNRKAGDSDDGLRAEQITELKAELKGRTLGQFLWDRKAGGHSIRFRGREPWFPDRQMYADEFDRIHAVQAPHHNLTPDDWQALRDNSVLFQHPLKPVERGWCGLLPGERRTHRDTPIAQWFRLYEELNNLRWIDNAQQAHALSLEQRQAILDLLLTRASEVKFTAMRSKLKGADGKPQFPRDSRFNLEDDRRKGLDPHRVAVRMRSEPALADLWEAMRDDPALDDLFELLHAAQDDDSLQIRLREDFDLTEGQARALARLPLTPTTTRLSRKAMEHLVPIMRDQGLGYAEAVAEMGNNLGIDLHHSHRPLAGDLERLPYYGDLLTGAVVGGDLSKDAEHDPEGHYGRIANPTVHVALNQLRKLVNRLIDRMGGNPAEIHVELSRDLKLSNKKRNEVNSEIAKNTRNNERLRERWREISGGREANARDLKKLKLWDELGKDELARRCVFTGKTIAGHHLVNGEVDIEHLLPFSRTLDDTNANLTLSFKWANRLKGNLSPHEAFGANQHAGDGVVWAELLDRASRMPKSKRWRFSEDAMEKWEADSSFIARQLTDNAYISRLARRYLGGICDRVMPAPGKLTALVRGKWHLNSLLADDNRKNREDHRHHMIDAFTVALTDYGLLQRVSALSKRGADDRLHIAVPDLPEKLRRDFSARLEEVIVSYKPDHGHQGRMFNDTAYGIVSDIGVDPTLPKHKLVVRKPLVSLSPNELDAIRDKAWRERVQAFLYGAGWHDLGKSDQAKKLPELMASFSERHGIGKLRILVANQSAQRIESAPYKAYAPDSFVCCDVWKMPAGKPTAWKAGEFKGVGHFWSYAESANGVPDAISGRPHPAAKHVCRLFKDDIVAFDEGGGRQIMRVAGFSTTNNKLDLRPLTQTSGKQNYISINVLMQSNIRKVHILPDGVLRDPKAA

SEQ ID NO: 15467 - protein, 1048 aa, unidentified
  REGION 1..1048: note = Cas Enzyme sequence
MQWRLGLDLGTNSIGWTILATDDPESRSLDRWRLIDGGVRIFPDSREPAKGGRVGDALAVERRMARGMRRTRDRRLNRMAYLMRELKRLDLMPTDTEACKALEALDPYELRAAALERPLSPHELGRTLFHLAKRRGFKSNRKAGDSDDGLRAEQITELKAELKGRTLGQFLWDRKAGGHSIRFRGREPWFPDRQMYADEFDRIHAVQAPHHNLTPDDWQALRDNSVLFQHPLKPVERGWCGLLPGERRTHRDTPIAQWFRLYEELNNLRWIDNAQQAHALSLEQRQAILDLLLTRASEVKFTAMRSKLKGADGKPQSPRDSRFNLEDDRRKGLDPHRVAVRMRSEPALADLWEAMRDDPALDDLFELLHAAQDDDSLQIRLREDFDLTEGQARALARLPLTPTTTRLSRKAMEHLVPIMRDQGLGYAEAVAEMGNNLGIDLHHSHRPLAGDLERLPYYGDLLTGAVVGGDLSKDAEHDPEGHYGRIANPTVHVALNQLRKLVNRLIDRMGGNPAEIQVELSRDLKLSNKKRNEVNSEIAKNTRNNERLRERWREISGGREANARDLKKLKLWGELGKDELARRCVFTGKTIAGHHPVNGEVDIEHLLPFSRTLDDTNANLTLSFKWANRLKGNLSPHEAFGANQHAGDGVVWAELLDRASRMPKSKRWRFSEDAMEKWEADSSFIARQLTDNAYISRLARRYLGGICDRVMPAPGKLTALVRGKWHLNSLLADDNRKNREDHRHHMIDAFTVALTDYGLLQRVSALSKRGADDRLHIAVPDLPEKLRRDFSARLEEVIVSYKPDHGHQGRMFNDTAYGIVSDIGVDPTLPKHKLVVRKPLVSLSPNELDAIRDKAWRERVQAFLYGAGWHDLGKSDQAKKLPELMASFSERHGIGKLRILVANQSAQRIESAPYKAYAPDSFVCCDVWKMPAGKPTAWKAGEFKGVGHFWSYAESANGVPDAISGRPHPAAKHVCRLFKDDIVAFDEGGGRQIMRVAGFSTTNNKLDLRPLTQTSGKQNYISINVLKQSNIRKVHILPDGVLRDPKAA

SEQ ID NO: 15468 - protein, 1048 aa, unidentified; identical to SEQ ID NO: 15466
  REGION 1..1048: note = Cas Enzyme sequence

SEQ ID NO: 15469 - protein, 1187 aa, unidentified
  REGION 1..1187: note = Cas Enzyme sequence
MSKHVLGLDLGVGSIGWCLIALDAQGDPAEILGMGSRVVPLTNLGDDKAFSKGKAFTANQKRTARRTMRRGFARYQLRRYRLRRELEKVGMLPDAALIQLPLLELWELRERAATAGRRLTLPELGRVLCHINQKRGYRHVKSDAAAIVGDEGEKKDSNSAYLAGIRANDEKLQDEHKTVGQYFAEQLRRSQSESPTGGISYRIKDQIFSRQRYIDEYDQIMAAQRVHYPDILTDEFIRMLRDEVIFMQRPLKSCKHLVSLCEFEKQEKVMRVQQDDGKGGRQLVERRVKFGPKVAPKSSPLFQLCRIYEAVNNIRLTRPDGSPRDIIPEERAKIVAHLQSSASLSFAALKKLLKEKALIADQLTTKSGLKGNSTRVALASALQPYPQYHHLLDMELETRMMTVQLTDEETGEVTEREVAVVTDSYVRPPLCRLWHILYSIEERDAMRRALITQLGMKEEDLDGGLLDQLYRLDFVKPGYGNKSAKFICKLLPQLQQGLGYSEACAAVGYRHSNSPTSEEITERTLLEKIPLLQRNELRQPLVEKILNQMINLVNALKAEYGVDEVRVELARELKMSREERERMTIQNDKRKEANDEVAEKIQKCGLYPTKSRIRKYRLWEEAGRQCLYCGQSIEEEQCLNGDDMEVEHIIPKSVLYDDSYGNKTCACRRCNKEKGNRTALEYIRAKGWEAEYMDRINERLKEKKISYSKHQRLRWLKEDIPSDFLERQLRLTQYISRQAMAILQQGIRRVSASEGGVTARLRSLWGYDDILHTLNLDRYDSMGETERVSREGETTEKLRIKDWSKRKDHRHHAIDALVVASTRQGYIQRLNRVSSESEREAMSGEIEMQKVTKTDKLSLLERWLTQRPHLSVRAVSDKVAEILISYRPGKRVVTRGRNIYRKKTADGREVTCVQRGVLVPRGELMEASLYGKILSQGRERIVKRYPLHTLKGEVVDPRLRELIAEYNQEITSKVKAKGAPLYLDAAEKQEVRSVRCYVDKPSVAKAIPIRFDECGRAITFVQSGNNHHLALYRTPKGKLVGSIVTFWDAVDRARYGIPLVITHPREVMEQVLQRGDIPEQVLSLLPPSDWVFVDSLQQDEMVIIGLSDEELQRALEAQDYCKLSEHLYRVQKLSAGKYFIRYHLDTDVDEDNRSGRIPKFYQLSLDAYKKNNVRKVRVDLLGRISLL

SEQ ID NO: 15470 - protein, 1189 aa, unidentified
  REGION 1..1189: note = Cas Enzyme sequence
MLMSKHVLGLDLGVGSIGWCLIALDAQGDPAEILGMGSRVVPLTNLGDDKAFSKGKAFTANQKRTARRTMRRGFARYQLRRYRLRRELEKVGMLPDAALIQLPLLELWELRERAATAGRRLTLPELGRVLCHINQKRGYRHVKSDAAAIVGDEGEKKDSNSAYLAGIRANDEKLQDEHKTVGQYFAEQLRRSQSESPTGGISYRIKDQIFSRQRYIDEYDQIMAAQRVHYPDILTDEFIRMLRDEVIFMQRPLKSCKHLVSLCEFEKQEKVMRVQQDDGKGGRQLVERRVKFGPKVAPKSSPLFQLCRIYEAVNNIRLTRPDGSPRDIIPEERAKIVAHLQSSASLSFAALKKLLKEKALIADQLTTKSGLKGNSTRVALASALQPYPQYHHLLDMELETRMMTVQLTDEETGEVTEREVAVVTDSYVRQPLCRLWHILYSIEERDAMRRALITQLGMKEEDLDGGLLDQLYRLDFVKPGYGNKSAKFICKLLPQLQQGLGYSEACAAVGYRHSNSPTSEEITERTLLEKIPLLQRNELRQPLVEKILNQMINLVNALKAEYGVDEVRVELARELKMSREERERMTIQNDKRKEANDEVAEKIQKCGLYPTKSRIRKYRLWEEAGRQCLYCGQSIEEEQCLNGDDMEVEHIIPKSVLYDDSYGNKTCACRRCNKEKGNRTALEYIRAKGWEAEYMDRINERLKEKKISYSKHQRLRWLKEDIPSDFLERQLRLTQYISRQAMAILQQGIRRVSASEGGVTARLRSLWGYDDILHTLNLDRYDSMGETERVSREGETTEKLRIKDWSKRKDHRHHAIDALVVASTRQGYIQRLNRVSSESEREAMSGEIEMQKVTKTDKLSLLERWLTQRPHLSVRAVSDKVAEILISYRPGKRVVTRGRNIYRKKTADGREVTCVQRGVLVPRGELMEASLYGKILSQGRERIVKRYPLHTLKGEVVDPRLRELIAEYNQEITSKVKAKGAPLYLDAAEKQEVRSVRCYVDKPSVAKAIPIRFDECGRAITFVQSGNNHHLALYRTPKGKLVGSIVTFWDAVDRARYGIPLVITHPREVMEQVLQRGDIPEQVLSLLPPSDWVFVDSLQQDEMVIIGLSDEELQRALEAQDYCKLSEHLYRVQKLSAGKYFIRYHLDTDVDEDNRSGRIPKFYQLSLDAYKKNNVRKVRVDLLGRISLL

SEQ ID NO: 15471 - protein, 1046 aa, unidentified
  REGION 1..1046: note = Cas Enzyme sequence
MDQFVFGIDLGIASCGWAVLQFPTPDDPTGEIVAMGSWMFDVPETDKERTPTNQIRRSNRLLRRVIRRRAQRMAEIRCLLAKHGLLASQEPDALGRAGLDPWELRARGLDKPLSPTEFAVALGHIAKRRGFKSARKGKEANTAGDDQEMLKALEATRERLGRYRTVGEMFGRDEDFRYRKRNRDGLFDRTQSRDDLIHEVGKLFEAQRRLGNDAASEALETGFASIAFRQKAMQDSEKLVGMCPFEPEEKRAARFAPSFEKFRLLGTLVNLRITTPDGERPLTPEEIRLATGDLGKTAKLSVKEVRKRIGLPADQRFTAIKPEEEAQDIAARTGEAMHGTKKLCDALGEALWAELQAQPEQLDRIAHIISFHETADTIAAELGKLDLPAGATDALLGDLTAFSRFKGAGHISAKAARALIPHLEAGLRYDQACEAVGYDHAASRWSKREQVADKAAFNRLVEDMGREIANPVARKSLTEGLKQLWAMRNHWGLPDAVHIEMARDVGNSLEKRNEIKRGIDKNTAERERQRGEVRELLGIEDVNGDTLLRYRLWKEQAGRCPYTGKAIPATAIIATDNSHQVDHILPWSRFGDDSYSNKVLCTARANQEKRGQTPFEWIMASQGEEGWGTFVARIEGNSAFRGVKKRNYVLKNAKEAEERFRTRNLNDTRYACRLLAEAVKLFYPEGDRQEKGGNRRVFTRPGGLTSALRHAWGVESLKKIEGKRIEDARHHALDALVVAAASEWEVQRLTQSYQEWEQRGLARPLRQVDPPWGDAASFRRQVKDAYDKIFVARPERRRARGECHAATIRQVKERDGVPVVYERRAITDLKDNDLERIKDPERNQRVIEAIRQWMEKGKPAHDLPKSPAGDDIRKVRLIARNKPAVDIRGGTADRGEMVRVDVFTKPNKRGKDEFYLVPIYPHQVMDKRAWPEPPMRAVAASKDEELWFEMTAEYTFKMSIYPRSCLEVVKPDGEVIQGYFAGLDRATGNISISDQKNSRQLWRGIGPRKLLTLKKYAVDRFGTRSEVKSEVRTWHGVVCTSPTRPG

SEQ ID NO: 15472 - protein, 1424 aa, unidentified
  REGION 1..1424: note = Cas Enzyme sequence
MTQKVLGLDLGTNSIGSAVRNLDLSDDLQWQLEFFSSDIFRSSVNKESNGREYSLAAQRSAHRRSRGLNEVRRRRLWATLNLLIKHGFCPMSSESLMRWCTYDKRKGLFREYPIDDKDFNAWILLDFNGDGRPDYSSPYQLRRELVTRQFDFEQPIERYKLGRALYHIAQHRGFKSSKGETLSQQETNSKPSSTDEIPDVAGAMKASEEKLSKGLSTYMKEHNLLTVGAAFAQLEDEGVRVRNNNDYRAIRSQFQHEIETIFKFQQGLSVESELYERLISEKKNVGTIFYKRPLRSQRGNVGKCTLERSKPRCAIGHPLFEKFRAWTLINNIKVRMSVDTLDEQLPMKLRLDLYNECFLAFVRTEFKFEDIRKYLEKRLGIHFSYNDKTINYKDSTSVAGCPITARFRKMLGEEWESFRVEGQKERQAHSKNNISFHRVSYSIEDIWHFCYDAEEPEAVLAFAQETLRLERKKAEELVRIWSAMPQGYAMLSQKAIRNINKILMLGLKYSDAVILAKVPELVDVSDEELLSIAKDYYLVEAQVNYDKRINSIVNGLIAKYKSVSEEYRFADHNYEYLLDESDEKDIIRQIENSLGARRWSLMDANEQTDILQKVRDRYQDFFRSHERKFVESPKLGESFENYLTKKFPMVEREQWKKLYHPSQITIYRPVSVGKDRSVLRLGNPDIGAIKNPTVLRVLNTLRRRVNQLLDDGVISPDETRVVVETARELNDANRKWALDTYNRIRHDENEKIKKILEEFYPKRDGISTDDIDKARYVIDQREVDYFTESKTYNKDIKKYKFWLEQGGQCMYTGRTINLSNLFDPNAFDIEHTIPESLSFDSSDMNLTLCDAHYNRFIKKNHIPTDMPNYDKAITIDGKEYPAITSQLQRWVERVERLNRNVEYWKGQARRAQNKDRKDQCMREMHLWKMELEYWKKKLERFTVTEVTDGFKNSQLVDTRVITRHAVLYLKSIFPHVDVQRGDVTAKFRKILGIQSVDEKKDRSLHSHHAIDATTLTIIPVSAKRDRMLELFAKIEEINKMLSFSGSEDRTGLIQELEGLKNKLQMEVKVCRIGHNVSEIGTFINDNIIVNHHIKNQALTPVRRRLRKKGYIVGGVDNPRWQTGDALRGEIHKASYYGAITQFAKDDEGKVLMKEGRPQVNPTIKFVIRRELKYKKSAADSGFASWDDLGKAIVDKELFALMKGQFPAETSFKDACEQGIYMIKKGKNGMPDIKLHHIRHVRCEAPQSGLKIKEQTYKSEKEYKRYFYAAVGDLYAMCCYTNGKIREFRIYSLYDVSCHRKSDIEDIPEFITDKKGNRLMLDYKLRTGDMILLYKDNPAELYDLDNVNLSRRLYKINRFESQSNLVLMTHHLSTSKERGRSLGKTVDYQNLPESIRSSVKSLNFLIMGENRDFVIKNGKIIFNHR

SEQ ID NO: 15473 - protein, 1057 aa, unidentified
  REGION 1..1057: note = Cas Enzyme sequence
ARLGLDLGSTSIGWAVLRLNERNEPDYLVRSGVRIFSDGRKRTDGTSLAVDRRLKRQQRRRRDRLLRRKRRLIAALTHAGLWPESRPEQLRLKNLNPYELRARGLREALTPYELGRAIFHLNQRRGFRSNRRTDRGQDKEKGLIRSAISALTQKLRESEAETLGQYLYERWRQGEGTRARPLGQGANVAYEFYVDRALVAAEFDLLWERQRQFNAIQLTDTAREKIRDVLFYQRPLKPAQAGRCSLEPDEPRALIALPSTQRFRILQEVNHLRVRATNAADERPLTVAERTVLLEDLFRGKSRTFDEIRRRLKLPHARFNLESERRKKLNGDLTAVILAKPSCFGKVWHQLPLEEQDATVSQLLDDSLTDEEVARRLRNSHGLSPDSVERILTANLPDGYARLSYKAIKRILPFLYEGLTYDKAVRAAGYSTTDTSMDGSAPELPYYGRVLERHVAFGTGNPRDPDEKRFGRVANPTVHITLNQLRRLVNALIARYGKPAEVVLELARDLKLGRQRAREIEREQAERQRDNDRLREELQQLGQPVNAENMLRLRLYRELERATGITTQCVYTGEQISLSQLFTPEVEVDHILPYSRTLDDSIANKVLCKARANALKGNRTPYEAFGHSPEGYVWQEILLRAAALPRNRRWRFSEDAMLRYEENGAFLARQLTDTAYMSRLAREYMTAICPSNKVWVTPGTLTGLLRSKWGLNRLLAHDDQKNRLDHRHHAIDAVVIACVDRSLVQKVAAAAARAEGQGSGRLLDGLEHPWPSFMLGVENAIRRMVVSHRPDHNPQDALHNDTSYGCRDTEESDATVVKTRCVHHYVPLLSLADAKPTDIREHLADERHGRAIAELLERRGGTKADARAALEEYGRSTGIRRLRWVEQLTVIPIRDRRTGVPYKFVKGDGNYCYEIYETPAGQWAGELISTFTANQRDFLERMQDMERYRRETFSGKPLVMRLIVNDTVAIELDGRRLIYRVQKMSEGRIVLAYHAAAGDPTRNGVHIPEIPEGRTVITVSPGRLQQLNARRVFVDMLGRVLDPGRRHAGTHRRASGG

SEQ ID NO: 15474 - protein, 1067 aa, unidentified
  REGION 1..1067: note = Cas Enzyme sequence
MAKEPVRPIRYRLGLDLGSTSIGWAVLRLNERNEPDYLVRSGVRIFSDGRKRTDGTSLAVDRRLKRQQRRRRDRLLRRKRRLIAALTHAGLWPESRPEQLRLKNLNPYELRARGLREALTPYELGRAIFHLNQRRGFRSNRRTDRGQDKEKGLIRSAISALTQKLRESEAETLGQYLYERWRQGEGTRARPLGQGANVAYEFYVDRALVAAEFDLLWERQRQFNAIQLTDTAREKIRDVLFYQRPLKPAQAGRCSLEPDEPRALIALPSTQRFRILQEVNHLRVRATNAADERPLTVAERTVLLEDLFRGKSRTFDEIRRRLKLPHARFNLESERRKKLNGDLTAVILAKPSCFGKVWHQLPLEEQDATVSQLLDDSLTDEEVARRLRNSHGLSPDSVERILTANLPDGYARLSYKAIKRILPFLYEGLTYDKAVRAAGYSTTDTSMDGSAPELPYYGRVLERHVAFGTGNPRDPDEKRFGRVANPTVHITLNQLRRLVNALIARYGKPAEVVLELARDLKLGRQRAREIEREQAERQRDNDRLREELQQLGQPVNAENMLRLRLYRELERATGITTQCVYTGEQISLSQLFTPEVEVDHILPYSRTLDDSIANKVLCKARANALKGNRTPYEAFGHSPEGYVWQEILLRAAALPRNRRWRFSEDAMLRYEENGAFLARQLTDTAYMSRLAREYMTAICPSNKVWVTPGTLTGLLRSKWGLNRLLAHDDQKNRLDHRHHAIDAVVIACVDRSLVQKVAAAAARAEGQGSGRLLDGLEHPWPSFMLGVENAIRRMVVSHRPDHNPQDALHNDTSYGCRDTEESDATVVKTRCVHHYVPLLSLADAKPTDIREHLADERHGRAIAELLERRGGTKADARAALEEYGRSTGIRRLRWVEQLTVIPIRDRRTGVPYKFVKGDGNYCYEIYETPAGQWAGELISTFTANQRDFLERMQDMERYRRETFSGKPLVMRLIVNDTVAIELDGRRLIYRVQKMSEGRIVLAYHAAAGDPTRNGVHIPEIPEGRTVITVSPGRLQQLNARRVFVDMLGRVLDPGRRHAGTHRRASGG

SEQ ID NO: 15475 - protein, 1067 aa, unidentified
  REGION 1..1067: note = Cas Enzyme sequence
MAKEPVRPIRYRLGLDLGSTSIGWAVLRLNERNEPDYLVRSGVRIFSDGRKRTDGTSLAVDRRLKRQQRRRRDRLLRRKRRLIAALTHAGLWPESRPEQLRLKNLNPYELRARGLREAFTPYELGRAIFHLNQRRGFRSNRRTDRGQDKEKGLIRSAISALTQKLRESEAETLGQYLYERWRQGEGTRARPLGQGANVAYEFYVDRALVAAEFDLLWERQRQFNAIQLTDTAREKIRDVLFYQRPLKPAQAGRCSLEPDEPRALIALPSTQRFRILQEVNHLRVRATNAADERPLTVAERTVLLEDLFRGKSRTFDEIRRRLKLPHARFNLESERRKKLNGDLTAVILAKPSCFGKVWHQLPLEEQDATVSQLLDDSLTDEEVARRLRNSHGLSPDSVERILTANLPDGYARLSYKAIKRILPFLYEGLTYDKAVRAAGYSTTDTSMDGSAPELPYYGRVLERHVAFGTGNPRDPDEKRFGRVANPTVHITLNQLRRLVNALIARYGKPAEVVLELARDLKLGRQRAREIEREQAERQRDNDRLREELQQLGQPVNAENMLRLRLYRELERATGITTQCVYTGEQISLSQLFTPEVEVDHILPYSRTLDDSIANKVLCKARANALKGNRTPYEAFGHSPEGYVWQEILLRAAALPRNRRWRFSEDAMLRYEENGAFLARQLTDTAYMSRLAREYMTAICPSNKVWVTPGTLTGLLRSKWGLNRLLAHDDQKNRLDHRHHAIDAVVIACVDRSLVQKVAAAAARAEGQGSGRLLDGLEHPWPSFMLGVENAIRRMVVSHRPDHNPQDALHNDTSYGCRDTEESDATVVKTRCVHHYVPLLSLADAKPTDIREHLADERHGRAIAELLERRGGTKADARAALEEYGRSTGIRRLRWVEQLTVIPIRDRRTGVPYKFVKGDGNYCYEIYETPAGQWAGELISTFTANQRDFLERMQDMERYRRETFSGKPLVMRLIVNDTVAIELDGRRLIYRVQKMSEGRIVLAYHAAAGDPTRNGLHIPEIPEGRTVITVSPGRLQQLNARRVFVDMLGRVLDPGRRHAGTHRRASGG

SEQ ID NO: 15476 - protein, 1031 aa, unidentified
  REGION 1..1031: note = Cas Enzyme sequence
MKFKKRYRLGLDIGTNSIGWCVLQLSDDDQPIGIIRAGSRIFSDGRSPKTLASLAADRRAARQMRRRHDRVLKRQTRFMDGLIRFGLMPNDDDERLALSALDPYELRHKGLDEPLTAFELGRALYHLAKRRGFKSSRKSKGENENEAGKIATAIGKTRERIAAAGCRTMGEYLAKRHEQRETVRARTTADGKEYLLYTQRAMVAEEFDALWAAQAPHHPNVCTEAARAFLRDTLLFQRPLLPVQPGRCIFETEEFREPLWSPLQQQFRVLQELNNLRVIEGLEERPLTLDERNTLRDALYRKREMTFAAIVRALKLPKDTRFNLESEKRKGLKGDVVASQLGVENSLGDAWFAMSRQQQRDLAELIDIIDDTEELKSRLMDGPWRFDAAIAAQLAKARLPEDYGSLSRKALEKIVPILDADVITYDKAAQKAGYNHSDFYTGEIFERLPYYGEILRSYTSPTPKAKDPNERTFGKLANPTVHIGLNQLRQLVNEIIRRWGHPTEIIVELARDFGLSGQKRRDLEGEQAKNQGRNEKLNQRLSALGQRENRENRQRLMLWDELGREDANDRHCIYSGQRFSMSQLFDGTVEIDHILPFSRSLDDSLSNKVLCLSRANRDKKNSTPFEAFGHSPSGYDWKEIEERAARLHKNKAKRFKENALQNFLGEKDFLDRHLTDTAYLSRVARQYLTAVCPPNKVWVATGRLTAMLRQKYGLNEILDPEHKGKNRDDHRHHAVDAAVIAVCDRSLIQRISTAAKKAEADGENRLLKSLDVPWVGFREELAEVVRRIVVSHKPDHGREAGLHNDTNYGQRGEPNASGAMLVSVRKPLTALTPKNVDAVADPALRGELKKLLDGLSGQELKAALDAYTIRTGVRRIRMEERLSVIPIQDRATKQPYRYVKGDGNYCYDIYRTENGKWNGDVVDIYTANQPDFDPKSKTAYSSGKSLVMRLRKGDILKLEHDGRFKLMRVALFSRNGVALHEHNESNVDARDRDRENSFSYIRKGADPLRKLGARLVGVDILGYINDPGFKE

SEQ ID NO: 15477 - protein, 1044 aa, unidentified
  REGION 1..1044: note = Cas Enzyme sequence
MAQGDGMKYRLGLDLGTNSIGWCALELDNQGSPSRIVDTGVRLLTPNQEAGRDPQSKQSLAADRRAARQARRQRDRFVRRQRALMRALVAYGLMPDHQDARKALERLDPYQLRAAGLDEPLELHELGRALFHINQRRGFKSNRLAQREDEEDSVTRAAAKALREALQREGARTVGEFLWRRHKRREAVRFRPTPAKGNKVSYDFYPNRDLVEDELDRLWAAQKPHHPEVLTVQALEAIKHIILHQRPLAKPLVGPCTFRPEEERAPKALPDFQRFRILQDLASLEVEQPGIGSRKLSLNERDTLLALLLNRKTRVAFDKMAAALGLPANARFNYAASGRDGFDPDLTAAKLGAKKVFGNAWGKLKLDQQNTIVERLLGEEDENALLDYLEEQCRLPREPAERASRTRLPQGHGSLGRSMLNDLVAVMQREASEAVDPETGEIYEAPVTYDEALARLGFHHSDLRPGELYARLPYYGDVLKRHVVENPAAPEGSQERRGRVTNPTVHIALNQTRRLINALIAEYGAPEQVVVELARELKWGRKRKDDYNRRLRENRAANERRDEKLAQLGLEANRDNRLRLRLFEELPPSERVCVYTGSPLSVSSLFSSEVEVDHVLPFSLTLDDSIGNKVLCTREANRDKQRRPPAQAFDSETLAEIAKRANRLFPRKAWRFDPDAMERFQENGGWQARQLTDTQYMARLAKTYLECICPSGNVWAIPGRMTGMLRGVWGLNSILAGAGGSKNRNDHRHHAIDAFVVACSDRGLLQRISRAATASERLDLDRLFGADGVPEPWRGVRHELSAALEKVVVSHKTDHGQQGQLHEETAYGLVEDDIDGKPYNLVFRKPVADLTPNEAARVRDPQLRGELTGVIQGAQAEGEKLNIALARFGDQHGVRRVRVLKTERETRVVRHGEGYYKAYVPGDNYCVDIYELPDGEWRGEGITLFDVNQPDYAPSWRADHPCAKLIMRVHKGDLLEATINGARNIYRIYRLNPRANRLWLAVHNQGGVEESDFVRPSYRTLQEGQARLLHVDVLGRTRPIEPAA

SEQ ID NO: 15478 - protein, 1163 aa, unidentified
  REGION 1..1163: note = Cas Enzyme sequence
MTKWRLGLDVGSNSIGWAAVRLGEENNPASLLELTSHGHLIPAAGVRIFSDARNPKKESLAVKRREQRGMRRNRDRYLQRRTDFLGALVELGLLPQEEAEQEEADREALEGSSKKNGSLTSVSFSDFDPWCLRTRALDERLAPYQVGKALFHLQQRRGFKSNRKADRDAADGKISEGASQTLARMKEVNARTLGELFGRARLGGNTHTSTRARLNGAGAKAFYDFYPTRDLILDEFRQIWDAQSVHHPKIMTKAARAKLYSILSFQRPLKPQPVGRCTLEPDSDLRAPWALPSSQRRRIYETLNAMHYRKPGENAEWLSREQRDILAEKALAKKDLTFDAMRTSLAFPGDVTFSIESETRKKIEGDRTACVLASTKLWGKAWRQLPFDEQEALVELLIGLEPLTEKTPGHVRQVSERVIRRVSDSLDLDLSGAESLLTSTDPKHLANWLTERYGLTEERALGIVEANLPDGHQRLGRRANAKVLAELKAGDSPTYDEAVRRAGYRDHRAVEGHGEIHERSLPYYGEVLERSVAFGTGDPKDNPEQRLGRVANPTVHVALNQLRKVVNQLIQRYGAPEEIVIELARDLPLGAEDKRSLERDQADNQKANEARARILEEHGVRNSYTNRLKLRLFEELTRGKATNGRCVLSGDQFGYAKLLSDEIEIDHILPFAQTLDDGFNNKILVTRKANRDKARRSPHEAFGTSPQDYDWDELASRAAELPAQKSWRFAPDAMERYENEERGFLERQLNDTKYIARLTRTYLGAIYGGGDEALKHVWVTPGRLTSDLRAVWGLNRILDGNRATEDEPDAPVRKNRDDHRHHAIDAIVVALTDRATLKKAADHARLQNPEVPAERMLAALPEPWTGFRDDVARQVNAIVVSHKKDHGVEGELHEATNYGVVQNPRGSGQKIATRKAITSFDKHEQLDAIADNRIREELQERTYGLSGNDFKQALEDYVSESKPGRRTSPKRVRVHKPVTDATPLREIQHGKSGQHKRAVLAGENYCLDIFETADGKWLCQEISRFDANDPAGAVRNNQPCTWQNNYPGSHLIMRLRKGDTIAVEDLPGEVVYKRVVRLEPSANRVRLAGVKEAGDYEKRHKDSDDLFNWDFATISKLKARKARLVHVDEAGRVFDPGPQHARTNRRGDDQQRPSLGGPGLSEA

SEQ ID NO: 15479 - protein, 1356 aa, unidentified
  REGION 1..1356: note = Cas Enzyme sequence
MEVGNYYLGIDAGTDSVGWAVTDNQYNVIRKKGKSLWGIRLFDGANTAQERRTFRALRRRNERKKQRINLLQELFCKEICKLDPNFFIRLRDSSLWSEDKEEKQIYSLFNDKNFNDRNYHNNYKTIYHLRADLIKNKEKHDARLVYLAIHHIMKNRGHFLFNGNIESVTSFENTFNEFKNCLLDELEINLECPSISEFENILKDSTFKGTQKCKKLKELCSIPSSDKKLDNIFKLISGLKADLSIIFEDESFKENEHNKISFADSNYEETREVLNSEIQEKTLIIDIFNSIYNWVILSDILSGGEYNGGLYLSIAKVNTYNKHSKDLKILKSVIKKYFPQKYTDIFASNKENNYCSYIGMYKSGGKKYSVKKCSDKPEEFYKTIKNIINKNTAEEISNDKDVQYILSEIENNSFLPLQINKNNGVIPYQANKIELESILKNAENYLPFLKEIDTECNKTTSEKIIDLFEFRIPYYVGPLNTSKGENAWMIRKEDGTIRPWNFEQKVDIDKTAAEFITRMTNQCTYLNNETVLPKYSLLYSEYTVLNEINNIRINGEKISVELKQDIFNSLFKNNKQVTCKKLLSHLNSNGYNLKKDDLSGFDGNFKSSLSSYIDLKNYIFGDNIDKPQIYNLAEKIILWITLYGDDSKLLKRVLQKNCSEQLNPEQIKKITKLKFKGWGRLSKAFLSELRGADRETGETMTIIKGLRNTQNNLMQLLSQNYTFTEECEKINSGYFINPNEISYDSIVKNIVASPSIKRSVWQTIQIVEEIQEVMGSKPRKIFVEMARGEEEKVRTTSRKQKLLDLYKNISDECAKGMYDEIYSKDESDFKNIRLYLYYTQMGCCMYSGKHIDLSQLSNTNIWDRDHIYPQSKTKDDSLDNLVLVYKSINSEKSDDIISPTIQNNMRTFWKLLFDRKFISEKKYHRLTRTTPLTDEELAGFINRQLVETRQSTKVMASIFKRIYPNTEIIYVKAKNVSDFRHRKDCENGVKVRELNDYHHAKDAYLNIVVGNVYSSKFTNNPLMWLKNNRNVKYSLNRMYDFNLTVNNENIWVVGNEGTQKTVNKYLGKNDILYTRYAMTNKGELFDQNPLKATGDKSKQTTLVPLKKGKEVWKYGGYNSITPSYFMLVESKDKKGNYIRTIETMPLYREKEFSKNEEFLLNYCKEVHKLKEPKIILKCIKKNALLIVDGFPMHLKGSTGLQLKLQGAVQLILESDMVIYLKKLMKFVNENNINKNKLEVTPYMELSAKENIKLYDIFIQKLTTGIYSKRPANPVEKLINARDIFIELTVKEQCIVLSEILHLFQCKPLTSANLVSINLKKTVGIIQIAKNITAKNVKLVHQSPTGIYEYTVDLNKI

SEQ ID NO: 15480 - protein, 1361 aa, unidentified
  REGION 1..1361: note = Cas Enzyme sequence
QEYYLGLDMGISSVGWAVTNDKYELLRKKGKDMWGIREFEEADSSAERRTYRVNRRRRQRQVARMGLLKEYFSDAIEKVDPNFFIRMENSKYFFEDKDERLSSKNGIFDDMYYKDVDYYKEYPTIFHLRKALLDIEDTGKSYDVRLVYLALVNMFKHRGHFLLNTEGDALSSEQVNTTYQELLEVLENNYDISLESRDIKDVIDIISNQDSGRKKKHEQILELFGVKKSDKRAKELLKCLCGLSVNAKLIFDENYEEKVDLCFHDFSYTDKIPDLMEKLSEEEYSVVEQLKSIYDYSVLVGTLKGYDYLSCARVELYEKHFEDLKLLKALYRRYKTKEEYNDMFKSDKEGTYSVYVNSFNSSDSSVKIKKYRRNMKGRTIDNLYGTIKKAFKDNTDDKDVQSMMESIDKEQFLPKQLTGVNGVIPNQVHKKEMERILKNAQNYLPFLKEKDENGLTVSERILRLFTFQIPYYVGPLVENSKTGWVVRREGGRVLPWNIDEKIDMSATSEAFIGNLIRKCTYLSDEKVMPKASLSYERYCVLNEINNICIDGERLDTELKQKIYTECFMKGKRVTRKQICNYLVAQGCIKSDEQVTGIDINVNSSLSSYGKMFAIFGEHLKEDAIRKVSEEIIYWGTIFSDSKKMFRKHLTKYVEQGILGESQVKRILGYKFKDWGRFSKALLTLQGIDKSTGELLSLENAMWEYSLNFMELINSDDFTFKDELANRRTYAIKSLSEFTYEDLEDTYFSVPVKRMIWQTILVVREIEQIMGYAPKKIFVEMARSEEEKGDKGRKDSRGDKLLELYKNIKNTENHDWEKEISEANESGKLRSKKLYLYYTQMGRDMYTGEEINIDMLYDDSMYDIDHIYPRHYVKDDSIVNNLVLVNRRANQDIKKDLYPIPDKIISNLKVQGLWKMLHKQNLITDEKYKRLMSRSPFTEKQLGYFIARQLVETRQGTKGIAELLGQLFKDTEIVYAKATNVSDFRRDNGFVKSRLVNDFHHAQDAYLNIVVGNVYYTKFTKNPWNFIKKDFDKDRNKNGYNLAKMFDRDVVRGDDIAWIASKKDTQGTIETVRKMMRKNTPLMTRMSFEQHGGIANATLYSAKKAKVENYIPLKSSDIRLSDVTKYGGFTSATVAYYFIVSHKEGKKENTTIEALPLYCKNKVENEENGLLKYCEEVLGYGDVKILFNKLKIQSLLEINGYQVHLSGKTEGRLILRNAMNLCLPEKWISYIKKLEKLVAGNVKEQAITSEANIELYDLLTDKHLNSVYAKRPNAYGQKLVDDRSNFVNLKPESQCEAILQILQLTKIGNNETNLKLIGESEHSGKMRISKNLKDTDKPAIICQSVTGLYERKIYIFGEQLDK

SEQ ID NO: 15481 - protein, 1386 aa, unidentified
  REGION 1..1386: note = Cas Enzyme sequence
VSNEKIYLGLNIEPENISWAVTNNDYQLCKYEKRLMWGVYCFDEAQLSERRRITRSARRRYKRQAGRVSLCQELFAKALYEKDKNFLLRISEGALTADDAKHRKHYVLFEDANYTDKDYYTQYPTVHHLICELIKNKVPHDVRLVYLACSYLLAYRGHFYYSISEDNVGEITDFSPLYNNFYSSLTNLCGEVPFEKNKSEFEKIIRSKNSLTFKKKAFNELMFAGKAKNYDNDIISYSILCNFISGGKIKISKLFVNEDYEDLETNEVSIFIPDLSEMLEGKIDELQLAVINSVKAIYDWAMLVDILNGSSLISEAMVNKYNEHNSDLKKLKHIFIKYLPHEDYRTVFAEIGEKSNYKSYVYNSPKDEGRPKNYKKCTQEEFCKFTIKYLNQIKKVDEADQAILDELITKCADSKLCPKLNTTDNRVVPYQLYYHELKLILENAKDYLPFLNDKDEYGTVADKILAIMKFKIPYYVGPLVSSEKSPNAWLERKAEGNIRPWNFKDLVDEDACEKKFIERMTGQCKYVVGQKVLAKRSILNCKYNVLNELNHIVLSNGKLSVEAKQAIYTELCLTSRNRVTKKKILSFLVKNGYAKLGTDIAGIDDIMRSSMQSYLDFEKNHYISDGVLSIEQADEIISRITISTDIRRLRKWISTEYPHLSATDVKYLSGLKYQDYGDVSKSFLEDIYPVNTETGEIESDKNIITMLWETNETIEQLLGTKYRYTESIEYANKELYGLSNGQATLQKRLADAYVPVAMQKATSKAINIVKDLKRLQGKAPDKIFIRTAKDFADKPKGKNRKSKKEQILAAWGSLKDRDIAALNPGEMASLKKQLNDIDEGKLNLDKYYLYFMQLGRCMYSGAHIPFDELENSFTWNIDHIWPQAKVKDNSLDNKVLVDLTINTDKGKTYPIAKDIREAMADFWGQLYHEGLISDKKYQRLIRQSGFSKEELADFILAQITETRQSTKAIVNMFREYFPDSTVIYLKNDFATDFRREMELPRHEIINNFDLAKDAYLNLVLGNVYTTRFTSNPLNFIKNNRNYSLKMYQRRSDGSEVGMMMGKISEGNSVVWDPETSFDVVKRNYAINSVKCVRDAFRRKSGNNGGFFDNNPLRKGNGQIPKRKELPVSKYGGYNCATISFYSLAVVKDVGPVLFAVELLFAKEFLKSVDAAKEYAARKISAQIKSKIGADDVRFPFGQTPNIIKANALLELDGLRITLGGKTLDNIIIYSAEPLLVGPEDSLYADKIGKVVNRRRFNKDYKISENIGLSAAGNSELYDYMAQKCMSKPFSVLYNKTGHFFEKSKEIFEQLSIEEQITVLAEMIALLTYGRKRTIDLKLLGGSANACIKSIPMNLYKMKGYSSLRLISQSPTGLIEHKSCNLLKLTY

SEQ ID NO: 15482 - protein, 1325 aa, unidentified
  REGION 1..1325: note = Cas Enzyme sequence
MKGEYYLGLDMGSSSVGWAVTNEKYEILRAHGKTLWGVRLFDSAQTAEERRGFRTAKRRLDRRNWRIELLQKIFAEEVEKIDDGFFRRMKESRYWPEDKRDRQGKCPELPYALFADDDYTDKEYHKQFPTIYHLRKWLMETDETPDIRLIYLALHHMMKHRGHFLLNGNIEQVREFQTTFEQFLEAVRAEELGFSSEIGVERSKEIEAILKDRTLTKSAKKTKAVKAMRAETSCEKEWLGLITGGTAKLGNLFGEKQMDTLERPKLCFADAGYEEYAGEIEAELGEKYVLIEHAKAVYDWAVLADILQNYSSLSEAKVALYEKHKKDLKDLKKLVRENLSREEYQRLFAKKDEKANYYAYIKAPKQCSQEDFYGYLKKNILGKISDVTKASCMQKEMEMGTFLPKQTVKDNSVIPYQIHLYELNAILKNLEDKVPLLKENGEKIQKIFTFRIPYYVGPLNGIRKKGEKSNWAVRKEGKIYPWNFDEMVDLEASAEQFIRRMTNKCTYLPSEDVLPKYSLLYSKYEVLNELNNLRLDGEKISVEQKQKIYEEVFQKSRKVTQKKLKNYLVKEGITGKEVEITGIDGDFKSSLTAYHDFKEKLTNLSLNQAEKECIILNVTLFGDDKAILKQRLKKLFPELTEKQRDSISKLPYRGWGRLSKVFLEETEAPAPKTGEAWSIIRALWETNDNLMQLLSEKYLFASAIEEKNGNEQKKRDISYELVEELYVSPAVKRQIWQSLLIVKEICKVMGNPPKRVFIEMAREKTDQGRTSSRKKKLLELYKKCKAEEKDWIDEIEKRSDAEMRRDKLYLYYTQKGKCMYSGETIELEELWDNQKYDIDHIFPQSKVMDDSLDNRVLVKKKCNQMKEDKYPIDETVRKKMQPFWKSLVDAGLISEEKYKRLIRGNGFEPSELAGFISRQLVETRQSTKAAASILQQVIPDTQIVYVKAPTVSKFRKDFKFLKVREMNDYHHAKDAYLNIVVGNAYFVKFTSNPIHFIKENPGRSYNLKKMFEQERIERNGEIAWESGNGTIVTVRKFMEKNNILVTRRSYEATGALFDQQIVKKGKGQVPIKSSDERLCDIQKYGGYNKEAGAYFVLAESEGKKGKKIRTIEYVPIRLKKEIQKSEENIIRYLEEERQLKNPRVLVPEIKIDTLFCVDGFYMWVSGRSGDQLLMQGANQLVLSQEETEILKKIVQYVERKKQNKELKIYDSDHLEEKKVVMLYETFLNKLTNTVYAKKLGAQAKTLTEKREKFKELCIEEKCIVLYEILHFFQCQSVTADLKLIGGSGRAGILYLNKNITDCSRIEMIHQSPTGIYEQAVDLNAL

SEQ ID NO: 15483 - protein, 1325 aa, unidentified
  REGION 1..1325: note = Cas Enzyme sequence
MKNFNDDYYTGFDIGTDSVGYAVADTDYNLCKFKGNAMWGVDLFEESNSAAERRTLRSARRRGLRKRNRIEWLQMLFDEEISKVDNAFYQRLKESCLYLDDKSSNVPYAVFADGNYTDKEFHTDYPTIYHLRKELIKSSQPHDIRLVYLALHHIIKHRGHFLFDNMGSDFESESSFEALFDDLKLYLKEECEIEFECNDSLRFSEILKDKTLKKTAKSSESYKLFGYSKRNNPYETALIDLMCGRKVKFSDMFGDKSFDSEEVNGITFESGYDDNENTYRDLLQEKFELIEKAKAVYDWAILADILNGEKYISFAKVKTYEEHSSDLKMLKDFVKERCKSLYGEIFRITKDKLDNYTAYCGKYKENGRNGVIQYRTNQADFCKYLKKKFEKLDKTGYEEMFDKIENGTFMPKIVVKDNGVIPMQVNRSELKAILKNASTYLEFLNKKDENGISVSDKIVKIFEFRIPYYVGPLNNHSLKSWLVRSDEKIYPWNFDSVVDIEQSAENFINNLTSKCTYLPTKDVIPKNSILYSAFTVLNELNNLRLDGKKPDVSLKQAIFNDLFMTHKKVRRKDLLNYLKSEKGVAFDITGIDGDFKSSMRSAIEMSQFNLTDSEKEDAIKAITVFGDDKKLLRKRLKRQLGSKLSDEDIMRISKLKYKDWGRLSKEFLTEVYNVDKNTGELQFNIIHALWQTNDNLMELLGSKYGFEQSRQNYLDGIQTGQSLEKMVENLYISPAVKRPVYQSLKIMHEINKIQGHAPKKIFVEMTRKDGVKGDKGRKESRKTKLVDLYKKCGEDSGELWESLEKTPDDEFKRDRLYFYYTQFGKCMYTGEPINLSELYNQNIYDVDHIFPRSKVKDDSLDNRALVKKQVNAHKDNTYPLDSSIREKMKGFWHLLMDKGLISKKKYERLTRVTPLSDSELSDFIARQIVETSQSTKAVASLFKELYPDTEIVYVKASTVSEFRHEYDFLKCREVNDFHHAKDAYLNIVVGNVYNERCTHNKSIFIEGLKTKAYSLNKMFSFNTPNAWSIDDNKSIKIVRKTMNKNNIRFTRYALTRNGGLFKMNPLKKGSGQVSLKQNSPLSDISKYGGYDKPTSSYFSFVKYEGKKGKEMRQLVAIDSYIKAQYEANPEKYLSETLGLKNPVVLIPVVKYNACIEIDGFRMHISAKTGKQIIYKPAMQLTVSYDTEKYIRNVVKLNSKPENYNITELDKVSTDENIELFDILTYKMTDTVLKVKFGDMGAKIISHRDAFEKLDIRKQCFVLTEILKIIHCNAVLGNLTYIGEGSSSGRVGLNSVLSEVKGVKSIYLVHQSVTGLFEKKIDLLHM

SEQ ID NO: 15484 - protein, 1327 aa, unidentified
  REGION 1..1327: note = Cas Enzyme sequence
MKNFNDDYYAGFDIGTDSVGYAVADTDYNLCKFKGNAMWGVDLFEESNSAAERRTLRSARRRGLRKRNRIEWLQMLFDQEISKVDNAFYQRLKESCLYLDDKSSNVPYAVFADGNYTDKEFHTDYPTIYHLRKELIKSSQPHDVRLVYLALHHIIKHRGHFLFDNMGSDFESESSFETLFDDLKLYLKEEYEIEFECNDSLRFSEILKDKTLKKTAKSSESYKLFGYSKRNNPYETALIDLMCGRKVKFSDMFGDKSFDSEEVNGITFESGYDDNENTYRDLLQEKFELIEKAKAVYDWAILADILNGEKYISFAKVKTYEEHSSDLKMLKDFVKERCKSLYGEIFRITKDKLDNYTAYCGKYKENGRNGVIQYRTNQADFCKYLKKKFEKLDKTGYEEMFDKIENGTFMPKIVVKDNGVIPMQVNRSELKAILKNASTYLEFLNKKDENGISVSDKIVKIFEFRIPYYVGPLNNHSLKSWLVRSDEKIYPWNFDSVVDIEQSAENFINNLTSKCTYLPTKDVIPKNSILYSAFTVLNELNNLRLDGKKPDVSLKQAIFNDLFMTHKKVRRKDLLNYLKSEKGVAFDITGIDGDFKSSMRSAIEMSQFNLTDSEKEDAIKAITVLGDDKKLLRKRLKRQLGSKLSDEDIMRISKLKYKDWGRLSKEFLTEVYNVDKNTGELQFNIIHALWQTNDNLMELLGSKYGFEQSRQNYLDGIQTGQSLEKMVENLYISPAVKRPVYQSLKIMHEINKIQGHAPKKIFVEMTRKDGVKGDKGRKESRKTKLVDLYKKCGEDSGELWESLEKTPDDEFKRDRLYFYYTQFGKCMYTGEPINLSELYNQNIYDVDHIFPRSKVKDDSLDNRALVKKQVNAHKDNTYPLDSSIREKMKGFWHLLMDKGLISKKKYERLTRVTPLSDSELSDFIARQIVETSQSTKAVASLFKELYPDTEIVYVKASTVSEFRHEYDFLKCREVNDFHHAKDAYLNIVVGNVYNERCTHNKSIFIEGLKTKAYSLNKMFSFNTPNAWSIDDNKSIKIVRKTMNKNNIRFTRYALTRNGGLFKMNPLKKGSGQVSLKQNSPLSDISKYGGYDKPTSSYFSFVKYEGKKGKEMRQLVAIDSYIKARYEANPEKYLSENLGLKNPVVLIPVVKYNACIEIDGFRMHISSKSSGGKQIVYKPAMQLTVSYDTEKYIRNIVKLNSMPENYNIKELDKVSTDENLKLFDILTSKMTDTILKVKFGDMGVKIASHRDAFEKLDVRKQCFVLAEILKIIHSNVVTGDLSFIGESKKSGVVSTNSVLSEVKGVKSIYLVHQSVTGLFEKKIDLLNI

SEQ ID NO: 15485 - protein, 1327 aa, unidentified
  REGION 1..1327: note = Cas Enzyme sequence
MKNFNDDYYAGFDIGTDSVGYAVADTDYNLCKFKGNAMWGVDLFEESNSAAERRTLRSARRRGLRKRNRIEWLQMLFDQEISKVDNAFYQRLKESCLYLDDKSSNVPYAVFADGNYTDKEFHTDYPTIYHLRKELIKSSQPHDVRLVYLALHHIIKHRGHFLFDNMGSDFESESSFETLFDDLKLYLKEEYEIEFECNDSLRFSEILKDKTLKKTAKSSESYKLFGYSKRNNPYETALIDLMCGRKVKFSDMFGDKSFDSEEVNGITFESGYDDNENTYRDLLQEKFELIEKAKAVYDWAILADILNGEKYISFAKVKTYEEHSSDLKMLKDFVKERCKSLYGEIFRITKDKLDNYTAYCGKYKENGRNGVIQYRTNQADFCKYLKKKFEKLDKTGYEEMFDKIENGTFMPKIVVKDNGVIPMQVNRSELKAILKNASTYLEFLNKKDENGISVSDKIVKIFEFRIPYYVGPLNNHSLKSWLVRSDEKIYPWNFDSVVDIEQSAENFINNLTSKCTYLPTKDVIPKNSILYSAFTVLNELNNLRLDGKKPDVSLKQAIFNDLFMTHKKVRRKDLLNYLKSEKGVAFDITGIDGDFKSSMRSAIEMSQFNLTDSEKEDAIKAITVFGDDKKLLRKRLKRQLGSKLSDEDIMRISKLKYKDWGRLSKEFLTEVYNVDKNTGELQFNIIHALWQTNDNLMELLGSKYGFEQSRQNYLDGIQTGQSLEKMVENLYISPAVKRPVYQSLKIMHEINKIQGHAPKKIFVEMTRKDGVKGDKGRKESRKTKLVDLYKKCGEDSGELWESLEKTPDDEFKRDRLYFYYTQFGKCMYTGEPINLSELYNQNIYDVDHIFPRSKVKDDSLDNRALVKKQVNAHKDNTYPLDSSIREKMKGFWHLLMDKGLISKKKYERLTRVTPLSDSELSDFIARQIVETSQSTKAVASLFKELYPDTEIVYVKASTVSEFRHEYDFLKCREVNDFHHAKDAYLNIVVGNVYNERCTHNKSIFIEGLKTKAYSLNKMFSFNTPNAWSIDDNKSIKIVRKTMNKNNIRFTRYALTRNGGLFKMNPLKKGSGQVSLKQNSPLSDISKYGGYDKPTSSYFSFVKYEGKKGKEMRQLVAIDSYIKARYEANPEKYLSENLGLKNPVVLIPVVKYNACIEIDGFRMHISSKSSGGKQIVYKPAMQLTVSYDTEKYIRNIVKLNSMPENYNIKELDKVSTDENLKLFDILTSKMTDTILKVKFGDMGVKIASHRDAFEKLDVRKQCFVLAEILKIIHSNVVTGDLSFIGESKKSGVVSTNSVLSEVKGVKSIYLVHQSVTGLFEKKIDLLNI

SEQ ID NO: 15486 - protein, 1327 aa, unidentified
  REGION 1..1327: note = Cas Enzyme sequence
MKNFNDDYYTGFDIGTDSVGYAVADTDYNLCKFKGNAMWGVDLFEESNSAAERRTLRSARRRGLRKRNRIEWLQMLFDEEISKVDNAFYQRLKESCLYLDDKSSNVPYAVFADGNYTDKEFHTDYPTIYHLRKELIKSSQPHDIRLVYLALHHIIKHRGHFLFDNMGSDFESESSFEALFDDLKLYLKEECEIEFECNDSLRFSEILKDKTLKKTAKSSESYKLFGYSKRNNPYETALIDLMCGRKVKFSDMFGDKSFDSEEVNGITFESGYDDNENTYRDLLQEKFELIEKAKAVYDWAILADILNGEKYISFAKVKTYEEHSSDLKMLKDFVKERCKSLYGEIFRITKDKLDNYTAYCGKYKENGRNGVIQYRTNQADFCKYLKKKFEKLDKTGYEEMFDKIENGTFMPKIVVKDNGVIPMQVNRSELKAILKNASTYLEFLNKKDENGISVSDKIVKIFEFRIPYYVGPLNNHSLKSWLVRSDEKIYPWNFDSVVDIEQSAENFINNLTSKCTYLPTKDVIPKNSILYSAFTVLNELNNLRLDGKKPDVSLKQAIFNDLFMTHKKVRRKDLLNYLKSEKGVAFDITGIDGDFKSSMRSAIEMSQFNLTDSEKEDAIKAITVFGDDKKLLRKRLKRQLGSKLSDEDIMRISKLKYKDWGRLSKEFLTEVYNVDKNTGELQFNIIHALWQTNDNLMELLGSKYGFEQSRQNYLDGIQTGQSLEKMVENLYISPAVKRPVYQSLKIMHEINKIQGHAPKKIFVEMTRKDGVKGDKGRKESRKTKLVDLYKKCGEDSGELWESLEKTPDDEFKRDRLYFYYTQFGKCMYTGEPINLSELYNQNIYDVDHIFPRSKVKDDSLDNRALVKKQVNAHKDNTYPLDSSIREKMKGFWHLLMDKGLISKKKYERLTRVTPLSDSELSDFIARQIVETSQSTKAVASLFKELYPDTEIVYVKASTVSEFRHEYDFLKCREVNDFHHAKDAYLNIVVGNVYNERCTHNKSIFIEGLKTKAYSLNKMFSFNTPNAWSIDDNKSIKIVRKTMNKNNIRFTRYALTRNGGLFKMNPLKKGSGQVSLKQNSPLSDISKYGGYDKPTSSYFSFVKYEGKKGKEMRQLVAIDSYIKAQYEANPEKYLSETLGLKNPVVLIPVVKYNACIEIDGFRMHISSKSNGGKKIVYKPAMQLTVSYDTEKYIRNVVKLNSMPENYNITERDKVSADENLKLFDILIFKMTETILKVKFGDMGVKIASHRDTFEKLDVRKQCFVLAEILKIIHSNVVTGDLTLIDEAKKAGVVSTNSVLSEIKGVKSIYLVHQSVTGLFEKKIDLLHM

SEQ ID NO: 15487 - protein, 990 aa, unidentified
  REGION 1..990: note = Cas Enzyme sequence
ILTCIVNCQLKDKWMTKILGIDLGTSSIGWCIINEKERIPSAIVDMGVRIFSEVTDAKTKTPKNQERRLKRGLRRQTDRKARRRKKVSNILNRFGFLPLTQSDHQAWQEWNIKVGCPYEIRKKALTERITKEEFAKAMIHFAKRRGFKSNRKVPGGEDGIVKSAISEIRQEMETSGFRTVGEYLHGEEIKRGKYLHRDMFEDEFTKIWEKQSSFDANAYSESLKECLWDAIFFQRPLKIQTHLIGNCSLEQNRKRCPKAYLAFQEFRILTELANLEVKDPITGDHEPLSSDQKTALFELLNISEKLTWKKARKALGLHDGETINLEETGSKYLQGNKTATQLVKIIGKDNWSRYARSQKDQLITDISTIEQEESLKKRLTEHWKFKQNEVLGLLKIKLEDGYGNYSHKALSKIIPHLKEGKNLWEAKLSSGYNDQEKEEALDALPLPDNLRNPVVMKALHEVRKVINAIIRTHGKPEIIRIEMARDLKQSKKDRDQYLKVVREREKENKKISSILGEDPEFNLAKPTRDDRIKYQLWKECGMVCPYSGQSISKSMLFGGGVEIEHILPYSISLDDSIGNKTLCVTSFNRDKGNKTPYQAFGNQLEWDDMVQRVRASRMSFGKKKRFETKEASFDNFSSRQLNDTRYICKEVSGYVKKLGVRVDVSRGQLTHAIRHQWGLNRLLSTENQKNRDDHRHHALDALITAIISPRMMQEVSRISQKLNGASLSNRLFKLPKPWSAFDEDLKNKVFSIIVSHAEENRISGAFHEDTAYGKRKDGTLAYRKSVEMLNNKECEDKIRDPAVKAIILKQISKHDGDIKKALAEPIFHKDGKTPIKKVRLETKKEEHSLFEVRHNHEPFKYHLLGNNHHIEIFEDKNGKWLPRVVSTYESAKRARTNKENIVSRDFKDNKFIMSLSSKQMLEIINETKVEYYKVQNISVSSGGRVMLKRDYSADLKDSSTSMDKTINALKKLNFRKISVDPIGRVQTRND

SEQ ID NO: 15488 - protein, 1051 aa, unidentified
  REGION 1..1051: note = Cas Enzyme sequence
MALVFGLDIGIASIGWAAIDEEHHTPLLGLGSRIFVSAEVAKTGESLALPRRLARGMRRRIRRRAHRMSRIRQLFLRVGLADDAALADLHETSKDDLTPWLLRADGLNQQLNQRDWARTLIHIAKHRGFKSNRKSEASDKEGGKLLMGVTGNAKLLKEKGYRTIGEMVWKDEKFAEHKRNKGGDYSHTVARDDLLIEITALFEAQRTLGNVHADNAFEAEYTKIFASQRPVDDGEIAEMVGECTFEKGEKRAAKATYSAERFVLLSRLNNLMLINAGERRVLDATQRKTIEAMAYKSSKITYKQIRKALDLPDSIRFNLVAYKSGEIDKAEDVAFAELKAYHQLRLAITKACGELAWGNLTNQPDKLDAIATALTWYKSDSKICEILATEKLEPDLLDAVLSLSFDKAVALSLKALRNINPFLAQGLRYDVACSEAGYDHSAPTEVQPQQFLPYIPVDEVRNPVVLRALTQARKVINAMIRRYGSPSQINIELARELSQPYSERRDIESKQKEFQAEKERTVKQFNDTFGRDPHRDELTKFRLWREYNYCAYSGMYLEPARLLEEGYAEIDHILPYSRSMDDSLNNKVLCTSKANRDKGNKTPYEYLNGVSASSQWHEYKVRIETHKAFRQAKRNRLLRIDFDETTSTEFRERNLNDTRYIARFLQEFLKLNLQFAPSESKVPVQTRNGAVTSFLRAHWGLLKVRADGDLHHALDAAVVACTTQGFVKRISDYSRKKELWASDKGASDTTRNLEVIDTETGEIVTTNYQKKENEHFPLPWSSYRTDVKDALSEVFVSRAPTRKATGGVHDEKIRSTKRMNEEKPVTTSKTKLHDLSLASLENIPDKLTRNANLYLALKKRIETSGKEPFARPFYLGKNSEESDAVDGRLIRAVKLERTTKTGVSVRGGLADNGEMLRVDVFNKVGKFYLVPIYLADRVSSVLPNKAIRAATMEQDWPEMDDSYQFAFSLCNNDLILISDKDGGDDAFLRGYFKGAHRGTGAINIEGHDRSWKKDGIGVQRLATFKKLQVDVLGEVFEVKRESRHGLAESAD

SEQ ID NO: 15489 - protein, 1022 aa, unidentified
  REGION 1..1022: note = Cas Enzyme sequence
MLPKMRYRLGLDIGATSIGWCMVRLDVHDNPVAIIRMGVRIFSDGRNPKDGSSLAVTRRQARQMRRRRDRLLKRKNQMLSALIRRGFFPADEQSRKALAKLDPYALRKKGLYEPITPSEFARALFHINQRRGFLSNRKTDRSDSESGALKKAMKMLEKTLAEEHCQTLGEWLANRHAVRESVRARLRGEKQKDRAYDFYASRSMIEHEYDALWAKQAAFNPSLFNDAARAEFKDILLFQRPLRPAKPGRCTLLPSEERAPRALPSAQRFRIYQELNNLRVLGADLREQPLTLAQRDSIATLLEHGDAGFAKILKTLKLPGAAKFNLEDIKRDRLKGNATAQVLSKEGHFGACWFEFPPDRQDQIVEKLLNEGSESALVKWLVSETGINEAAAERVAAAQIPEGFSNLSRAAISRVLPELMKEIVVYSDAVQRAGFTSHSILSHGEQTGEVMESLPYYGEVLQRHVGFGTGVVCDPPEKRYGRIANPTVHIGLNELRKVINALIRRYGHPTEVIVEVARDLKLSRQRKLEVQWDQKRRQDLNQQQIGEACGVLGITPSNLDKAKRRELSQKMQLWCELNPKDVANRCCPYTGERISIARLLSEEVEIDHILPFSRTLDDSMNNKTVAVRRGNRAKGNRTPYEAFGRIPTSGFDYDAILERAKRMPKEKAVRFAPDGYERWLRDEKDFLARALNDTAYLSRVAKEYVSLVCVPNRVRCIPGRMTALLRGKFGLNTLLSGSELKNRNDHRHHAIDAAVVAVTDQGLLQRFAKASASAREKHLDRLVEHMPFPWSTYREQVERGVASILVSHKPDHGFQGPMHEGTAWGFTVEGLARHRVRPADGSPRQWEVQKKKLVPISSTRDRGRHGLDEHGAPLPYKGYVGGSNYCIEICRGEKGRWVGEVVSTFQAYQVVREMGEKKAVARLRDPMVSLSGIPLVMRLMIGDLVRMDVGGVTRTMRVVKISGSNGQVFFAAHNEANVDARAKNKEDPFGYVSKYAGSMQKSKARRVVVSEIGRVRDPGFEA

SEQ ID NO: 15490 - protein, 1025 aa, unidentified
  REGION 1..1025: note = Cas Enzyme sequence
MEKPREYILGLDLGAKSIGWAAVALKGRKPCGLIAAGVRVFDAGMEGDIASGNAESRNAERRDARQLRRQTDRRRRRIKNVFRILQEARLLPPGKPREVLEVKKGEIPSSLAHVFPYRLRARALDEKLEPYELGRALYHLAHRRGFLSNRKARKKDEDEGVVKKGIAELDEKMRSAGARTLGEYFAGLDPQTERIRNRYTSRAQYELEFEAIWDAQQKHYPALLTDELKNRLGKAIFYQRPLKSVAGLIGRCALEEDRRRAPWAICAAQRFRMHQMVLNTRLIFDGRETPLSDDQRSKLIEKLEHDGDLTFAKAKKALGFKSKDVSFNWEEGGEKRFTGNRTNAKLAAVFGERWWNMPEDDRNRIVEDLLTFEKEEPLIRRGMKKWGLSRDAAEKFAALELERGYCNLSRKAIEKLLPHMETGLSYPEAVIKVYGRFNREREKCAELPLVDDAMPALRNPVVHRILTELRKVVNALVREYGRPTKIRIELARDVKHSRKRRREITKRNRANETARKKAAELIAHEMNIANPSRDEVLKVLLADECCWTCPYTGKQISMDALFGANPQFDIEHIIPFSRSLDNSFFNKTLCHNEENRRVKGNRTPWEAYGSDPARFEEILERVRRFKGGAAREKLRRFLIEDIEDIDEFASRQLNDTRYASRLAMEYLGLLYGGLTDEDGNRRVEAGRGAVTALLRAGWDLNRILSRDGSKSRDDHRHHAVDAVVIALTESGSIKMVSDAARSWSGAKVKLFDRLKEPWPGFWHNVFDAVAGMNVSRRPVRKASGALHEETYYSKFKKDADGRDCVHIRKSVVDAARNPKLIVDDKVREAVCRKLEEVGGNPKLLEMAGHEPFLESKGRRIPIRRVRMRCYQLPFTIGKGARERRVFPGANHHMELFAVLDAQGNQTAWEARMVSRFEAARRVRERKPLVDRDGGPDRKFLFSLSSGDLVEMDDKNGERALFAVRTVTERQKSGIAIEFSRATDARLKKDIIKTGDWFAKTPNKLRELHCQKVIVDPLGRVRRCNA

SEQ ID NO: 15491 - protein, 1061 aa, unidentified
  REGION 1..1061: note = Cas Enzyme sequence
MDTVDKYSVLGLDLGSNSVGWALLEYTNGQPTGLTDCGVRVFDAGTEGDVESGKDTARGVERREARQRRRQCERRGRRIENLACLLSRNGLLPKGAMRKPEERNRLLQALDRDIYTKYREAGQPGKATVSVLDQLPYFLRCRALDHPLDPHELGRALYHLAQRRGYLSNRKSGKQDEDKGTVEPAINELRERMAAGGVRTLGEFLSRVDPVNERRIRQRCTARDMYLDEFEAIWEAQRPHHRGLLSDALKKQIADAIFHQRPLKSQKGLIGGCDLVPGKKRAPKALLISQRFRMLQKVNDLEVIYSDESHRHLTGEERARVLEEMEQHAKLTFKGIARLLKLPKGVEFNFERGGEKDLPGNKTAAALRAVFGDRWDSFSREQQDAVVGEVMGIEKAETLERRGRDAWDLDHEAAAAFGKVHLESGYMALSREAMRTVLPLMEQGIPYATARDQAFEGNWARNVLDHLPGVSEACNTIRNPVVMRTLTETRRVVNAIIRKYGKPDCVRIELAREMKKSREDRRKMTADNQKRRKANDALRQKIIDTTGDPRVTGRDILKARLWEECRGTCPYTQKTIPFHELFRHDSPWDIEHIIPFSRCLDDSYFNKTLCYHEENRNVKQNRTPREAYEHSGRWDDLLACVARFEGDAAREKLRRFQMKADDLLEFEAFSARQLNDTKFASREAQRYLSWLYGPEAQSRIQVSRGQITSYLRGAWRLNSILGDGGEKERADHRHHAVDAIAIALTDRATVKALSDAAASQFRERGRTHGFEKRVTEPWSGFLEDVQRAIDRVVVSHRPSRKVSGSFHDDTIYSPPRTDREGKPYVMVRKPLDKFKAADIQNIADPTVRDIVWQHFRDHGEDPRAAFSNPANHPRIPIKDGPRAGQTIPIHKVRLKYTRDVIPIGHGPSERYVWTRGNSHIEIFEVRDKDGNVKKWEGRVVTLLDAYQRRKQRQPIVNRHGDDNRRFLFSLTQGDIVELDVELGNGDTARELYLVRGVAFHAGGILQCTHVLDARKKKDIPMTSSAEERTRFLYRPVVNSLNRLNCRKVSVSPLGEVYPAND

SEQ ID NO: 15492 - protein, 1046 aa, unidentified
  REGION 1..1046: note = Cas Enzyme sequence
MTNQHAPYVLGIDLGTNSIGWAMIRFDDTRPVELVDMGVRIFEAGTTGDIESGKDESRAIERRAARQRRRQTDRQSRRLRSLALVLQEHGLLPEGELKTGSDRHAFFLQLDSELRNHYAEQGIALNCAAGLREFPYYLRAKALDEKMPLHATGRALYHLAQRRGFLSNRKTDSNDKETGPVKEGISDLAQKIKQANMRTLGEYLFNIDPVHEKRIRGRWTARSMYEEEFNLIWEAQSRWHPQLNNENIRGNIHKAIFYQRPLKSQAGTVGYCDLEPFKKRAPKALVVSQQFRILQKINDLTVHFADGDVRPLNNDERVSLFEYMNERESVTFKQIRKRLSLPPDTEFNLERGGEKKLPGNVTEARLLKIFGKNWHSFNDAFHHEIISLIMGSEKAESVRKLGKNKYGLDDDQAEKFSRLQFENGYMSLSKKAMTKLLPLMKEGVSFKTAEKKLYDNPRNLCLDFLPPLHTHKNDRFSPQPDAGLDIRNPVVTRSLTELRRVVNNIIAKYGKPLRIHVELARDIKRNREQRKLISTENRDRQRSRESIVAQIKEKLGEHYMPSEQDIEKVLLMRECRCICPYTGRTINMENLLGDHPQFDIEHIIPFSRSLSNSFANKTLCYHEENRNRKRNKTPWEAYGNTDQWDQIVTRVKSFCGPTARIKLERFQLRDLSSLDEMSSQQLNDTRYASKIAARYLGLLYGENAMRHIQTSTGQITAYLRAGWHLNRILSTQGIKNRDDHRHHALDAIVIALTSRSAIQTLSKAAGNAYNAKGRTRTFLNQLEEPWEGFLPEVQEMADNLFISRRINRRVRGRLHEDTNYGYPRTDENGKQWHPIRKVLTETFKDTDIDNIIDPVVQDCVRTHFEANGSNPQKAFADPDNHPRMHDGTVIHKVRCKRTVSTTPIGSGDGTRFVATDTNHHMEIVETQNKNGEIIWEDHVVSLMEAVQRHKAGLPVIKRDHGPGSTFIYSLFKGDTCTITENDETIYCTVIGIAVGEVTLVRMYDARKQVEIRQTKSRIRCNANSLRKKQLRKLLITPLGEVIPAND

SEQ ID NO: 15493 - protein, 1046 aa, unidentified
  REGION 1..1046: note = Cas Enzyme sequence
MTNQHAPYVLGIDLGTNSIGWAMIRFDDTRPVELVDMGVRIFEAGTTGDIESGKDESRAIERRAARQRRRQTDRQSRRLRSLALVLQEHGLLPEGELKTGSDRHAFFLQLDSELRNHYAEQGIALNCAAGLREFPYYLRAKALDEKMPLHATGRALYHLAQRRGFLSNRKTDSNDKETGPVKEGISDLAQKIKQANMRTLGEYLFNIDPVHEKRIRGRWTARSMYEEEFNLIWEAQSRWHPQLNNENIRGNIHKAIFYQRPLKSQAGTVGYCDLEPFKKRAPKALVVSQQFRILQKINDLTVHFADGDVRPLNNDERVSLFEYMNERESVTFKQIRKRLSLPPDTEFNLERGGEKKLPGNVTEARLLKIFGKNWHSFNDAFHHEIISLIMGSEKAESVRKLGKNKYGLDDDQAEKFSRLQFENGYMSLSKKAMTKLLPLMKEGVSFKTAEKKLYDNPRNLCLDFLPPLHTHKNDRFSPQPDAGLDIRNPVVTRSLTELRRVVNNIIAKYGKPLRIHVELARDIKRNREQRKLISTENRDRQRSRESIVAQIKEKLGEHYMPSEQDIEKVLLMRECRCICPYTGRTINMENLLGDHPQFDIEHIIPFSRSLSNSFANKTLCYHEENRNRKRNKTPWEAYGNTDQWDQIVTRVKSFCGPTARIKLERFQLRDLSSLDEMSSQQLNDTRYASKIAARYLGLLYGENAMRHIQTSTGQITAYLRAGWHLNRILSTQGIKNRDDHRHHALDAIVIALTSRSAIQTLSKAAGSAYNAKGRTRTFLNQIEEPWEGFLPEVQEMADNLFISRRINRRVRGRLHEDTNYGYPRTDENGKQWHPIRKVLTETFKDTDIDNIIDPVVQDCVRTHFEANGSNPQKAFADPDNHPRMHDGTVIHKVRCKRTVSTTPIGSGDGTRFVATDTNHHMEIVETQNKNGEIIWEDHVVSLMEAVQRHKAGLPVIKRDHGPGSTFIYSLFKGDTCTITENDETIYCTVIGIAVGEVTLVRMYDARKQVEIRQTKSRIRCNANSLRKKQLRKLLITPLGEVIPAND

SEQ ID NO: 15494 - protein, 993 aa, unidentified
  REGION 1..993: note = Cas Enzyme sequence
MMSKIILGLDLGITSIGWALVNVDDNIKNNKIIDSGVRIFTIAEHPKDGKSLALPRREARGSRRTTKRKAQKLRAIRRLLLKNKIITQDELDSLFIGNKWQKDVWELRRDALYRELDNKELSRIMVHLAKHRGYFSNRKSEDIVNNDELVKNTDDKESKKEKEGINFGIKNNLKILDTSKYLTIGEYISSKDEKQKEKKRNSKGNYQNTVARSMLVDEINIIFSKQKAFGNELVNDELLQTYKEIAFEQRPLKSIAHMVGKCPFEKEEDRASKSSYTFELFRALQKLKNLRIITLDGEVSLSKDEVNQAIYKAKTAKFTYKTLKKLFSLEDVLFKGLTYFDHKTGEVIKKDPESEELISFTSYRKIQKNIQSTDNLYWQTIENNSDVLDAIAKILTTEKNDKESIKQLKTIVENEKVCEALVSLSFSQFGHLSNKALKKIIPELEKGFDYDVACKNVGYDFKAIFKGNKTKFLPPLSKLENLEMTNPVVKRAIAQMRLVYNAIARKYGELDAVHVEFTRDIKNSHDDRRKIEKAQGEFRDTKEKAREQAIDKLEKEPNAKELLKFRLWEEQNGHSIYSGEYINPHMLADSYATEVDHILPYSRSLDDSLNNKVLCLTQENQDKGNKTPYEYIDSSKWDEFVGKIEGLKNLKYAKKNRLTKTNFDENSEIAFKDRNKNDTSYISKFVKNYIESHIEFKESRMKRHVFTMNGMLTSQLRYKWGVGDKNRDNHLHHAEDAIILAFSTQSMVQSLSTVSAKREGFSFKKREEKSKELRFVTPLDEFHKKVQESLADIFVSHMPRRKVGGAAHKATVYSNKTLSMKKENGKIDVLKGGSVTNNVKLKHGIALNDTMPRVDLFQNKKTKKYYLVPIYVNDFVKDKLPNKAIVAGNKPWIEMDDEYEFKFSFYKRDLIEIKTKKTPTKESVQILGYYDSTHSGTANLTIKSNDGASEYSFGSQNLVFIRKYQVDALGNYIEVKHEKRQGTIKEGRLKRKK

SEQ ID NO: 15495 - protein, 973 aa, unidentified
  REGION 1..973: note = Cas Enzyme sequence
RQRRGLLAEQLQMAGLLPERNSGEWRKVMKEDPYHLRRRAFDKEELTPYEVGRAVYHLAQRRHFRGRDIDEVSDDAAEAEGAVDADEKVAQGDRETTIQALKSEGSSLGAWLAKKGEGERRRGVHASRAVVEKEFDDVWAHHLPEQAKESVREAIFFQRPVFWRLNTLGRCRFVPDASLCPKGSWLSQQRRMLEKVNNLSVAGGNQRPLDSEERQAILSQLQIQASMTWAGVRRVLAPVFRNRGEPGAEKSLKFNLEIGGEQKLMGNAVEAKLAKIFGAAWQTHPRKQEVRDAVHELVWKSHYEKVGEQRVVIRRASERNDGKNEAVRRLIEEFGLSEGEAEQVASLKLPTGWEPYSVQALKAMLPHLERGTRFGEIINGPDWEDWRNENFPDREQPTGEVFDRLPSSANPDERKRIANLRNPTVARSRNELRKVVNNLVSMFGKPDLIRIELARDVGLSKREREDKAAGIRRNERLRKSAHRSLCENGITNPSRTDIEKWMLWKECGGQCPYSGDMISFDGLFRSGDFEVEHIWPRSRSLDDSFRNKTLCRKDMNARKGNRTPFEYLMHQDEEWQAIGIRLAGMMRKRGGPGMSAGKVKRFLAKEIPDGFVERQLNDTGYAAREASSYLRMLWPDLGPEASVKVFAVSGRVTAHLRRLWGLNGLLSDEDRKTRDDHRHHAIDALAVACCHPGITQRLSRYWQAKDEQDVERPSLALPWASIRADAEMAVSDIVVSHRVRKKVSGPLHKETVYGDTCVEDSDGRGRTYRYFVTRKKVEDLSRKELTEGIRDEDVRLIVAEWVEQHGGDPKKAFPPYPTRGQKGPEIRKVRILVKQQVELMAPVSTGYADLGSNHHIAIYRKPDGSVDFEIVSLFEASRRLRRRESVVRRDRGDGAKFVMSISPGDSMELQNLTGSKVWVVKGVWAGGQVVMQHHNDATQNGETVYRPNARSVLANGGKKISVDPIGRIRFAQD

SEQ ID NO: 15496 - protein, 1045 aa, unidentified
  REGION 1..1045: note = Cas Enzyme sequence
MNRGTAVELIFGLDIGTTSIGFAVIEHDHKASAGKILRLGVRIFPEARDPKGVPWNQERRAARLRRRQLRRRRQRRGLLAEQLQMAGLLPERNSGEWRKVMKEDPYQLRRRAFDKEELTPYEVGRAIYHLAQRRHFRGRDIDEVSDDAAEAEGAVDADEKVAQGDRETTIQALKSEGSSLGAWLAKKGEGERRRGIHASRAVVEKEFDDVWAHHLPEQAKESVREAIFFQRPVFWRLNTLGRCRFVPDASLCPKGSWLSQQRRMLEKVNNLSVAGGNQRPLDSEEREAILSQLQIQASMTWAGVRRVLAPVFRNRGEPGAEKSLKFNLEIGGEQKLMGNAVEAKLAKIFGAAWQTHPRKQEVRDAVHDLVWRSHYEKVGEQRVVIRRASERNDGKNETVRRLIEEFGLSEGEAEQVASLKLPTGWEPYSVQALNAMLPHLERGARFGEIINGPDWKDWRNENFPDREQPTGEVFDRLPSSANPDERKRIANLRNPTVARSRNELRKVVNNLVSMFGKPDLIRIELSRDVGLSKREREDKAAGIRRNEGLRKSAHRSLCENGITNPSRTDIEKWMLWKECGGQCPYSGDMISFDGLFRSGDFEVEHIWPRSRSLDDSFRNKTLCRKDMNARKGNRTPFEYLMHQDEEWQAIGIRLAGMMRKRGGPGMSAGKVKRFLAKEIPDGFVERQLNDTGYAAREASSYLRMLWPDLGPEASVKVFAVSGRVTAHLRRLWGLNGLLSDEDRKTRDDHRHHAIDALAVACCHPGITQRLSRYWQAKDEQDVERPSLALPWASIRADAEMAVSDIVVSHRVRKKVSGPLHKETVYGDTSVEDSDGRGHTFRYFVTRKKVENLSRKELTEGIRDEDVRLIVAEWVEQHGGDPKKAFPPYPMRGRKGPEIRKVRILVKQQVELMAPVSTGYADLGNNHHIAIYRKPDGSVDFEVVSLFEASRRLRQCESVVRHDRGDGSDFLMSISPGDSLEMRCDGQVKIMVVKGVWASGVIVMVEHTDATVKGDSVYRPNAKSILASGGRKISVDPIGRIRPASD

SEQ ID NO: 15497 - protein, 973 aa, unidentified; identical to SEQ ID NO: 15495
  REGION 1..973: note = Cas Enzyme sequence

SEQ ID NO: 15498 - protein, 1012 aa, unidentified
  REGION 1..1012: note = Cas Enzyme sequence
MMSSKAIDSLEQLDLFKPQEYTLGLDLGIKSIGWAILSGERIANAGVYLFETAEELNSTGNKLISKAAERGRKRRIRRMLDRKARRGRHIRYLLEREGLPTDELEEVVVHQSNRTLWDVRAEAVERKLTKQELAAVLFHLVRHRGYFPNTKKLLPDDGTDSADEEQGKINRATSRLREELKASDCKTIGQFLAQNRDRQRNREGDYSNLMARKLVFEEALQILAFQRKQGHKLSKDFEKTYLDVLMGQRSGRSPKLGNCSLIPSELRAPSSAPSTEWFKFLQNLGNLQISNAYREEWSIDAPRRAQIIDACSQRSTSSYWQIRRDFQIPDEYRFNLVNYERRDSDVDLQEYLQQQERKTLANFRNWKQLEKIIGTGHPIQTLDEAARLITLIKDDEKLSDQLADLLPEASDKAITQLCELDFTTAAKISLEAMYRILPHMMQGMGFFDACQQESLPEIGVPPAGDRVPPFDEMYNPVVNRVLSQSRKLINAVIDEYGMPAKIRVELARDLGKGRELRERIKLDQLDKSKQNDQRAEDFRAEFQQAPRGDQSLRYRLWKEQNCTCPYSGRMIPVNSVLSEDTQIDHILPISQSFDNSLSNKVLCFTEENAQKSNRTPFEYLDAADFQRLEAISGNWPEAKRNKLLHKSFGKVAEEWKSRALNDTRYLTSALADHLRHHLPDSKIQTVNGRITAYLRKQWGLEKDRDKHTHHAVDAIVVACTTPAIVQQVTLYHQDIRRYKKLGEKRPTPWPETFRQDVLDVEDEIFITRQPKKVSGGIQTKDTLRKHHSKPDRQRVVLTKVKLADLERLVEKDASNRNLYEHLKQCLEESGDKPTKAFKAPFYMPSGPEAKQRPILSKVTLLREKPEPPKQLTELSGGRRYDSMAQGRLDIYRYKPGGKRKDEYRVVLQRMIDLMRGEENVCVFRTGVPYDQGPEVDQHYEFLFSLYFDDLVEFQRSADSEVIRGYYRTFNIANGQLKISTYLEGRQDFDLFGANRLAHFAKVQVNLLGKVIK

SEQ ID NO: 15499 - protein, 922 aa, unidentified
  REGION 1..922: note = Cas Enzyme sequence
EDIKNKANYCANPNFTNQIRTYLFHERYTTSSLTQGETDKKDNDSGALKRAIKELREKITQEGCRTLGEWLHQRHQKGDSVRARLRGKTQKDKAYDFYADRAMIAHEFDLLWQTQAAYNPALFNAAAQAELKDILLYQRNLKPVRPGRCTLIPDEERAPAALPSVQRFRIYQELNNLRVIDPDFRERALTLAQRDTLAALLEVGADVRFGAMIKALKLPGATKFNLEDIKRDRLKGNATSVTLAKADHFGPAWHGFPLALQDEIVLQLLGEASEAKLVDWLQTHTAADESHAEKIANTGLPEGFGRLGRTALGRILPLLIAEVVTYDKAVTGAGFASHSALSHHLQTGEVMALLPYYGIPLQRHVAFAKDTPRNEEERYGKIANPTVHIGLNQVRAVVNALVQEYGPPDEIIIEVARELKLGRERKLDIQREQKVKQDLNDLHVNEACTVIGQDAAHIDRQKRRQLSQKMQLWVELNPKDIAGRCCPYTGEQISIARLLSDDVEIEHILPFSMTLDDSMNNKTIAVRRANRDKANQTPYEAFGRMVRPGYDYQDIQARAAQMPTNKRKRFAPDGYQQWLKDDKDFLARALTDTAYLSRIAREYLSCICPDNKVRAIPGRMTAILRGKFGLNQLLSGTGQKNREDHRHHALDAMVIGITDQGMLQKFANASASARVQELDRLVAGLDDPWPNYRDHVARALAHIVVSHKPEHGYQGAMHEATAWGLRGDGQVQRWVRAEGSDVRELEKKSLKVIAINSSSGNAIGRHGADAEGNVRAYKGYVGGSNYCLEIWRDEKGHWNSDVVSTFQAYQIIRQFGEDEGGQRLRHPALAQAGQPLVMRLMIKDYVRLDVDGVTRTMVVVTIKSSGQILMADHNESNVDARNRDKDNSFSYISKTAGSLQKIKGRRCTVSESGKLRDPGFKG

SEQ ID NO: 15500 - protein, 1009 aa, unidentified
  REGION 1..1009: note = Cas Enzyme sequence
METKKIIGIDMGITSVGFCMLNVKEEKILSLGVHIFDAAEDPQTGASLAEPRRLARGARRLVNRRAMRKNKLQKDLVKLGFDTQGLHNFYALSPWELRKEGLHRKLTDLEFAKCLLHMCKRRGFQTNRKSPQDKDAETGKMKKGMNELRVKMEASKAETIGAYLCDLEKKRNTQGDYSHTVQRDMIKQEIEKLFEKQRAFGNEKASFQAEEILTETILFQRPLKSVDFMRGYCTHLPDEKRAPKFSLSAELFVLYSKINNLKVDGKDGTLIEVTPQMRQQVVDLAYKKKKVTFSDIRKEWGLSEDFRFNFVKYGEKKEEEQTFCQLEGYHKLQKAFKKNSPWKTPEEQLDLFDAIAEIISFEFDEKKIEEELRKHPLLADADNNLIEELLKVDFSKTIRLSKRAVHQLLPYLKDGKRYDEAVALANFPQQKTNRKDTLPPLEKTNNPVVDRAMAEARKVINALIRVHGKPDSIYIELARELGKSRSLRNEIEDKQKENKKKNDTIREKIKNHNHEARKSDVIKYKLWEEQQGFCAYSGDYIQPSALFDNTNSVQVDHILPFSRSYDDSYMNKVLVTAKANQDKGNKTPYECWGGTDRWGQLEDFAQKLPCRKKQKNFLTKTFAEQEQDFKERNLNDTRYMTRCFKDHMKEHLGVEIFTINGGITNFLRHSWGLGAKDRAEDNRHHAVDAVIIACATPGIVQKVTEFNQYAEWAKARKKDPDAKKPYFPEPWEGFRKQVLDAKENIFVSRMPNRKLTGQAHKETILSYRPHNPVGEQMVKRVPLSSLSLKNLENMVDKKRNKRLYERLYELLKERLETPGTNAFKEPVYMPRNNGTEGPIVKSIRVYDNTNSGIKVRQGHADNGNMVRVDVFSKPDGKGKLKYYLCPIYVMDVMKGVLPNKLCVAGKKDWPEIDETYTFMFSLHKNDLVRIKTSEGKETWGYYVGMNRWTAAIDVVEHSKPIKQKMIGLGVKTLAAFEKYNVNYFGEKFRVKGEKRLPIHPKKSGTGEKP

SEQ ID NO: 15501 - protein, 998 aa, unidentified
  REGION 1..998: note = Cas Enzyme sequence
MKKKIFGFDLGIASIGWAVVEFDNEYFDPETGEVVEGKIVKSGVRCFPVAENPKDGSSLAAPRREKRLARRICRRKARRMESIKRLFVAKNLVSDLRELNDLYASQKGGDVWNLRIKGLSEKLSKEELLRVLTHLAKHRGFKSYRKAVEENDAERGRVLKAINENKKLLSKDNTLAQVIVERAGKTGKKRNYTESDAKGMAKAIYNNSIPRNEIERELNLIYAEQKQYGIFSEDLFEDFKKIAFRYRPLGSVADMVGNCTFEKGEKRAPKEAPSSEFFVAWGKINNMAVYENAQKRFLSMEEKKALFELLKTTPKVKYQTIAKKIFVGKDIQFADVNYNLIRKKSKDGSSKEVNPEDAVFYEMKGWHKLKSLFEKDAWSEISKDISLLDRVVNVVVCEKNDENIIKGLKHINVPEKYIETFSSLTTDKFINLSLNALYKILPYMVQGMKYNEACEKAGYDFREKTDKLVEKKGVLLSVIPAEKQTKVPVVNRTISQFRKVYNAMVRQFGAPDQINIETGRELKKNYEERRKIINKNKENEQERKEAEEELRQENIKETSKNIWKYRLYQEQDGKCIYSGKSIDLRRLDEEGYLDVDHIIPYSRSLDDSFNNKVLCLSSENRMKGNKTPFEYIQNKDDWEAFEARVNLLRNNRKKENLLNKNFNDRELEFKERNANDNNYIAKYIKQYLEDGLDFSSSNRQDIKNRIQMRTGSLTSYLRHCWGLHKDRNENDRHHAQDAIVIACATQGMVKYLSTVSGLWENKWQVAQLKDNGEAWYKSLKYKFLEPWNGFREDVKQSLDEIFVSRPPRKSATGEIHQETIRSLNPKHKNYNKKDIKSGILVRGGLANNGSMLRTDVFVKKNKKGKDEFYLVPIYLSDMGKELPSKAIVPLKFEDEWLQIDDNFSFKFSLYMDDLVKVKKGEKEIFGYFKGTGRTTGSITIEAPDRSIITPSIGVKTQDAFKKYSVDPLGNYTEVKHESRIPLTLIKSNAQRYKEQQKG

SEQ ID NO: 15502 - protein, 1088 aa, unidentified
  REGION 1..1088: note = Cas Enzyme sequence
MDWRLGLDLGANSLGWAALRLDGAGKPEGILAMGSRIFSDGRDPKSGASLAVDRRAARAMRRRRDRFKQRQAALIKYLIRDGLFSADQAQRQQLAIEDPYALRARALDEKLSLPELGRALFHLNQRRGFQSNRKADRKAGDDAGKIAIGVDRLVEKMQERDARTLGEFLHMRRQDAENANHIPSVRTRLRPETGEGAKGDGYDFYPSRKLIADEFEQIWAAQADYHPDALTPEVHRRLHEIIFHQRPLKAPPVGQCTLVPGETRLPKAHPLFQKRRLLEEINALAIVRAGEVAQRLTPEQRDTLYLALKTRAKMTFAAMRKQLKLDPADRFNKESENRTELKGDEVAAEMGAKTRFGTRWPHLSVEAQWGVVERLMALETDRDETAFQDWLRQTHNLSEEGANAVLGARLPDGHGRFGPTATTTLIDSLLHDRTEDGRVVVYSEAVQRSGLGHHSDFRRDDSDAATDALPYYGIALERHIMPGTAEPTDPDEMRIGRLTNPTVHIGLNQLRHVVNRLIRAYGPPAEIAVELARELKLNDEEKKRRNRENTDNRLAAEGRSRKLSEIGQRDTGANRALLKLWEELNPGNVLDRRCIYTGEQISIDMLFSDRVEVDHILPFAETLDDSNGNKLLCLREANREKRRRSPYEAWGHTDRWPGIAERASRLPKAKRWRFEPDAMQRFTQDGGFLARHLVDTQYLGRLAREYLTWLYPGRGEGTGHVWVSPGRLTEMVRRKLGLNDLLPDHNFGGGADQPKNRLDHRHHAIDAAVVAIVDRGMLNAIARASGQDGSEGRERIHIPAPWEKFRDDLRAAVNRIIVSHRADHGTVSKAGLRAGRDQTAGRLHNETAYGLTGETDAKGNSIVVRRVPLSSIKKPADIARVRDPMLRDALAEFTQGLDGKAFEARIARFGELGPLLYRGIHRVRVTEPLAVIPIRDGQGRAYKGYKGGSNYRYDVWELPDGKWVPQVTSMFEAHQPGTIDRPHPAARKVLSLHQSDVLAIERTPNERQLMVVTQFWQNGQVRLIAHNEAGKLDDRHKNPDDPYTNFSPTCGGLKKLRARQVRIDQLGRVLDPGFPARKSVRPTRTEAA

SEQ ID NO: 15503 - protein, 978 aa, unidentified
  REGION 1..978: note = Cas Enzyme sequence
MSKMILGLDLGITSIGWALVNVDDEDAQNNKIIDSGVRIFTIAEHPKDGKSLALPRREARGARRTTKRKAQKIKAVKRLLIKEKVVTANELNNLFIGNKKQKDVWDLRREALYRELNNKEFARIMVHLAKHRGYASNRKSEEPTDSEGKAVLSGITHNKTILQEKSYLTIGEYISTKTKKRNGKDTEGKLNYENSVSREMLINEITTIFERQKEFSNPHAKEELLEEYKNIAFTQRALKSVEGMVANCPFETNKKRAPKASSTFETFRALQKLKNLRMISNEGESALTKEQILQAIQKAKTAKSFTYKTLKTLFALPKEVQFKGLTYFDHKTGEAKEPESAKLLDFSAYQKIKDAIQSSDNLYWNKIEESVNLLDEIAKILSTHKDDKKSLEELNKIIDNPSVCNALISLSFSGFGHISVEAMRKINPYLLEGIDYDKACEMAGYDFKAIFKGDKSTLLPPLSEQENLEMTNPVVKRAIAQMRLVYNAITRKYGAIDAVHVEFTRDIKKSHKDRNDIKKSQEEFQALKEEAKAEAIKILGKEPSAKELLKFRLWKEQNGECIYSGAYISPSILADPYATEVDHILPYSRSLDDSLNNKVLCLTKQNQDKGNKTPFEYFGADKDSKEWQEFTGRVEGLKNIKGAKKGRLTKTNFDESSENAFKERNKNDTSYISKFVKNYIESHVEFKESKMKRHVYTMNGMLTSQLRYKWGVGDKNRENHLHHAEDAIILAFATQAQVQKLSTTTAKREGFSFKNKEEKAKELRFEPPMENFNEKVKESIENIFVSHMPRRKVSGSAHKETVYSNKTHSVKKADGKVEYLKGNSVNNNVKLKHGIALNDSMPRVDLFQNKKTNKYYLVPIYVSDFVQETLPNKAIVAGNKPWLEMDEEYEFKFSFYKSDLIEVKTKKTATKESVQVLGYFNTAVSSTAQVVIDTHDGNEEYRYGTQNLIFVKKYQVDALGNYIEVKNEKRQGTKKQNR

SEQ ID NO: 15504 - protein, 978 aa, unidentified
  REGION 1..978: note = Cas Enzyme sequence
MSKMILGLDLGITSIGWALVNVDDEDAQNNKIIDSGVRIFTIAEHPKDGKSLALPRREARGARRTTKRKAQKIKAVKRLLIKEKVVTANELNNLFIGNKKQKDVWDLRREALYRELNNKEFARIMVHLAKHRGYASNRKSEEPTDSEGKAVLSGITHNKTILQEKSYLTIGEYISTKTKKRNGKDTEGKLNYENSVSREMLINEITTIFERQKEFSNPHAKEELLEEYKNIAFTQRALKSVEGMVANCPFETNKKRAPKASSTFETFRALQKLKNLRMISNEGESALTKEQILQAIQKAKTAKSFTYKTLKTLFALPKEVQFKGLTYFDHKTGEAKEPESAKLLDFSAYQKIKDAIQSSDNLYWNKIEESVNLLDEIAKILSTHKDDKKSLEELNKIIDNPSVCNALISLSFSGFGHISVEAMRKINPYLLEGIDYDKACEMAGYDFKAIFKGDKSTLLPPLSEQENLEMTNPVVKRAIAQMRLVYNAITRKYGAIDAVHVEFTRDIKKSHKDRNDIKKSQEEFQALKEEAKAEAIKILGKEPSAKELLKFRLWKEQNGECIYSGAYISPSILADPYATEVDHILPYSRSLDDSLNNKVLCLTKQNQDKGNKTPFEYFGADKDSKEWQEFTGRVEGLKNIKGAKKGRLTKTNFDESSENAFKERNKNDTSYISKFVKNYIESHVEFKESKMKRHVYTMNGMLTSQLRYKWGVGDKNRENHLHHAEDAIILAFATQAQVQKLSTTSAKREGFSFKNKEEKAKELRFEPPMENFNEKVKESIENIFVSHMPRRKVSGSAHKETVYSNKTHSVKKADGKVEYLKGNSVNNNVKLKHGIALNDSMPRVDLFQNKKTNKYYLVPIYVSDFVQETLPNKAIVAGNKPWLEMDEEYEFKFSFYKSDLIEVKTKKTATKESVQVLGYFNTAVSSTAQVVIDTHDGNEEYRYGTQNLIFVKKYQVDALGNYIEVKNEKRQGTKKQNR

SEQ ID NO: 15505 - protein, 1118 aa, unidentified
  REGION 1..1118: note = Cas Enzyme sequence
VRIFSDGRDPQSGASLAVARREARGARRMRDRYLKRRQQLLERLTEYGLMPADEAERKALLRETSDQKQNTGGNIEKTDPYNLRARALSEKLPLHHLGRALFHLNQRRGFKSNRKTDRRDNDKGKIAMGVEELQAQLHLSRAPTLGAYLAQRYNQGKVVRIRQDSEAFTGDKQENYLFYPERSMLEKEFAAIWQAQQEFYPEELTESRRKQLFDDIFYQRPLKEPKIGKCAFNPEEERLPKAHPLFQEFRLYKEANELTIETAGKASGRKLSKEQRDELIKLLRPQKKMAFSAIRKNLKLHGTTFKKEKNAREGLAGDEIYAEMVDKSRFGNPWADFSREKQWEIIKRLRDEEKPEKLDKWLAEQFPNLSAEQRDKIANAKLPEGYGRLGHTALSRMLEEMKNGTITEEEVKKRFGRKAAEYWPELKGTPLTEADAAARCNYDHALLGREREELDSLPKYQAVPNVARSIPPGEGGKAVAENDPDYDRIMGRITNPTVHIALNQLRRVVNALIKKHGKPQEMAVELARDLQLSDEEKKKVNKSIADNTKAAILRSDKLKEQGKEDNGYNRQLLKLWEELNENPQDRCCPYSGKPINITTLLSSDVDIDHILPFSRTLDDSNANKIVCLKEYNRQKGNFSPAEAANRLDGWNYEAMLGRAQNLPKSKRWRFAKDAMERFEQEDNWLARQLTDTQYLSRLAREYLSALYPGKEADEQGELHMRYHIRTIPGKLTELFRRNWGLNALLPDYQAAIHKDSEKNGQDLRPEEIGNPLNKPKNRQDHRHHAIDAVVIGITTRSQLQRISRASGQMEARDLENFVKNSVRDTPPWPEFRRDLQTAIDAVTVSHKADHGTLPKAKDNKAGRGKTAAKLMKETAYGLPVDDKGERLKDEKGNALVVWRVPLRSLKAKDLDNIRDPHLANALKEHIYAEARELKDGKEFEQALSSFAKTHKQYKGIRHIRLIGARNTISVRNAAGKAYKGYWNDGNYRYDVWQTLDGKWKQEVISMYDAHQPAYQSPFHQANPTAKKVLSLQQNDMVAYNDPETGKRIIARVVKFDQAGSIYLASHNEANVDRRNNDKNDPFKYLKKMAGPMKLINLRQIRVDEIGRIFDPQQKQTGA

SEQ ID NO: 15506 - protein, 1060 aa, unidentified
  REGION 1..1060: note = Cas Enzyme sequence
MKILGVDLGITSVGWALVDDKSNKIIDSGVRIFTQSTNKDGKTLASVRREFRGSRRVLSRKKQRLTQLKRLFVNNKLLSKSEFKHLFSGKNRLDIWQLRAKGLERQLNNNEWARVLYHIAKRRAYQSNRKSEEIGNLDKKKVLSAIETNQEKISQGGYQTIGEMIYKETRHPSSGRIRRNKKDSHTQSVSRDFLKKEINILFEKQAEFGNQFATDEIKLEYKEIAFTQRPLTFDTKTIGKCTFEPEENRGAKHSFSMEKSIVLSKINNTDLLDKETGETIRLCEYIDINTLLDVFYNTKEVKYITLRKKLKIADSFEFKQLNYNQNFEYKTKIKAKVTDFYELENWLSNEQKALLKKQALDNKKEKFKRYKYSSIRSILSLTDAQKFNGVNYNKSQIENEAFGKLNGYHTIKKQLNSEVFELLFAKQKQFNKIAEIISYKEDDNIAQEKFTKDVFKDLRLSEEVKNEATEKLLKISFSGFNNLSLKAINEILPNLEKGLKYHLAVEQSKYKHHSVFKAGNPQKYLRPLNRQENYQITNPTVKRTFSQFRKVLNAVIRKHGSFDAVHIEMARELKNSKKRKFEIQAGQKEYKQEKEVIKAKFLEIFKHEGSGRELLKLRLHEQQDGKCIYNTKKVIEINRLQEDGYVEIDHILPWSRTFDNSLNNKALCLSEENQNKGDKTPFEYLVNSDKDSEQWQAYKNYVGSFANIKQAKKNKLFNTTLPQRRGNDLTGDDIENTESGFLARNLNDTAYASRFIKNFVQKHLEFKKNDNIKQKVKVRNGSLTDQLRYNWGVEEKNRGNNLHHAEDAIILAFSTQSEVQRMSAISAKREDFKYQTAGERPIKFTPPFADFKNALDESINNIFVSFAPRRKIAGAAHKATIKPKDIGGKYKFLVNKGVAENGIIQRIDVFKNIKNKYQFVVFYPADFYKDNFPELDLSGNKIDKNSEFLFSLFKSDLIGFTRRDKSEQRAYFSFITSDGNIIYQPNELASYEVPSLDKEGKQKRGRNDKLLTKPLKFKITTLTSLKKYQVSVLGKYQEVVSEKRLPLIKQMRKNKPKKKK

SEQ ID NO: 15507 - protein, 917 aa, unidentified
  REGION 1..917: note = Cas Enzyme sequence
VLSAIETNQEKISQGGYQTIGEMIYKETRHPSSGRIRRNKKDNYTWSISRNFLRQEIDVLFKVQRSFGNKFATDELKQEYKDIAFTQRPIKFKADLVGKCTFEKDEYRGAKNCFSSEKSILIQKINNTDLVDKDTGEIVRLFEYVNLNSLLDIFYSTKEVKYTTLRKQLKIPSNFEFKQLDYQKNFEYKTNIKAKIEDFYKLEYWLSPEQKEMLEKQVLDDKKEKFKRYKYTSIRSILSLSESQKFKGVNYNTNVEATIFGKLTGYHTIKSELDSEMFNLLLSNKDKFNKIAEIITYQKDDESATQDLREQVFNDLNLDEIIINVAIKGLLNISFSGFNNLSIKALDSILPHQQQGLKYHNAIKEIYEHHSQFKNTNPQQYLRPLNKEENYQITNPTVKRTFSQFRKVLNAVIRKHGSFDAIHIEMTRKLKNSKKRKFEIQAGQEEYKQEKEVIKAKFLEIFKHEGSGRELLKLRLYEQQHGKCIYNTKKVIEINRLREDGYVEIDHILPWSRTFDNSLNNKALCLSKENQNKDNQTPFEYLANSDKNSQEWQEYKNYISSFSSIKQAKKNKLLNTTLSKRRGNDLLDDDIENPESGFLARNLNDTAYASKFIKNFVEQNLVFLQNSKIKQKVKVRNGALTDQLRYNWGVEEKNRGNNLHHAEDAIILAFSTQSEVQRMSAISAKREDFKYQTAGERLIKFTPPFADFKNALDESINNIFVSFAPRRKIAGAAHKATIKPKDIGGKYKFLVNKGVAENGIIQRIDVFKNIKNKYQFVVFYPADFYKDNFPELDLSGNKIDKNSEFLFSLFKSDLIGFTRRDKSEQRAYFSFITSDGNIIYQPNELASYEVPSLDKEGKQKRGRNDKLLTKPLKFKITTLTSLKKYQVSVLGKYQEVVSEKRLPLIKQMRKNKPKKKK

SEQ ID NO: 15508 - protein, 1055 aa, unidentified
  REGION 1..1055: note = Cas Enzyme sequence
MRILGVDLGIASVGWALVDDKKQEIIDSGVRIFTQSTNKDGKTLASVRREFRSGRKVLSRKKQRLTQLKKLFIGHKLLSKSEFKYLFNSKDRLDVWQLRAKGLERQLNNKEWARVLYHIAKRRAYQSNRKSEESGNIDKKKVLSAIKTNQDRINQGGYQTIGEMIYKETKHPSSGRIRRNKKDDYAWSISRDFLRQEVDKLFEVQRSFGNKFATDELKQEYEYIAFKQLRIKFKADLVGKCTFEEDEYRGAKNCFSAEKSVLLSKISNTDLVDKDTGEIMRLFEYATLESLLDVFYNTKEVKYTTLRKQLKISDNFEFKQLDYQQNFEYKTNIKAKIEDFYKLEYWLSPEQKEILERQVLDDKKEKFKRYKYSSIRSILSLSESQNFKGVKYNTNVEATIFGKLTGYHTIKDELNSEMFNLLFSNKDEFNKIAEIITYQKDDKSATQDLRKQVFNNLNLNESIIDKAISGLLNISFSGFNHLSIEALDKILPYQQQGLKYHEAVEKVYGHHSNFKNTKLQQYLRPLSKEENYQITNPTVKRTFSQFRKVLNAVIRKHGSFDAMHIELARELKNSKKRKFEIETGQKEYQQEKEAIKTKFLENFGYEGTGGDLLKLRLYEQQHSKCIYSKQEIKINRLLEDGYVEIDHILPWSRTFDNSLNNKVLCLAEENQNKTNQTPFEYLANSDKNSEAWQEFKQYVNSVHGIKIAKRNKLFNTTLPERRGNDLSTDDIENPESGFLARNLNDTAYASRFIKKFVEQNLVFSENTEIKQKVKTRSGALTDQLRYNWGIKEKNRGNNLHHAEDAIILAFSTQSEVQRMSTISAKREDIRYQTAGERPIKFTPPFVDFKNALDKSIKNIFVSFAPRRKIAGAAHKATIKPSNTGGKYKFPVNKGVAENGIIQRVDVFVNDKNKYKYQFMALYPADFYKDNFPELDLSGNKIDENSQFLFSLFKDDLIEFETKGNKRNKSRHLKSYFKYIQSDGKIAYQQHYKAEIERKKSNNKKGFVDVLLATKSDLQFIKKYQVSVLGDIQEVINEKRLPLIKQMRKDKFKKKK

SEQ ID NO: 15509 - protein, 1016 aa, unidentified
  REGION 1..1016: note = Cas Enzyme sequence
ETLGEYLWHRHRQGQDLRLKGHGLYADREMIFNEFDRIWARQEREHKQLCGEHEGRSLRKTFEEAIFYQRPIRILSAGNCSLETSLPRSPLVQPAYQEFRIEKQITDLRWAKKGRRHPKPLEEPAKQVIRKLLSEREKVKFEQIYKALEKQGIPVASDEYLNLSSGDREDLRGNGTNACMKKLGLEQEWQNLSDGHQITALNLLADLGSPDVFYAQDWHKRIARGKKRADGKPEYRRIPCKVVNFINSMVKMEKLDWLSKMGFQAGRSPYSIKALRRLTAAMREQNLDEADAKALLYPRAAKAVSRGEMQGELPPHQHTGNVVVDVSLRQVRREVNAAIRKLGGPPDSVIIELSRDMPLGVERRGEIVGRIKKNRIDRNKAKEKIEAYTKRAASQSAITRYLLWSEQDQRWCPYCTEPINISDALDGSKTNYEHIFPRSLTRIGKRRDYLVLAHRSCNDEKGAQTPREKWGDNPERWKVVEARAKQFGKKKKLGKMRQLLSKESGESLLDDEEIGDFSDRQFHETSWISKICAQWMKAICSDVAVSRGFLTASLRRKWGLDTVIPEVRIKEKLPIFDMEEKLITLEDFNRHRAHWEERGGVEDSGKTSRRIEKRIDHRHHLIDALVIGLTSRGLYQKMANVYKKETEKAGASASKRNIPLNAEPPIRHIRKLALALVRNCNLTHRRDRWLGGPLFAEQPLAIVEIDRKDWFVQRKTLVEIARKSRKSKDEGWEKTVRDRIDKIHPSSIRKIIKDEFDRRIGLGMNPKEALSEPVFDRQFGNAIRRVKVRSKDWFAQKETLIEIAKNPKKLNDEGWEIMVRSRIDRIHPSSIRDIIKEEFDRRIGLGMNPDEALSEPIFDRKSGNPIQEVKVLAKGRAEGSFLVKHKGIIQNKQFEKYITADGYAYLEVDARQENARLVTLREATSNRFSKSGDIRRFFKNDTIYDPEDGAYYVIRQIISGAGGKLAMTRITESKTFDQIQAADAKIRKMGDYDYHKRAKKISDKKRLSSLRIMPDG

SEQ ID NO: 15510 - protein, 1016 aa, unidentified; identical to SEQ ID NO: 15509
  REGION 1..1016: note = Cas Enzyme sequence

SEQ ID NO: 15511 - protein, 1088 aa, unidentified
  REGION 1..1088: note = Cas Enzyme sequence
MLQPLQVPYILGLDIGVQSIGWALVRLDEEGNPCGILRLGVRSFESSSGSEQEIEKGTDEPASRQRREKRLMRRQLFRRQQRLRRTARVLQQAGLLPPFPLQPASRDAAITQLDAQLRSQFIDSGNHVDAQLLPYRIRAAALDQPLPAYALGRAFYHLAQRRGFLSNKKAGGKKDEEEKGKVKAGIAELAKQIEAAGARTLGEFFARLDPHQQRIRSRWTSRKMYQQEFDAIWAAQEPHHPQILTAELKAKLYRAIFFQRPLKSQKGLIGRCSLEKGRRRAPLACLEAQRLRYWQKLNDMRLKDARRILNAIPEAEGLIDWLPQEGQGRLSLYAKQLLAQHLETSEELTFNQIRHILGLKKKKNSDLDFTFNLEEGDEKKLLGNRTAARLLKALGQRWQDMPEDQRQRLVDEILSFEKEEPLARRLEKAWGFTPAEAANVAALDFEQGYHSFSRQAIRKILPHLQQGQSLASIIKQLYKDTQPQATAWDRLPPLRDVFPHVNNPVVRRALTEVRKVVNAILRVYGKPQQVHIELARDLKKSRYERQQLFKGMRQQQKQREEAKSWLQCQMGITNPTAHDILKYRLWIECNQQCPYTGKPISKEALFGREPQFDVEHIIPFSRCLDNSFTNKTLCEIAENRNVKKNRTPYEAYGHDPQRWHEILQRVSRFQGDAAKAKLRRFQLTEIPADFANRHLNDTRYSSRLAAEYLALLYGGRSDAQGNLRVRAITGAVTAQLRDQWGLNAVLAELGRQLGVRDLDDNVEKARFDHRHHAVDALVIALTTPGMVKRFSDESQRARQYGRQLRCFFDPPWGTRTEFVADVRNAVLAINVSRRLDRRLKGPLHEETIYGKPKQYVDEKGKTIQVAHVRKPLESLSPKNVDDIVDPVIRELVKKKLQDLNTTDPKKAFQKKENHPYMIARDGRIIPIHKVRIRVTTETIMTVGHGPTLRHVKPGTNHHMEIVATLDAAGNEIRWEGITVSLFEALHRLRNKQPVVQRDHGPGKRFKFSLAGGEYLEFVENGQKKLVRVTTVYHSNVEFRLHNDARPITMLLGVKGARAGLGHSVDALRKLKARKVLVDPLGNILPAND

SEQ ID NO: 15512 - protein, 1129 aa, unidentified
  REGION 1..1129: note = Cas Enzyme sequence
MAKILGLDLGTNSIGWALISDENKILGIGSRIFPEGVTDLGQGDREMSKNASRTEARGKRRQFFRKRLRKRYLLRELAKNSLCPIDFNLIKIWTNDEVFEDGQFKEWIRLNPYELRAKAINEEITLFELGRILYHLIQRRGFLSNSRSAGSEDIEKSVIFKGDAKSGKIGISDTQESIEENKTLGAYLNQIKPKEFETYQKESERIRNRYTTRAMYIDEFEQIWEKQKDFHTELTDELKTLLGGRKKDGYKDDGVLFHQRPLRSQKHLVGNCTLEPSKTKCQLSAIPFEEFRVYSWINTVECNGKKLNEKERNLLANQLFSKEKVKFMDLRKVLKKADSTFQFNYKDDDSIVGTHTISKLSNKKFFGANWFDLSEKEREDIWHVLYSFEDRDKLKDYAKNNWDFDDVKAEKISKFNLKDGYTNLSRKAINNILPPLKLGFTYDLAVVLGGIKNAFGNEWEVLENEKRSLIIDNIFDIVRNNKEGSFIDALKDFLKEDYNLSEKKLCKLYHHSATIETTEILAKLPVNKDADKEIQNIRNPIVVTALFEIRKLVNEIIDDYGSLDQIKVELARDLKISKTKRNEIRREQKRLESENDRIKAELDYIGQRYSHDNILKYKLWEECNKTCPYTGKQIEVTQLFSGEIQIEHIFPWSRSLNDSFMNKTLCFADENRAKGNKTPYEYYIEKGEDIWETKKAQALSCFKSKKGYANAYQKFKQFIKQKHDSDFISRQLNDTRYISKEAKNYLSKICKDVQVAPGQMTANLRKKWGLNTILNDDNNKSRDDHRHHAVDALVMACSTRNHLQELTKWNRYNRTGELKNFPMPWEGFRQDAENAIDKVLISHKKTNNILTIRTNKVKKNGVEFKNIGVAARGQLHKETVFGKRKSPNNEEAYHVRKPIESLTTKKHVEKIVDPVIRNLILDRINELGGFEKETNVPKETFYAVDENGILQPQIFLPNKNGAAVSIKKVRLKEKIGGAEKLKETNQWVNPRSNHHVLIYKNEKGELQESVVTFWTAVERKKQKQPAVQLPVEHRDGKIITSLQINDTFLLGLNEEDVDWGQPNRKVLMNHLYRVQKLSSRKYYFRKHTSTSSTDKEHIVIMNFGEGKTGWFTFNPIKVKITSTGKIEKI

SEQ ID NO: 15513 - protein, 1158 aa, unidentified
  REGION 1..1158: note = Cas Enzyme sequence
MKQDLELAFDVGHSSIGWAVLQTAPQLEIKGCGAVIFRADDCLASARRGYRRQRRHIRSTRQRIKRMKALLAHLGVLTKDQLDKPGCAWPWKLAARVLVGGKTLTWSELWDVLRWYAHNRGYDANRRWSNVIPDSDAEEKELDRILTDETASEEDKKDAKKVKEAKRLMRELHTQTMAETFCKHLGIQPLGDKSSSMTRFKGLNAAFPRRTVEAEVARILKAHLGELKGVDDKFATALFSDWQVYVSESPSLYLSKEDHTKLRELRVPYKAKREEKKRLEDKRRQILDGKLALPPRYAGGLLFGQLVPRFDNRIISICPITGQKVPSRNTPEFLNFRWGMLLANVQVARLADRELKPLTVEERKELDGIMREEGAMTAKQFTDAAEKVTGAIRHNLATMLMHPDAKEALVLDPVQECLTTEKPTRVKTLFTALPTRIQKRARGQLRHGKSFTFAALYEASKEVGESVAAFDAAIQQLLDKAAGKGRKKDKPTTREDLLKRQLAVRKLSGRAAYSRPILQKAFAEVMTGKHPKEEGGCLFVTEQMRQAQLNRTLAEQTNNHLVRHRLLILERLQRDIIKEYAGGDKKRVGRMTIEVNRDLREMSGKTNYEKQADLNNRVKNHHDVAAKLEKALEGQKFNGKPISIGAWLIRKGRIAEDLGWTCPYTGQKYEPIDLLTRRVDKDHIVPRSQRMSDALEALVITFSAVNKWKSKRTALKFVEDEQGKPVPDAPNLSIVSLTRYRDFVESLESFKGHNDDQKRKKRRKELMKIRDYEEGEFTPRDLTQTSQLVRLGAQILKRAFVNEKEPPPIVSMPGSVTGAVRRGLNLLGCLSEACPQVLDESGEVKTKTEIRGITHLHHALDACVLGLTAHFIPNNGSVWELIVKRNLSDVEKEQLRAATHGIFNYTSEGFRVADLSHPLKQQLRQRLTEKRVVQHIPVRMDGLRVEQNTWGVVSKNVDGTVLVRQRIRHADGSRKKKEVPEKSVKLLGLAPSNGIGKLAANNGVLVIPDNYGVAILDHAKDKNDRFVIIPWHLVHKRIFKGIDGEKSLIDRNGGRMPRILRNGQIIRVGGGTYKDKGAWKITSIKNQKTGVKLNLGQPDTVNTEEEVLDVVTGKKTRKVRADCRHEASLASIVSGGLQILTLPLTGHPVQSTEAHGKA

SEQ ID NO: 15514 - protein, 1191 aa, unidentified
  REGION 1..1191: note = Cas Enzyme sequence
MSAKQNISSPHPDLHLAFDVGHSSIGWAVLQTPAAPSPEPAAELLGCGAVVFAPDDCLASTRRGFRRQRRHIRATRQRIARMRRLLAHLGVLTPAQLAAPGGAWPWLLAARVLVCAAPLTWPELWDVLRWYAHNRGYDANRAWSRQEKPDTEDSEKAQRAHELLREFKRRHGRPGTMAEVFCDHLLLREFERRHGRPGTLAEVVCDHLGVDPRGPVKSSRQRVRHLGAAFPREGVEAEVERILQAHKGILPGVDDPLIHALLRDHTARPVPGPRLPARYGQRQPDGTLRPGGLLFGQLLPRFDNRIIARCPIAYERVYQQVLAETGDREKARREAEKRAKVPAAHDADFHRFRWAMVLAQINIAVPGAPQPRNLSAPERNSLHAVMEQKGGLTKSELTQAVRQLTGGAPDNLDRLLALPDAERALVLDPVRLYCHRDPLLSVLWPALPARLQRRLRGQWRRGRALTVADVLAACGDARPAAEAALAQYLEAEAAKKKRAPDPPRIPDAPAGRVLRVERARGRAPHTREIMREAVAFVLATDRHPAEEGGPLYRSDAIREAQLRRALDEQTNNHLIRHRLKLLAGDDAAGPRALNGLFRDLANTYAGGDLGRLGRITIEVNRDLRELSGKTAQEQAQLIGQQLANFKSVEKKLTEAYADLGVRVGPGLIRKGRIAEDLGWTCPYTGQPYDALDLLHRRVDKDHIIPRSDRASDSLDSLVITFAEVNKWKGQRTALRFIEEEQGEPVPGLPQLSLRTLAAYRQAVEKLECSKGHENDQRRKRNRKRRLLLRHYVEKDFTPADLTQTSQLVRLCAQALQRLGLGCARPPVVTALPGAVTAAVRKAWNLTGCLAPANPLALNPDDLDDHGQPRPHNKTELRKITHLHHALDACVLALAAHHLPRDGEAWRLLLKRRLAPDEQRRARQLLGRVAAITPQGELRLNDLPPALKEQVSRRLRERRVVQHIPADLSGLRCEETVWRVFDPADPHPNARRLARWLANENIPIPAPDAPTVLIISRKRNGADAAPAAGKVFHQTPTWRWVYKTKDKTALLGLAPEGDPAAAKLKRLKAVKVLGDNFGLALDPEPALIRPHKIWHQLAALRARNGGKPPRVLRIGSLIRVNQKTGRSDYRGTWRVRGVHLNQRAGYLVNLSPPDQIRYVGQDGCFQNVSVATLLKCGLEILKTPLSGVAAPP

SEQ ID NO: 15515 - protein, 1406 aa, unidentified
  REGION 1..1406: note = Cas Enzyme sequence
MKRDLELAFDVGHSSIGWAVLQTNPEVEIKGCGALIFGPDDCLASVRRQKRQMRRHVRATKKRIELLERTLLLMGAFKSKEQVAAKHQTPKAVDGKWDRSTGGHPAPWLLAARVLESEGAPEFLLEWPELFDVLRWYAHNRGYDSRPPWITGFDSDLDLASTNLDGDEKKDAGDGETESEQEETTRRLKQGVALMKEAPQTETMAETVCKILYAELFPKDQPKTPECLNEIILNPKLSEHYHKMARYKGEKAAAFPRANVIAEVQRILVYHRDRKKLRGCDDGFIKALIHDWRVLPDEWKAKCGEKDKTKIWLPRRYGVDIPGKGRRYGGILFGQQIPRFHNRIISRCPITYATVLRQQLSSGEPYPKAENTARIAAKVPAKMCKEFLQYRWTVGFLANVRVGNAKGELFRVLSKKERQFINAQMQQQGFLDKKQLEDLVKEGAHCSFSNVADVFEVTPESEEALCVDPAKKYVATNELARAFWPVIGPLQKRVLGQLRRGRRITLRFIRQQLASPRYGASTQQFDVALQNHADFLYRKALEKAKEKNRRKKTVEKALTVDQLLSMSLAANYPSGRGPYHRKILQEATKQVLDGLDPRKKKLTPQLPPDQAARAEKKEIDGILVETDDMVRLRLGLQLDGISDEQIYEAWKERWLKRRDRRGKYHNRQLYQERGDVFAHDVWKAGESERWLAAQTNNHMVRHRLLMLERLTQDILSDYPDFIVTRVSLEVARDLLAFSGVTKKQLGSDDKGVMGSIKAQHYRVKECLEKMLGDTKYANDITGALIWKAKVADDLGWRCPYTGEQITPIGLVEGIFDVDHIIPKSTRLTDAMEAVVITYKEINARKGARTSWQFVHDEQGKYLLGQHNKPIRKLEDYEKFVKALRTHRSRSAGKDDGEGDNIGSIEINPMYLPGTKKKHPDYIRRKKRKSYLKVKSCDKDRSSFTSRDLTVTSHINRLAQQALRRILPKLGPEGFVSIPGVVTAAFRDARGWRLMDCLRHERVCGDAVTEKRKFRDKETDEVTEKEVLVLKNKLRDITNLHHAVDACALALIGSLIPKNGALWELIALGELTIEEKKNYESLREQFRRGRLANGEIVRQIDLDDLLDLSEIQPGSKKRYADPDRKWRLMPRETYEARRRMNAIKDSMIAELAKKNVVHHIPKDRSGLSVKETTWRVVRDLRDRETLMKILRRVCAWRDEKNVDRMANEFLNRVKSVTLKPDEIWIMRYIRRDTTPKPKKPTKCVAENEKFFIAYDIVSKDKLHGLTPDGDITKAKLVKQSGAFLLEENFAAALLRYATDPKDRVQVIRWRKINKEIARLWWLNQRKPLELIRKYSLVTLDGERRLVLGIDDAENGALFKLAEVDAVRRKDGPKNYRPVVIKAKSIDRIRLIQMSPTGRRCASRAVKT

SEQ ID NO: 15516 - protein, 1380 aa, unidentified
  REGION 1..1380: note = Cas Enzyme sequence
MSRILGLDMGTNSIGWAVRDTQAGTGLEQIIHKGSVIFDKGVGELKGKEFSLAAERTKHRSARRRSQRKRWRKIDLLSILIEHGMCPLSVDELARWKDPKRKATRKYPDSQEFKTWLRLDFDNNGVPDYANPYALRAEALIRRLSLQEIGRLAYHMNQRRGYLSNRSDKAQDAFDTEPDEEETSSRPVTSRRLGKIAGAIKELEDRLDGHTIGQKLHEAIKAGDRARRRTDEGTNISRLTLQAEFLKIAEFQLLPTQLTERIRRTIFDQRPLRSQKATVGHCVYEKDKSRCPISHPEYELYRMWQVLNNIKYSDDDRKTWHSLNPVERITIQKKFFRKSNPTFEFADIRKLFLRQHPHRIFNYNDAQTIAGCPTLAGLISIVGEERVWQMRKAALARLHWEAVEKRASPIAYPSKQLDLFDLWHWLFAMDNDKDQEIIRRKVQFSLGLTDREASQFVAIPLKPGYGNLSLKAIRKINHWLEQGERYDTAVFLANVPHLIGNSIWELTKTSLMSAVRQAIECIGQEKASIDIANRLISQYNNLPYHHRFAKIEGYTLDEDDHKDINTALIGYFGEARWQEFPESLQYNYYERLQNLYSNALKNIGNGDLPYIKPPRLDENIKHAIYRITGLDPASHLLDKLYHPSDIESFAPAVIEVDNSSGRPTGRKLLNTPATNSIRNPMAMRTLYELRRLINYLIRKDIIDEHTQVMVEMARELNDANRRKAIERFQNERKEENVRFEQELKKIFQEQGRTLPADLSAYVERYRLREEQPKRVCMYTGRTISDADLFDENTTDIEHTLPRSLTFDDRMENKSIAYKSYNNTVKNKLFPSQLPNYATDTPEFTAIEPRLLNWESLVAEFEAKTEMAKRRSRLAATKEAKDKAIQDRHYYAMHHRYWMSKLERFTLTQVTQGFKNSQLVDTQLISKYGVLYLKTVFFNVRATKGLITDKIKRIWGAQGIGENKDRSNHAHHTIDAIIQTLLYKERNKPDIYNLLAEAYKEAQEHRWKEPRLSNPWGLEPAAFYNAMQRLAADTIVYHADRDNVLKQTKKKVRLKGKIEYRKNDDGSFLQDKQGEKIPFYQTGWGLRASLHKDTFYGAIKPPGKEVVQYRTSFQFRGSSVEDIRKNIPKIVDARLRKLAEEASATNIQKLGYFEIPPSEERKKRDAAAQPTKVFKVKIFADDLKNPIKLKRHAEATREHKAWYYVQTDGNYLVALYDNGREKDFELVNTFDLAGLAGERQGLYPLYKEKIFRGKTFRIPLSRRNGKDVVLRQGTKVLLYEESANEIYADPSPGNLTDRLFKVQGLSIQRIGGKYDYATIHLIHHLEAQPTSRLKVQDGEYKWGDGKKYRKMNHNQLRALIEGVDFHLTPVGTIIFINNVAD

SEQ ID NO: 15517 - protein, 1044 aa, unidentified
  REGION 1..1044: note = Cas Enzyme sequence
MNKEIVLGLDIGIGSIGWGLIDKQTGEIIDKGVRLFSEANPENNVDRRLFRSTRRSIRRKEFRLYRTRRVLLEMGLIDDIAFLPLDNPYEIRCKGLENKLRNDELATAILHLMKRNGFRYEIVDDKESSGVSRISDEYLCQHQLKILQAYGKVRGQENRYHFKLYEKEFKKLLEIQNIDSSFQERLLDIFTRRRHYAEGPGCKTSPSAYGRYLTINSEPINLIEKMRGNCSVFQDELRAPKVCPSAELFNFLSDINNITIHGNHIPVDKKIDIIETFILGKNKITIKQLENFLGESLANIDGLRVNASGEPLITEFKSLKKIKDAIKKADLSDYPINSIEDFFILDDIFEILTQEKTIEGREERLNKLSIPELSNEHLKCFAKIKETTGYHSLSLKALREINSEMLQTSKNAQQIIVTLRNNNEQFDQGLRLPKNTIMSPVVRKALNQTFLIVKAIIKKYGHLHSIILEMAREKNSGDLKKKISETQKRRVQEKEKVLTLLEGLNIQEIKGDLIEKILLYIEQDSKSIYSGKPMNLNEIINDPSAYEIDHIIPYSLSLDDSRSNKVLVYSHENQNKGRRTPFQVFQNKPADWWTWTEFEAFSRYQYIKNRSKLSKLLEKRDIESYDVQEEFISRNLNDTRYICKQALLTLKMYFSHHDIDTKVHVVNGLLTNRVRRIANLKKDRNFHCHHAIDALIIASFLKSKYLESGLNNELIDYDTGEIFTNNCDDDIFGPVVENVVKQLISLDQIDDFRFSYKVDAKANRSLFDSTLYGTRLEKNDLYVIKKYANIYDKPGEKLAENIRKNKDIENLLIYRNDKNTFVLLQKIVASYPNEKNPFSAYKNEHGDYVRKVSKKGKNAPAVISIRYVEDKANISLPLSNKYPKPVAGRGYPIKLQLSPYRMDLYLNEDDGKYRFLTIRYSDVRQKGNEYIINEAWYEKEKERYGIGSNFHFVNSFYRCDLIKRTFRDGTTKLDVFKVVNDQLSQRIEIDSFGQNIIDYSNGVPKKKQVRISIGRNVLIVQKYGTDILGNLYLIRNEPLKLRWQ

SEQ ID NO: 15518 - protein, 1461 aa, unidentified
  REGION 1..1461: note = Cas Enzyme sequence
MKYIKYILGLDIGSNSIGWALIQLDLLQKTKRIIAAGSRIIPMDQKVLSDFGKGITISPTAQRTSYRNARHCRERHLLRRERLHRVLHILGFLPTHYDKQIDFSKRYGKFVDNTEPKIAYNEGKFLFMDSFQEMLSDFKSHQPTLFYSKKNGEESKIPYDWTIYYLRKKALSQKISKEELAWIILNFNQKRGYYQLRGEEEVENPNKEVTYYSLMVTEVIAEAPNKKGEIWYSIQLENGWVYRRTSKIPLDDWKGKVRDFIVTTELEEDGSIKRDKEGKEKRSFRAPSEDDWNLLKKKTEQDINTSKKTVGTYIYDHLLQNPNEKIKGKLVRTIERKYYKEELKAILEKQIALQPELFTDQLFADSIRELYSKNEAQQRNLAARDFVHLFVEDIIFYQRPLRSQKSTIANCSLESRSYIDKDSNTRKGAPLKVCPKSNPYYQEFRVLQWLQNLKIYEIESDQEVTHQFIKTLENKQQLFDFLMAQKEIDCEELLKYFLSLTYPNAKEKALKSELKKWKDTYRWNYVYDIGEKSSKKYPMNETRYDLKRYLEKVANLPDDFLSSEVEYLLWHLIYSVTDKVSYEKGLKKFAQKHHLDEDSFVESFKKFKPYPSEYGSFSEKAIRKLLPLMRFGSYWDFNHIDKNTQKRIDDLITGVENEEIRTILREKAEKYQLEKETDFQDLPLWLAQYIVYNRHAEASSLEKWTSVNDLETYLNEFKQHSLRNPIVEQVVTETLRVVRDIWQQYGQGQANFFNEIHIELGRELKKTAKEREDLSKQNQKNEDTNLRIRALLAELGEDSTIENVRPYSLMQQELLKLYEEGVFSSSMEIEDDIEKIHKKATPSKAELQRYKLWLEQKYKSPYTGQIISLKRLFTEDYEIEHIIPQSRYYDDSLSNKVICESVVNKAPYKDRQLGLEFIKNQGGRIVKELSKENKTIKIFTEEQYRTFIKEHYSNNPAKTKKLLLEDIPEKMVARQMNDTRYISKYISEILSKIVREDERDEGVNSKNVILCTGNITSALKQDWGVNDVWNDLILPRFERMNSLTQSTLFTTYNERYQKYLPTVPMEYSKGFQKKRIDHRHHAMDAIIIACTTREHINYINNQHALEKGKDKKEKQEERDKVRERLCIKKYNNRSEGNYSWIFKKPWDTFTQDVRVALEGIVVSFKQNLRVINKATNYYEHWVEENDKLIKKMVKQEGTNWAIRKPLHKETVSGKITLEREKVSGGKILTATRKVIDSTFTEKVIEGITDTGIQKILLNYLKFKKSPEIAFSPEGLEELNKNIALYNDGKPHKPIYKVRIFEQGSKFPLGEAGNKSQKYVEAAKGTNLYFGVYQGKDKRSFATIPLNEVIERQKQGLPSVPEYNEKGDPLLFSLSPYDLVYVPIEGEIIEDIDFQHLSKEQKERIYKIVSFTKGRIYGIPNKVAVSIVNKMEYTQLNKIEFIKEKEVCIKLKVDRLGNICKA

SEQ ID NO: 15519 - protein, 1462 aa, unidentified
  REGION 1..1462: note = Cas Enzyme sequence
MKRILGLDLGSNSIGWGLIEQDFQQKEGKIIASGSRIIPMDQGILGDFEKGNTVSQTAERTFYRSTRKLRQRHLLRRERLHRVLHILGFLPPHYDKQINFSKRYGKFIGDIEPKIAYNEGKFLFMDSFQEMLSDFKSHQPTLFYTKKNGEESKIPYDWTIYYLRKKALSQKISKEELAWIILNFNQKRGYYQLRGEEEVENPNKEVTYYSLMVTEVTAEAPNKKGEIWYSIQLENGWVYRRTSKIPLDDWKGKVRDFIVTTELEEDGSIKRDKEGKEKRSFRAPSEDDWNLLKKKTEQDINTSKKTVGTYIYDHLLQNPNEKIKGKLVRTIERKYYKEELKAILEKQIALQPELFTDQLFVDSMRELYSKNEAQQRNLAARDFVHLFVEDIIFYQRPLRSQKSTIANCSLESRSYIDKDSHTRKEAPLKVCPKSNPYYQEFRVLQWLQNLKIYEIESDQEVTHQFIKTLEDKQQLFEFLMAQKEIDCEELLKYFLNQTYPNAKEKALKSELKKWKDTYRWNYVYDIGEKSSKKYPMNETRYDLKRYLEKVANLPDDFLSQEVEYLLWHLIYSVTDKVSYEKGLKKFAQKHHLDEDSFVESFKKFKPYPSEYGSFSEKAIRKLLPLMRFGSYWDFNHIDKNTQKRIDDLITGVENEEIRTILREKAEKYQLEKETDFQDLPLWLAQYIVYNRHAEASSLEKWTSVNDLETYLNKFKQHSLRNPIVEQVVTETLRVVRDIWQQYGQGQADFFNEIHIELGRELKKTAKEREDLSKQNQKNEDTNLRIRALLAELGEDSTIENVRPYSLMQQELLKLYEEGVFSSSMEIEDDIEKIHKKATPSKAELQRYKLWLEQKYKSPYTGQIISLKRLFTEDYEIEHIIPQSRYYDDSLSNKVICESVVNKAPYKDRQLGLEFIKNQGGRIVKELSKENKTIKIFTEEQYRTFIKEHYSNNPAKTKKLLLEDIPEKMVARQMNDTRYISKYISEILSKIVRSGERDEGVNSKNVILCTGNITSALKQDWGVNDVWNDLILPRFERMNSLTQSTLFTTYNERYKKYLPTVPMEYSKGFQKKRIDHRHHAMDAIIIACTTREHINYINNQHALEKGKDKKEKQEERDKVRERLCIKKYNNRSEGNYSWIFKKPWDTFTQEVRVALEGIVVSFKQNLRVINKATNYYEHWVEENDKLIKKMVKQEGTNWAIRKPLHKETVSGKITLEREKVSGGKILTATRKAIDSTFTEKIIEGITDTGIQKILLNYLKFKKNPEIAFSPEGLEELNKNIALYNDGKPHKPIYKVRIFEQGSKFPLGEAGNKSQKYVEAAKGTNLYFGVYQGKDKRSFATIPLNEVIERQKQGLPSVPEYNEKGDPLLFSLSPNDLVYVPIEGEIIEDIDFRNLSKEQKEKIYKTVSFTGNQCFFIREIVATSIVNKMEYSPLNKMERSITGIMIKEICIKLKVDRLGNISKA

SEQ ID NO: 15520 - protein, 1012 aa, unidentified
  REGION 1..1012: note = Cas Enzyme sequence
MRKLQYRLALDLGSTSLGWALVRLNSQKEACAIIKSGVRIFSDGRNPKDGSSLAVTRREARAMRRRRDRLLKRKARMMSTLVKHGFFPADEASRKLLERLDPFTLRAKGLDQALSPEEFARALFHINQRRGFKSNRKTDKKENDSGALKSAISQLRQAIQATQCRSVGEWLNQRHQAGLSVRARYRQHLVEREDGKTKAEMRYDLYIDRAMIEDEFDALWKKQAELNPQLFTEQARDELKDCLLHQRPLKPVKPGRCTLIPEEERAPLALPSQQRFRIYQEVNNLRLLREGLVDEPLTKTQRDLIVEALERNSKRTFTQLKKLIGFSGQFNLEDEKRTELKGNSTSAILSKKNLLGDAWFEMTEQAQDELVEQLIHEENLATLMSWLQTQYGLDEATAEQLANTNLPEGYGSLSAKALTQIIPALRAEVITYDKAVKAAGFEHHSNISHASTGEILPVLPYYGEYLQRHVGFGTGKPEDPPEKRYGKIANPTVHIGLNQVRTVVNAIIKRYGHPSEVIVELARDLKQSQEQRKEDQERQAKNQKRNERMREDISKLLNISPDRVKPADLQKMILWEELSFNAADRRCPYSGVQISAHMLFSEQVEIEHILPFSETLDDSLSNKTVAMRQANRIKGNRTPWQAKDDFAKQGWETADMLARAELMPKNKRYRFGETGYEQWLRDDKGFLARALNDTRHLSRVAKEYLSLVCPQNTRAIPGQMTAMLRAKFGLNNILGLNGEKNRNDHRHHAVDACVIGVTDQAMLQRFSKASARTREQQLGKLVESMPMPWPTYREHVQRAIANIWVSHKPDHGYEGAMHNDTAYGLLANGQVSVHKIVDGVRVLETTALKVIPFSRAQAASRHGVLPDGSPRPYKGYKGDSNYCIEIVKNEKGKWEGEVVSTFVAYQIARRFGRQRLTHKTLSTSGKPLVMRLIVNDTVAFFVDDTKKLFRLAQLASAGTLTFAECHEANVDKRARSKELAYVFKTAGSLQKAKARLVTVSPIGELKDIGFME

SEQ ID NO: 15521 - protein, 1003 aa, unidentified
  REGION 1..1003: note = Cas Enzyme sequence
MYVKGENIMRYRLGLDMGTSSIGWAVVEMNDLNEPEKTIAMGVRKFNSGREDKTQAPLAQKRRQKRSMRRQRARFLRRQQRLLHQLGKLSLMPEAAKERRMVADCTHPSFATLGANLNPYELRALALEKPLPPFALGRVLFALNQRRGFKSNRGENTEPNSKAFEEGIGKLEQAIADGGFATLGAYFAHRQRLNQYILDARGQNEAVEREGVQTTRKMYEDEFDAIRKAQQVHHKLSDKDWNELKDTIFNQRSLKEVERGKCQFYGPQGLDGVFRAYAADPLAQKLRAWQDINNLKVSLPENDGKPRFLNDEERQILWQLLQAHKTIGFSTIRTKLKLPADVTFNLSSAKSGDKLLGLQTDIDMADPKRFGTQWHSLSPEEQTAVIELLQGTKDEEEVIHTLVEIYGLSEEAAETTSNMKLEAGTARFCPKILAELASQLASIRTDPQTNRYISLTEALADMGGTYLPPDQLVEHLGYYAAMMPEVGMHQKFRTVPEERKFGVIGNPTVHIALNQLRHLVNAITDQYGKPASIAIELARDLKQNAEQKRESEARRKKNEADRKAMQEECKKAGVNFNPDSREDWIKYRLWKELDKDPLNRKCVYTGKTISLNQLFSNDIHIEHILPRSRTLDDSIANLTLAFRDANKMKGNQTPFEYYKDKPEDYEAVLQRAKNLKGKYWRFTAEAMSRLDNEERWLSSMLNDTRYMSKLARRYLSYICDDIQVSPGKLTAKARHQWFGRALEKNREEDHRHHAVDALTVALLTRGAVQKAQIEAGKGEDLKGHAYEKLDLPCPMDKEELRKQALALLGNMVVSHRMDHGIQGALHKETSLAYTKKGVQKFMEDQEHATMLVPIKHRQGDTEHINYYEHGGVHHIDFWEVPQTTDKETGKTKKAHVVGVPVYAHEANPPKGKAKKQTRPHPASTFIMRLHKGDAVALDKDNQNNQIVIVRQINPSKGNENLVYDPVNQPADTLYTLGFSSLLKYNTRKAYVDILGNVKVGRRN

SEQ ID NO: 15522 - protein, 1014 aa, unidentified
  REGION 1..1014: note = Cas Enzyme sequence
LALDLGSTSLGWAVLRLNAEHKPTAIIKAGVRIFGDGRNPKDGSSLAVTRRNARAMRRRRDRLLKRKHRMMDLLIRHGFFPSDDSQRKALEQLNPYELRAKGLSEALTPAEFARALFHINQRRGFRSNRKTDKNDNDSSALKTAISALRQQLDADGMDGKARTVGELLWRRMQAGEGVRARYRERRMEAEGGKSRIDKSYDLYIDRAMIESEFDLLWAKQTVFAPAAFIETARAELKDCLLHQRPLRPVRPGRCTLEPGEERAPLALPSQQRFRIYQEVNNLRVLREDLHDEPLTFAQRNLLVDALEHNGKRTFTQIKKLLKLPGTTQFNLEDAKRLELKGNSTSALLSKSNFFGPIWFDLNLEQQDDIVMHLLTEENESGLIAWLQLEFGLSEAQSEAIANARLADGYGSLSAKALARILPTLQAEVVTYAEATSRAGYHHSHISHAAMTGEVLPELPYYGEYLQRHVGFGSNNAEDPPEKRYGKIANPTVHIGLNQVRVVVNALIKRYGHPCEVIVEVARDLKQSREQRLEEQKRQAENQKRNERLRVLAAGILECPPERVRHADIQKLVLWEELSSDVADRCCPYSGVQISARMVLSDEVEVEHILPFSQTLDDSLNNKTLAIRRANRIKGNRTPFQARLDFEREGWSYEFILQRVARMFSKDKKRFYRFGPEGYEKWLREDKDFLARALNDTRYLSRVAREYLSLVCPQGTRVIPGQMTAKLRRQFRLNNILGVGDEKNRNDHRHHAVDACVIAITDQGVLQKFAQASASAREKALDRLVDDMPLPWPTYRCHVKRAINNIWVSHKPDHGYEGAMMEATSYGIRKDGSIRQKTRADGSEGREIKNLIRICEPSQVSRHGVDADGRPLPYIGYVGGSNFCIEIVRNEKGRWEGEVISTFDAYQVVRQNGVKQLHHPALSISGKPLVMRLVIDDIVRMEIEGREQTMRMVKVAGSGQIWFAPINEANVDARNREKADPFSYTSKMAGSLQVAKARRVTVSPIGELRDPGFKE

SEQ ID NO: 15523 - protein, 1038 aa, unidentified
  REGION 1..1038: note = Cas Enzyme sequence
MKEKTGNQPYILGLDIGTSSLGWSAIAVDSRGNPSGIVACGARIFPAGVEGIEFGKDVSPNLDRRTQRQVRRQLMRKARRRRKIFGVLMRNGLLPKLSKVTPEGIDSTLKKLDQQLAPKWTKLGAAESYLALPYSLRSSAANGPIEAFELGRALYHLLHRRGFLSNRKSVRKDDEDMGQVYEGIETLKGAMISAKCKTLGSYFASIASHEVRLRSRWTSRQMFLDEFAIIQSANPQVPLAVWQELHKAAFFQRKLKSQAHLIGKCSLIPDRRRSPLWHPEYQRFRILSAVNALRILDDSIAEGSRPLSEIERATLTLTLKEQKSITAGAVRRLLKLPKSSELSIEEAGSGDMIGDRTSSSMRKAFGDRWEQLTYPQQLEALADINSFEKEDALRRRGKMHWKLSTEQANEFADITLEPGYGSISVAAVGRLLPHLERGLSYAEARQLEFPEQFAASEELKLLPPIATFKDAIRNPAVARSLSELRLVVNGVIRQYGKPSLIRVELARDLKKPKKQREQIAKDNRKREKDRESHAAEIVAQTSLKQPTRNDIERVALFHECGGVCPYTGRQISWSDLFGEHPQVDIEHIVPFSRSCDNSFANKTLCFLEENRNRKKNQTPFEAYGASAKWAGITHRVKRFHGTAAKAKLARFLNESSAEEMAEQFSTRQLNDTRYASVLAKQYLSQLYGGLSDDTGKLRVQATAGQTTAFLRRELRLNLLLQDKNEKNRSDHRHHTIDATVIALTSLRQIKALSDAALRATGAKGQRLFAPIVEPWGKFFDDIQNAVNDMVVSHRVRRGLSGTLHEATNYRAPMETDSKSSFVRKALSSLTKSEVDGIVDPTLRNLIAKAVGNGDPKKVFQELTSLPTVTGSDGIIRRIRRVRVKANRPAIAIGSEPNRRFVAAGGNHHMAIYCETTKSGLKWKHKVVTRFEAMQRKRAGLAVIDRSPADGSAFVWSLSPGECFAIPSPTDGVDIYVVRGCTAAKGVEVLLAADGRKSDEIRDASLGNKRTTFSADSLRKLKAYKVVVSPIGKVFGAGD

SEQ ID NO: 15524 - protein, 1209 aa, unidentified
  REGION 1..1209: note = Cas Enzyme sequence
MVMPQDKPLVLAFDMGKASLGLCVRDDDELLALESVDIPVEHAMTTELRSRTHMTRTRDCHTQRENWFMEALWLKAGLPDFREDAVWDELVKPTLAPSYTGDVKLRTREFPKGGDETNFNSPLLRIALLEGEDLAPWQVWKALWSAIQKRGFHYYDWKSVPADFESVDANIGELLAKKQELTDKLDEIETAKKLTKNKDEKAELTEEIKALKEEVKAWNAEYGEVIEQMTHYKKNLLERVYLDEYTYPCYMEAARLGLWEVNPITNRGQIFSFKQGNQPQALAQNERLVPRAYRIKELKSLWSQAQRLLTQLQAFEVDYLLFGEAKAPYATVWQRTLKAHRGKGPNYLFRRRGDARLPIAVDEPNRFIDTQGVLGQKVPRFDNRIIAKCQLMPTRNVCNAKDPLASKVGLMLQLKNTRFIDSDGVVRQAGLTPAEFNTLIEAVHPLLNDKGEVTYTKFVKALEDTLKAHGTGLSHLQHPALKENIKVNISGRSRFCRPALKVIHYTLTHGDAFPNIDPLTVTYEGKAVVNASHPQGVTAEEVVKTLKRLGTSWESFSVGDDRDDTFALGQALQTNEARRHAVMKLLGRSNNPIVRNRMLIFYNKLVKLEANLTAKGYNVRQDAKVIIEFIRGADSGFDGKKKGDEWTKHINANEKENEELLKELRENGLPDAYRLRLKLFKQQRGQCAYTLDTEKAKLSITDLGSYEIDHIYPFSLAFSSDAVWNKVLVRREANQDKAKQTPYQWLHGQKGEAVWQQFIAKVEAMYAKDDKSTTKKKALLTSPNPEKQMEKYTGLAETATMARLAQQVLGLHFAWPLQVEGQDRRIFVSDGAWTSRIRSRYDLGRLLLDNEKECALDNAIAKQRENYQRRREAIRFNDTATVQAMETTIKEQADILKKLHKDRTNSKHHALDAFCISFSQDVRPSKDERGRPKLKPSGEQEWTLLNEDSFLTFKQALPAYMEALFPQPYCRNKSKLALEETIYGYRKALRSMVVRKPLFDLLKDADDKKIKNLSLVDKAIEEDLKAHHKTIATKKEWNEFLETYPHPTRGNRVKAVKIIPMAEVDFMGYGTGNRSRFGELQDMGNGQTKGQYKKAAAHNGQIVYQDKQGKWNVFTVPAFMSELEARATLASRGIKTLFSNGDLLYPSLTVRVKQMFLGPKGIMMKAGLYTWKTMNHLGYCIIEDANGFSPSGIAIAKLISVGLEIVKTP

SEQ ID NO: 15525 - protein, 1071 aa, unidentified
  REGION 1..1071: note = Cas Enzyme sequence
VWKALWSAIQKRGFHYYDWKSVPADFESVDANIGELLAKKQELTDKLDEIETAKKLTKNKDEKAELTEEIKALKEEVKAWNAEYGEVIEQMTHYKKNLLERVYLDEYTYPCYMEAARLGLWEVNPITNRGQIFSFKQGNQPQALAQNERLVPRAYRIKELKSLWSQAQRLLTQLQAFEVDYLLFGEAKAPYATVWQRTLKAHRGKGPNYLFRRRGDARLPIAVDEPNRFIDTQGVLGQKVPRFDNRIIAKCQLMPTRNVCNAKDPLASKVGLMLQLKNTRFIDSDGVVRQAGLTPAEFNTLIEAVHPLLNDKGEVTYTKFVKALEDTLKAHGTGLSHLQHPALKENIKVNISGRSRFCRPALKVIHYTLTHGDAFPNIDPLTVTYEGKAVVNASHPQGVTAEEVVKTLKRLGTSWESFSVGDDRDDTFALGQALQTNEARRHAVMKLLGRSNNPIVRNRMLIFYNKLVKLEANLTAKGYNVRQDAKVIIEFIRGADSGFDGKKKGDEWTKHINANEKENEELLKELRENGLPDAYRLRLKLFKQQRGQCAYTLDTEKAKLSITDLGSYEIDHIYPFSLAFSSDAVWNKVLVRREANQDKAKQTPYQWLHGQKGEAVWQQFIAKVEAMYAKDDKSTTKKKALLTSPNPEKQMEKYTGLAETATMARLAQQVLGLHFAWPLQVEGQDRRIFVSDGAWTSRIRSRYDLGRLLLDNEKECALDNAIAKQRENYQRRREAIRFNDTATVQAMETTIKEQADILKKLHKDRTNSKHHALDAFCISFSQDVRPSKDERGRPKLKPSGEQEWTLLNEDSFLTFKQALPAYMEALFPQPYCRNKSKLALEETIYGYRKALRSMVVRKPLFDLLKDADDKKIKNLSLVDKAIEEDLKAHHKTIATKKEWNEFLETYPHPTRGNRVKAVKIIPMAEVDFMGYGTGNRSRFGELQDMGNGQTKGQYKKAAAHNGQIVYQDKQGKWNVFTVPAFMSELEARATLASRGIKTLFSNGDLLYPSLTVRVKQMFLGPKGIMMKAGLYTWKTMNHLGYCIIEDANGFSPSGIAIAKLISVGLEIVKTP

SEQ ID NO: 15526 - protein, 1015 aa, unidentified
  REGION 1..1015: note = Cas Enzyme sequence
MAQMSYRIALDLGSTSLGWAMVRLNAQKETIAVIKAGVRIFSDGRNPKDGSSLAVSRREARAMRRRRDRLLKRKNRMMATLLRHGFFPQDEAARKALVNKNPFALRTKGLDHALQPEEFARALFHINQRRGFKSNRNTDKKENDSSALKTAIHQLRQAMQATGCRTVGEWLCTRHQQGLSVRARYRENRATKDDGKTKIEKSYDLYIDRAMIEAEFDALWAKQSELHPALFHEVARAELKDCLLHQRPLKPVKPGRCTLLPDEERAPLALPSQQRFRIYQEVNNLRLLRGGLNDEPLTLTQRDLLVQALDINPKRSFAQIQKLLGFSGQFNLQDEKRTELKGNSTSALMAKKDFFGTRWTSFDGARQDAIVMQLVTEENEARLIAWLQAETGVDEATAEAIANAPLPEGYGSLSAKALEKILPALRADVITYDKAVRAAGFDSHSHISHAATGEILPELPYYGQYLQRHVGFGTGKPEDPAEKRYGKIANPTVHIGLNQVRTVVNALIKRYGHPSEVIVELARDLKQSQDQRKEEQKRQADNQRRNERMRTVIADLLTTSPERVRTIDLQKMILWEELSFNVADRRCPYSGVQISAQMLFSDQVEIEHILPFSQTLDDSLNNKTVAMRQANRIKGNRTPAEAAADFAAQGWPLEDMLHRASLMPKGKRYRFAQDGMAQWLREDKGFLARALNDTRHLSRVAREYLSLICPQDTRVIPGRMTAMLRAKFGLNDILGLNGEKNRNDHRHHAVDACIIAVTDQSMLQKFAKASASAREKQLNKLVETMPLPWPTYRDHVQRAVERIWVSHKPDHGHEGAMHNDTAYGLLGGGKVQVRKTLDGVRTRENTALKVIEFADRQGHPRHGLLPNGQPRPYKGYKGDSNYCMEIVRNEKGKWEGEVVSTFEAYQLVRQHGLARLRHPMLSGSGKSLVMRLMIGDILALSAPDNPKMIARITKISGNGQIFMAAHNEANVDARNRDKSEPFGYVSKMAGSLQTANGRHASISPIGQLLDPGFTN

SEQ ID NO: 15527 - protein, 1011 aa, unidentified
  REGION 1..1011: note = Cas Enzyme sequence
MRYRLALDLGSTSLGWAMVRLNLQDEPCAVIKAGVRIFSDGRNPKDGSSLAVSRREARAMRRRRDRLLKRKNRMIATLLRHGFFPQDEAARKALEKTDPFALRAKGLDQALLPEEFARALFHINQRRGFKSNRKTDKKENDSGALKTAIGQLRQALQATGCRTVGEWLFARHQQGLSVRARYRENRIAQDNGKTKIEKSYDLYIDRAMIEAEFDALWAKQCELNPALFHDTARDELKDCLLHQRPLKPVKPGRCTLMPDEERAPLALPSQQRFRIYQEVNNLRLLREGLSEEPLTLTQRDQLVHALETNSKRSFIQIQKLLGFSGQFNLQDEKRTELKGNSTSAMLAKKEFFGSQWVSFDEVRQDAIVMQLVAEENEARLIAWLQTETGVDEMTAERIANVPLAEGYGSLSAKALETILPALRAEVITYDKAVLAAGFDHHSHISHAATGEILPELPYYGQYLQRHVGFGSGKPEDPAEKRYGKIANPTVHIGLNQVRTVVNALIKRYGHPSEVIVELARDLKQSQDQRKDEQKRQADNQRRNERMRDDIAKLLHTSPERVRAIDLQKMILWEELSFNVADRRCPYSGVQISAQMLFSEQVEIEHILPFSKTLDDSLNNKTVAMRQANRIKGNRTPAEAAADFATQGWHIEDLLQRASLMPKGKRYRFAPDGLEQWLREDKGFLARALNDTRHLSRVAREYLSLVCPQDTRVIPGRMTAMLRAKFGLNDILGLDGEKNRNDHRHHAVDACVIAVTDQGMLNRFAQASASAREKQLNRLVETMPLPWDSYRDHVKRAIDHIWVSHKPDHGHEGAMHNDTAYGLLGGGKVQVRKTLDGVRTREVAALKVIEFADAQATARHGFLPNGEPRPYKGYKGDSNYCMEIVRNEKGKWEGEVVSTFEAYQLVRQHGLARLRHPVLSVSGRPLVMRLMKDDCVRLTVDGVTDLYRVCWIRTDTRLAFAKINEANVDARDRDKSSNFSYLVKSASVLKTMAAQGIVISPIGLVTDRSAKS

SEQ ID NO: 15528 - protein, 1014 aa, unidentified
  REGION 1..1014: note = Cas Enzyme sequence
MSKMRYRLALDLGSTSLGWAMVRLDTQNETNAIIKAGVRIFGDGRNPKDGSSLAVRRREARAMRRRRDRLLKRKNRMMATLLRHGFFPQDEAARKALEKTDPFALRAKGLDQALLPEEFARALFHINQRRGFKSNRKTDKKETDSGALKAAIGQLRQAMQATGCRTVGEWLFARHQQGLSVRARYRETPITQDNGKTKIEKSYDLYIDRAMIEAEFDALWAKQSELNPSLFHVTARDELKDCLLHQRPLKPVKPGRCTLLPDEERAPLALPSQQRFRIYQEVNNLRLLREGLSEEPLTLTQRDQLANALETNSKRSFIQIQKLFGFSGQFNLQDEKRTELKGNSTSAMLSKKDFFGSQWSSFDEAQQDAIVMQLVSEENEARLIAWLQAETGVDEITAERIANVPLAEGYGSLSAKALNKILPGLRAEVITYDKAVLAAGFDHHSHISHATTGEILPELPYYGQYLQRHVGFGTGKPEDTDEKRYGKIANPTVHIGLNQVRTVVNALIKRYGHPSEVIVELARDLKQSQVQRQEEQKRQANNQRRNERMRTVIADLLNTSPERVRAIDLQKMILWEELSFNVADRRCPYSGVQISAQMLFSEQVEIEHILPFSQTLDDSLNNKTVAMRQANRIKGNRTPAEAAADFEGQGWPIGDMLHRASLMPKGKRYRFASDGMAQWLREDKGFLARALNDTRHLSRVAREYLSLICPQATRVIPGRMTAMLRAKFGLNDILGLNGEKNRDDHRHHAVDACVIAVTDQGLLNRFAQASASAREKQLNKLVETMPLPWESYREHVQRAIDNIWVSHKPDHGYEGAMHNDTAYGLLGGGKVQVRKTLDGVRTREIAALKVIEFADAHATARHGLLPNGEPRPYKGYKGDSNYCMEIVRNDKGKWEGEVVSTFEAYQLVRQHGLARLRHPILSLSGKPLVMRLMIGDYLRFQSEDQLIVMRIASINSAGRLSLASHQEANVDARNRDKEGSWRYTYKQAGSLERLQGRQVTITPIGELRDPGFGN

SEQ ID NO: 15529 - protein, 975 aa, unidentified
  REGION 1..975: note = Cas Enzyme sequence
RRRDRLLKRKNRMMALLVQEGFFPADSDARKVLERINPYELRAKGLDTQLSPAEFARALFHINQRRGFKSNRKTDKRDNDSGALKTAISALRQQLDPAGASGKARTVGELLWRRMQTGTGVRARYREMRVEKDDGKTRIDKSYDLYVDRAMVEAEFDALWEKQTSFDPQQFNEAARATLKDCLLHQRPLKPVKPGRCTLLPDQERAPLALPSQQRFRIYQEVNHLRILGADLQDSDLTLAQRNAVVDALERHGKRSFTQIKTLLKLAGTTQFNLEDNKRLELKGNATSALLSKKDFFGPAWFDLDPARQDAIVMRLLTEESEQALIAWLQAEFDLDEHRADTIANASLAEGYGSLSAQALARILPQLKADVITYDKAVRAAGFEHHSHISHAATTGEILPALPYYGEYLQRHVGFGTGNPEDPAEKRFGKIANPTVHIGLNQVRTVVNALIRRYGHPSEVIVEVARELKQNQEQRKEQQQQQAQNQKRNERLRADAAGILGIAAERVRQADIQKLILWEELSRDPAERRCPYSGVQISAAMVLSDEVEIEHILPFSQTLDDSLNNKTVATRRANRVKGNRTPFDARADFEREGWIYDAILARAELMPRNKRYRFGVDGYQKWLREDKDFLARALNDTRHLSRVAREYLSLICPQATRVIPGQMTAMLRGRFGLNDILGLDGEKNRNDHRHHAIDACVIAVTDHGLLQRFAQASASARERQLNRLVDDMPLPWPTYREHVVRAIHNIWVSHKPDHDHQDEMFDQTIYNAQGFSRSAAKTRSVIPFHARAGSAAMQRHTDKNGQPKPYKGLLSNSNYCIEIVRSEAAWEGAVIPTYQAYAFVRDYIKRNPGCSDADATRSLRSPSKSLSGQPLVMRLSIDDAIRAEVDGSLETLKVLKINSSGSVTFVRVNETNIPARYVAKLAAQKLASEGKPHDKAALNDNFFQKAVSAGSLRAMKARRITISPIGELRDPGFTE

SEQ ID NO: 15530 - protein, 1011 aa, unidentified
  REGION 1..1011: note = Cas Enzyme sequence
MNKMRYRLALDLGSTSLGWAMVRLNAENQPCAIIKSGVRIFSDGRNPKDGSSLAVTRREARAMRRRRDRLLKRKDRMMKTLIAHGFFPQDKEDRKLLERSDPFALRAKGLDQALRPDEFARALFHINQRRGFKSNRKTDKKENDSGALKTAISQLRQAMQATQCRTVGEWLNMRHQSGLSVRARYRQHMVQREDGKTKTEMRYDLYIDRAMIEGEFDALWQKQSELNPKLFNETARAELKDCLLHQRLLKPVKPGRCTLMPEEERAPLALPSQQRFRIYQEVNNLRLLKEGLNEQALTLDQRNQIVQALEGNTKRTFTQIKKLIGFSGDFNLEDEKRSELKGNSTSAMLSKKDLFGPAWFDLSEDQQDSIVMQLVKEENEASLVRWLQENTGIDEATAERVANTNLAEGYGSLCAKALQKILPALKAEVITYDKAVLAAGFDHHNNISHASTGEILPSLPYYGEYLQRHVGFGTGKPEDTPEKRYGKIANPTVHIGLNQIRTVVNALIKRYGHPSEVIIELARDLKQSQEQRKEEQQRQAANQKRNQRMREDIAALLHISADRVKTADLQKMILWEELSFNIADRRCPYSGVQISAQMLFSDQVEIEHILPFSVTLDDSLSNKTVAMRQANRIKGNRTPWQAKDDFVKQGWATEDMLTRAELMPRNKRYRFSETGYAQWLRDDKGFLARALNDTRHLSRVAKEYMSLICPQDTRAVPGQLTAMLRGKFGLNNILGLDGEKNRNDHRHHAVDACVIAVTDQGMLQRFAQASASARQQQLGKLVDNMPMPWHTYREHVQRAIENIWVSHKPDHGHEGAMHNDTAYGLGANGKVRVHKMVEGVRTLEESSLKVIAFSEPKASTRHGVLPTGEAKPYKGYKGDSNYCIEIIQNEKGKWEGEVVSTFEAYQITRQHGSSRLRHPKLSISNKTLVMRLLKNDCVQLRINDTPLIYRVCWVRSDTRMALAEIHEANVDSRDRDKDSDFRYLVKSASTLQGLSAKVALVSPDGNLKVRN

SEQ ID NO: 15531 - protein, 932 aa, unidentified
  REGION 1..932: note = Cas Enzyme sequence
GFFPADEARRKALVTLNPNALRAKGLDEVLTPSEFARALFHINQRRGFKSNRKTDKNDNDSGALKQAISKLRSAMEDENCRTVGEWLHKRDVAGQTVRARYRQIKITKDDGKTKIDKSYDLYIDRAMIEAEFDALWAKQSALNSVIFNDLARDELRYCLLFQRQLKPVKPGRCTLMPDEERAPLALPSVQRFRMYQEVNNLRILRDGLLEEALLQQQRDQVIALLEKSRKVTFTKIRKMPGIGSHKFNLEDAKRTELNGNATSAELSKAAYFGEAWFSFDEAKQDAIVWQLVKEENIAKLVRWLQQETGVDEAHAEAIANAGLPEGYGSLCMKALDRILPELRRDVVTYDKAVIAAGFDHHSNSSPAATGEILPELPYYGIPLQRHVGFGSGKIEDSDEKRYGKIANPTVHIGLNQVRVVVNGLIKRYGHPSEVIVELARDLKQSKEQRDEDNKRQADNQRRNARLRADIASVLSISPERVRAADIQKMILWEELSDNVADRRCPYSGVQISAAMLLSEQVEIEHILPFSETLDDSLNNKTVSMRQANRIKGNRTPWQARDDFAAQGWDYDSIIERAKQIPNKAKRDRFAEDALQRWLRDDKSFLARALNDTRHLSKVAREYLSLICPQNTRVIPGRMTALLRAKFGLNDVLGLNGEKNRNDHRHHAVDACVIAVTDQGLLQQFAKASASAREQQLNRLVVDMPLPWPNYRDHVQRAISNIWVSHKPDHGHEGAMHNDTAYGLLGNGRVSVHKMMAGKRERVEDNLKVIEFSDAKANARHGLLPNGQPRPYKGYKGDSNYCIEIVRNDKGKWDGEVISTFEAYQLVRLHGLARLRHPSLSVSGKPLVMRLILDDAVRIEVDGKVQTMRVATLSGNGQVFMAAIHEGNVDARNRDRSDPFTYISKTAGSFQKSKARRATISPIGELHDPGFKG

SEQ ID NO: 15532 - protein, 985 aa, unidentified
  REGION 1..985: note = Cas Enzyme sequence
MGVRIFPDGRNPKDGTSLAVTRRNARAMRRRRDRLLKRKDRLLNALIRMGLFPQDEVQRKALVLLDPYSLRRKGLHELLTGPEFARALFHINQRRGFLSNRKTNKKDNDSGALKKAIKNLREKLNQENCQTLGEWLAKRHESRLSVRARLRGKTQKDKAYDFYADRAMVEHEFDALWAKQSALNPQLFTAVAGAELKEILLHQRPLKPVRPGRCTLLPDEERAPLALPSTQRFRIYQELNNLRLLTPDLREASLSLAQRDKIAKLLERQGEVRFTAMVKELKLPGTTRFNLEDIKRDRLKGNATAATLAKDINFGDAWFEFDPILQDDIVDMLLNEASESKLIEWLQANTSIDEATAERIANTGLPEGYGNLSREALSVVLPELIKDVVVYSEAVKRAGFDSHSVLSHSETTGEIMDELPYYGDPLRRHVAFAKENPRNDEERFGKIANPTVHIGLNELRKVVNAMIKRYGHPSEVVVEVARNLKMSRERKLEIQHEQKVKQDLNDKQVAEACSVLGLTQANLNRAKRRELSQKMQLWVELNAKNVADRQCPYTGEQISIQRLLSDEVEIEHILPYSMTLDDSLNNKTVAMRHANRDKGNQTPYDAFGKTPMPGYDYEAMLQRAARMPKEKAKRFAPDGYQRWLKEDKDFLARALNDTAHLSRIAKEYLSLICPYNKVRVIPGRMTALLRGKFGLNQLLSGTTEKNRNDHRHHALDAAVIGITDQGLLQRFAKASAHAREMQLDRLVEEMPLPWPTYREHVARGLEHIVISHKPDHGYQGAMHEETAWGLRGDGQVTRRVRPEDGGPRQREIRNKNVVAINSTNAPNRHGLDENDNAKAYKGYVGGSNYCIEIWRDEKGRWNGDVISTFQAYQTVRKLGETEGLKQLRSPSFSQSGQPLVMRLQKDDLVRMHLDDSVKAMRVVKIGGNGQIFFAAHNEANVDARNADREDSFVYISKVAGSLQKAKGRRITISEIGELRDPGFKG

SEQ ID NO: 15533 - protein, 1016 aa, unidentified
  REGION 1..1016: note = Cas Enzyme sequence
MAGMRYRLALDLGSTSLGWAMVRLGADNAPCAVIKAGARIFSDGRNPKDGSSLAVTRRDARAMRRRRDRLLKRKARMMRTLIAHGFFPKEADERKALETLDPYELRSRGLQSVLTGPEFARALFQINQRRGFKSNRKTDKKDNDSGALKTAINTLRAALKSDNCATVGQWLYQRHLAGHTVRARFRQNKVIKDDGKTRIDKSYDLYIDRAMIENEFDALWAKQTELNSTLFTDTARAELKDCLLHQRPLKPVKPGRCTLLPDEERAPLALPSTQRFRIYQEVNNLRILREGLKEEILTLAQRNELVQALEENSKRSFTQIKRLLGLSGSVQFNFEDPKRQELKGNTTSAILGGKANFGSAWFGFTEARQDAIVLQLVREENEAKLIAWLQTETGVDERRAEDIANQGLPEGYGSLSAMALSRILPELRRDVVTYDKAVLAAGFDHHSNISPAATGEILPELPYYGEPLQRHVGFGTGNPADTPEKRFGKIANPTVHIGLNQVRLVVNALIKRYGHPSEVIVEVARDLKQSQEQRKEENERQAKNQRRNERIRADVAGVLQISIERVKATDIQKVILWEELSFDPAFRRCPYSGVQISEAMLLSDQVEIEHILPFSETLDDSLNNKTVALRTANRVKGNRTPWQAFGAQSNAGFNYAEILQRAEQMPMQKRYRFAEDGYQRWLRDDKGFLARALNDTRYLSRVAREYVSLICPQNTRVIPGRMTAMLRAKFGLNDVLGTNGIKNRNDHRHHAVDACVIAVTDQGLLQRFAKASASAREQHLNRLVETMPDPWPTYRQHVQRAVNNIWVSHKPDHSHEGAMHNDTAYALLGNGRVSVHKIVDGVRTRVEDNLKVIEFSNAKMPERHGLLPNGEPRPYKGYKGDSNYCIEIIRNDKGKWDWEVVSTFDAYQLVRTEGFHRLRQSSISTSGKPLVMRLIIGDYLRATFKDEIRILTVKKIKSNGGIFVAQHNEANVRQREDEKDKSLIYGSFAASTLQKASGRYVTISPIGELNDPGFKE

SEQ ID NO: 15534 - protein, 1047 aa, unidentified
  REGION 1..1047: note = Cas Enzyme sequence
MRYRLALDLGSTSLGWAMIRLAASDEPCAVIKTGVRIFSDGRNPKDGSSLAVTRREARAMRRRRDRLLKRKNRMMRTLVAHGFFPQNLSESKTMETVNPYALRAKGLEQALTPMEFGRALFHINQRRGFKSNRKTDKKDSDSGALKTAIHRLREALKADNCATVGQWLHLRNTAGLSVRARYRQTKVPKGDGKTRTETSYDLYIDRAMIEDEFDALWARQASLNPALFTETARADLKDCLLHQRALKPVEPGRCTFLPDEKRAPLALPSTQRFRLYQEVNHLRILREGLQEEPLTLSQRDLLVDALEQNARRTFTQIKTLLGLGGAVQFNFEDPKRQELKGNATSALLSKKDHFGSAWFGFDEARQDAIALQLVREENQATLIRWLQDETGVDEQRAETIANASLPEGYGSLSASALVRILPELRRGVVTYDKAVLAAGFSHHSHLNQNTELPGLTCPLEAINAQTGEIKTFHVFNALPYYGEALQRHVGFGSGKLEDTPEKRFGKIANPTVHIGLNQVRRVVNALIERYGHPSEVIVELARDLKQSQEQRKEEHERQAKNQQRNKDLRADIAKVLRISPERVRTADIQKVILWEELNPGNAADRPCPYSGVQISVEMLLSDEVEIEHILPFSQTLDDSLNNKTVALRVTNRVKGNRTPWQAFGAQSTAGFDYAGMLERAAQMPLSKRYRFAPDGYERWLKDDKGFLARALNDTRHLSRVAREYVSLICPQGTRVIPGRMTAMLRAKFGLNDVLGLNGEKNRNDHRHHAVDACVIGVTDQGLLQRFAQASASSRERQLDRLVENMPLPWGTEHGREYFKSVKRAIDAIWVSHKPDHSHEGAMMEATAYGIAKDGSIKQKKNADGSEKAREIKNVIRISEPRQPLRHGVDKDGKPLPYIGYKGGSNHCIEIVRNEKGKWEGEVISTFEAYQVVRQHGAQRLRHPTESQSGKPLVMRLIRGDFVRLMDDAGQKRTLRLCMVNAAGQMAFIDTHEANVADRAVDKKLPDGTIRKKELAYLFKNAGPLRDIKARRVTISPIGELRDSGFRA

SEQ ID NO: 15535 - protein, 1012 aa, unidentified
  REGION 1..1012: note = Cas Enzyme sequence
MHYRLALDLGSTSLGWAMVRLNAENQPCAIIKAGVRIFSDGRNPKDGSSLAVTRREARAMRRRRDRLLKRKARMMKTLITHGFFPQDEEDRKLLERSDPFALRAKGLNQALRPDEFARALFHINQRRGFKSNRKTDKKENDSGALKTAISQLRQAMEATQCRTVGEWLNMRHQSGQSVRARYRQHMVQREEGKTKTEMRYDFYIDRAMIEDEFDALWQKQSELNPKLFTETARAELKDCLLHQRPLKPVKPGRCTLMPEEERAPLALPSQQRFRIYQEINNLRLLKEGLTEQALTLEQRNQIIQALEGNTKRTFTQIKKLIGFSGDFNLEDEKRSELKGNSTSAILSKKDLFGPAWFDLSKDQQDSIVMQLVKEENEATLVRWLQDNTAIDEATAERVANTNLAEGYGSLCVKALQKILPALKAEVITYDKAVLAAGFDHHSNISHSSTGEILPRLPYYGEYLQRHVGFGTGKPEDTPEKRYGKIANPTVHIGLNQIRTVVNALIKRYGHPSEVIIELARDLKQSQEQRKEEQQRQATNQKRNQRMREDIAALLHISADRVKTADLQKMILWEELSFNVADRRCPYSGVQISAQMLFSDQVEIEHILPFSETLDDSLSNKTVAMRQANRIKGNRTPWQAKDDFAKQSWATEDMLARAELMPKNKRYRFSETGYTQWLRDDKGFLARALNDTRHLSRVAKEYMSLICPQDTRAVPGQLTAMLRGKFGLNNILGLDGEKNRNDHRHHAVDACVIAVTDQGMLQRFAQASASARQQQLGKLVDNMPMPWPTYREHVQRAIENIWVSHKPDHGYEGAMHNDTAYGLCENGKVRVHKMVEGVRTLEESSLKVIAFSEPKASARHGVLPTGEAKPYKGYKGDSNYCIEIVRNEKGKWEGEVVSTFEAYQIVRQHGLSKLRHPTVSISNKQLVMRLLIDDIVKLNIPNNSKYVGRIATISGNGQIFMAPHNEANVDARNRNKEDSFSYISKYAGSLQKANGRRVTISPIGELKDPGFQD

SEQ ID NO: 15536 - protein, 1058 aa, unidentified
  REGION 1..1058: note = Cas Enzyme sequence
MQHKMRYRLGLDLGTTSIGWAMLRLNEHDEPCAVIKMGARIFSDGRDPKDGSSLAVTRRLARQMRRRRDRLLKRKARLQAALVRLGFWPAGTAERKALEGLDPYALRSQGLDRALTPAEFGRALFHLNQRRGFQSNRKTDRKDSESGLLKTAIRKLRETLVAEGARTVGEWLARRHAARQSVRARLRGKTVKDKAYDLYIDRAMVAEEFDRLWAAQARFNPAQFIDAPRQELRDILLHQRNLRPVRPGRCTLLPGEERAPLALPSVQRFRIHQELNHLRLVGPDLSESSLTLPERDQLAGLLEHGDLTFTKMRRALGLPGTSRFNLEDAKRDRLKGNLASKILGAADALGDRWHALTPQDQDDVVTRMLEEASASRLVEWLLSHLDIDEARAERLADMALPEGYGSLSRAALGRVLPELQRDVVTYAEAVQRAGFDSHSALSHSEQTGEVMDALPYYGQALQRHVGFADPRARDDDPPEKRFGRIANPTVHIGLNELRKVVNGLIARYGHPSEVIVEVARELKQSQARRKEENERQAERQKENERFADDIRGLAGLGGREPTRDDLQRMRLWVELNPQDAANRRCPYTGEAISMAMLFSADVEVDHILPFSMTLDDSLNNKVVALRRANRDKGNRPPAEAFGHSPAGYDYDAILQRAALMPRDKGRRFAPDGYQRWLREDKDFLARALTDTAYLSRIAREYLSLVCPANRVRVIPGRLTAMLRGKFGLNTVLSTAGVKNRDDHRHHAVDAAVVGVTDQGLLQRFARASAAAHERHLQRLVDEMPLPWPTYREHVARAAAAVVVSHKPDHGHEGALHNDTAYGLRPNGEVVHRVMLDNFKSGEDIARRTWADPHAVQHLQAQTSGLSGKAFAERLDQATAATGMRRMRMVEKLKVIPIASAPAADRHGRDDAGHPLPYKGYKGDSNHCIEIWRNDKGRWESTVISTFDAHGIARAHGVQRLRHPGLAQNGRPLVMRLVNGDTIRAEFRGQRRVLVVNKIKSAGTLFVSEHHEANIRSREDAKDPTLIYGSFSALSLHKAQGRRVGVSPIGELRDPGFNP

SEQ ID NO: 15537 - protein, 1060 aa, unidentified
  REGION 1..1060: note = Cas Enzyme sequence
GWAALELDDGSPTHPVGLIDSGVRIFSDGRNPKDGQSLAVSRRLPRQMRRRRDRYLKRRDEFMERLIAHGLMPTDASSRKALEALDPWILRARALDEKLSLHEIGRALFHLQQRRGFKSNRTADADDDDRGKVAEATARTIARMQEQGARTLGEWLGAPRRAALAANGATPKGGRAPLPAARARLRGEGASAAYEFYPTRDLIAAEFDAIWSAQREFHGEALGGDAYAALRDTLLFQRPLKPQPVGKCTLLPREPRAPRALPTVQRLRIYQEINHLEIQEPGQRARKLSLEERDQLVEKALATAQLKFDVARKLIGASEHARFNIERDARRAYLDGDKTAAALAARACWGQAWRELSLEDQDEVVERLLADADETALMAWLRAKHGLDEERAIAVSRALNRLPDGHGALGRTASRRILKSLMDGVLTYSAAVEASGFDLHSQFGDGGDVKRRLPYYGKLLERQVAFGSGDPDDPEEKRFGKVANPTVHVALNQLRRVYNAIVARYGAPSEIVVELARELPLSAVRKRELERQHKDNKDANDRRRALLAELGQLDSYENRMLLRLWEELNPADQLDRRCPYSGEPISIARLFSGEVEIDHILPFSRTLDDSAANKTVGLRSANRFKGRRSPFEAFGESPAPYDWSSIVERAASMPANKLWRFGPDAMERFENVERDFLARQLTDTSYLSRLAKAYLEHACGSVWVTPGQLTAQLRRALGLDSVLPGHNVEGDAPREKNRNDHRHHAVDAIVVALTDQALLRRAATLAARSEDEHRSKLLAGLEVPWPAFRDDVRDAVGRIVVSHKPEHGVEGALHNDTAYGLATPPDPDGRCEGVRRAPLAEIKSAKDLEKIRDPVLRDRLIETTSGLQGKDFAAALATAGEEMRPPVRRVRILETVSVVTVSDAKGRPYKAHKRDANYCFDVFADAAGRWRGGVVSMFDANQPGFDPEACARADGTPLVMRLRKGDVLALGSRGAPSYLRVVKFSKGGAVLADHAAAGALKARDADPDDPFRYVTAGASRLQRDHARLVTVDPSGRIFALDSTDRSEAELETASSASRRQ

SEQ ID NO: 15538 - protein, 1025 aa, unidentified
  REGION 1..1025: note = Cas Enzyme sequence
MQQKMRYRLGLDMGSTSIGWAMIRLDSSDRPCAVIRAGARIFSDGRNPKDGSSLAVTRRAARQMRRRRDRLLKRKQRMLEALIRWGFFPTDETARKALAQLDPYALRAKGLSAPLTGPEFARALFHLNQRRGFQSNRKTDKQDSESGALKKAISTLRIRLEDEQCQTLGQWLAKRHDQRLSVRARLRGKTQKDKAYDFYADRAMVAHEFDALWSAQAGFNPGLFTEAARNDLRDILLFQRPLKPVKPGRCTLLPDEERAPLALPSTQRFRILQELNNLRVLSTDLTELPPLSKEQRDTLSARMERKERLTFAEMVKTLRLPGTTKFNLQDAKRDALKGNSTSVQLSKKQHFGDRWHDFTLAQQDAIVLQLLNEPHEGKLIDWLKEHTGVAEEQAETIAQAGLPEGYGRLSIAALTRILPPLAGDVITYADATKLAGFESHSELGHAQTTGELMDELPYYGQYLQRHVAFAKDNPRNDEERYGKIANPTVHIALNELRKVINALIKRYGKPAEVIVEVARELKLGQQRKLEIQREQKERQDLNDKLVADACEILHLTPAHLDKAKRRELSQKMQLWRELNRDDITDRRCPYTGEQISIRRLLSPEVEIEHILPYSITLDDSLNNKTVALRRANRDKGNRTPYDAFGKQAQDGYDYEAILQRAAKMPREKAKRFAVDGHSRWLKEDKDFLARALNDTAYLSRVAKEYVSLLYPDANTHKVRVIPGRMTALLRGKFGLNQLLSGDSSKNRNDHRHHALDATVIAITDQALLQRFAQASASARERQLDRLVEEMPFPWPSFREHVARAMAGITISHRPDHGYQGAMHEETAWGLRDNGMVARLVRDEGATHRRTQQKKLTVIPINSTVDPARHGLHEDGTPIAYKGYVGGSNYCLEIWRDEAGKPAARVISTFDAYQVIRQHGAERGEHMLRAPRIALNGMPLVARLMINDMVSLEIEGQRKVMRMVNIYSSGQFFMCEHHEANVDARNSDKADAFAYLSKMPGSFLKAKGRVVTVSPIGDIRRHADKE

SEQ ID NO: 15539 - protein, 1023 aa, unidentified
  REGION 1..1023: note = Cas Enzyme sequence
MKYRLALDLGSTSLGWAMVLLKDLPSAERPVPCAVVRAGVRIFPDGRNPKDGSSLAVTRRNARAMRRRRDRLLKRKARMQRLLIEQGFFPADESARKMLETLNPYELRAKGLDAALTPAEFARALFHLNQRRGFRSNRRTDKKDNDSGALKAAISSLRAQLDPTGNDGKARTVGELLWRRMNDPAVRTVRARYREQRVLKDDSKTRVDKSYDLYVDRQMVADEFDALWAKQATLNPAQFPEAAGAALKDCLLHQRKLRPVKPGRCTLEPDEPRAPLALPSQQRFRILQEVNHLRLLGGRLLEAALSLAQRDKLVAALEEGSKSFKTAIPKLLGLPGTTQFNLADAKRTELKGNATSMLLGKKDFFGPAWHSFGETRQDEIVMRILEEESEVALVDWLVSSTGVDEAHATKIANASLPEGYGSLSAKALAKILPAMRAEVTTYDKAVQAAGYSHHSHISHAASTGEILPELPYYGEYLQRHVGFGTGELKDPPEKRFGRIANPTVHIGLNQVRVVVNALIKRYGRPSEVIVEVARDLKQSQEQRRETQEQQAKNQRRNERLRKVAAEIRGCSEERVRLTDIQKLILWEELSFDVADRRCPYSGVQIAAADVLTERVEIEHILPFSATLDDSLNNKTVALRQANRVKGNRTPWDAREDFAAQGWDYDGILTRAERMPRAKRQRFAADGYEKWLKEDKDFLARALNDTRHLSRVAREYLSLICPGGTRVIPGQMTAMLRAKFGLNDILGLDGEKNRNDHRHHAVDACVVAVTDQGLLQRFAQASADARGKGLDRLVETMPDPWPSYREHVRRAVNAIWVSHKPDHGYEGSMFKATAFGIRRDGSVVQKLNAEGESGRTNEYVVPIAEPAQLQRHGLDDKGQPRAYKGYVPDGNFCIEIVNNESGKWQGEVTATFEAYAVARKRGAAALYAPAMSLSGKPLVMRLMIDDLIRLEIDGRLRLMRIASINAAGRLSLADHNEANVDARNRDKNGDWRYTYKQAGSLKAAKGRRVTVSPSGELRDPGFKE

SEQ ID NO: 15540 - protein, 1036 aa, unidentified
  REGION 1..1036: note = Cas Enzyme sequence
VKYRLALDLGSTSLGWALVLLNRAAEPCAIVRAGVRIFPDGRNPKDGSSLAVTRRNARAMRRRRDRLLKRKARMQRLLIEHRFFPAEEPARKALERLNPYELRAKGLDASLTPAEFARALFHLNQRRGFKSNRRTDKKDNDSGALKAAIGSLRSQLDHAGAGGKARTVGELLWRRMMDPSVRTVRARYREQRVLREDGKPRVDKSYDLYVDRAMVEAEFDALWVKQATYNPGQFNEAARAALKDCLLHQRKLRPVKPGRCTLEPDEPRAPLALPSQQRFRILQEVNHLRLLGGRLLEEALSLEQRDALVAALEEGSKSFKKAIPKLLGLPGTVQFNLADAKRTELKGNATSMLLSKKDFFGPAWHAFGEERQDEIVLRIMEEESEANLLDWLVTSTGVDEAHAFKIANSALPEGYGSLSAKALAKILPAMRAEVVTYDKAVLAAGYGHHSNISHAATTGEIRPELPYYGEYLQRHVGFGTGEPNDPPEVRFGRIANPTVHIGLNQVRVVVNALIKRYGHPSEVIVEVARDLKQSQEQRRETQERQAESQKRNDRLRKDAAAILGIGEDRVRLADIHKLILWEELSFDVADRRCPYSGAQLSATEVLSERVEIEHILPFSMTLDDSLNNKTVALRQANRVKGNRTPWRARDDFAAQGWDYEAILLRAERMPRAKRQRFAPDGYEKWLKEDKNFLARALNDTRHLSRVAREYLSLVCPANTRVIPGQMTAMLRAKFGLNDILGLNGEKNRNDHRHHAVDACVVGVTDQGLLQRFAQASADARGKGLDRLVENMPEPWPSYREHVRRAVNAIWVSHKPDHGHEGAMMEATAYGIRRDGSIKQRRRPDGNEGREVKNVIRVGEPKQAERHGIDAAGKPLPYIGYLGGSNYCIEIVCNEKGRWSGEVVSTYDAYRRVASEERLLRNRGMQRHEINGFAARALRDPRVSMTKRPLVMRLMIGDTVLVEEDGGKRLLRVVKIDPSTNVVLAEVNEAGELKKRHVDERDKFRYVNLSGGAFHRAKARRATVSPIGELRDPGFKE

SEQ ID NO: 15541 - protein, 1024 aa, unidentified
  REGION 1..1024: note = Cas Enzyme sequence
MFRLGEDGSPTAIIRSGVRIFSDGRNPKDGSSLAVTRRAARAMRRRRDRLLKRKSRMLGQLVRHGFFPADEAARKALERLNPYQLRAKGLREALTPGEFARALFHINQRRGFQSNRKTDRKDNDSGALKQAIHQLRERMAASGCRTVGEWFWQVRMQQKPEGVAGQGVRARYRETPYTTDEGKKRIDKSYDLYVDRAMIAQEFDALWAAQAALQPALFTEVARADLRDTLLHQRPLRPVRPGRCTLLPDEERAPLALPSTQRFRILQEVNHLRLLDGTLSEVPLTLAQRDAVVAALEAHSKRSFDQLRKLLKLSGSVRFNLEDAKRTELKGNATSAALARKDLLGAAWAGFAAELKDEIAWQIVNEEGEGTLIAWLQQHTGVDEARAESIANVALPEGYGSLSRKALARIVPELQRDVVTYDKAVQAAGFAHHSDLGFDFDHDSDEVERVGERTIASTGEIKPVYAFKELPYYGRALQRHVAFAKDKPRNDEERYGKIANPTVHIGLNQVRVVVNALIRRYGRPAEVVVELARDLKQSREQKQEAQKKQADNQRRNARIRERVAETLGISTERVRASDIQKWILWEELSFDVADRRCPYSGVQISAAMLLSEQVEIEHILPFSQTLDDSLNNRTVAMRQANRIKRNRTPWAARADFEAQGWSYEGILQRAERMPLRKRYRFAHDGYERWLGEDKDFLARALNDTRYLSRVAAEYLRLVCPGSATRVIPGQMTAMLRAKFGLNDVLGLNGEKNRNDHRHHAVDACVIGVTDQGLLQRFAQANAQAREGGLTRLVESMPLPWDTYRDHVERAVRHIWVSHKPDHGFEGAMMEETSYGIRKDGSIKQRSKADGSVGREITNLIRIAEPAQPTRHGVDAEGRPLPYKGYVGGSNYCIEITRNAQGKWEGEVISTFKAYGIVRAGGWAQLRNPTQGQNGQPLVMRLVIGDSVRLEVEGREQTMRVVNINGNNGQMFMAPVHEANVDARNRDKQDAFAYTSKVAGSMQKAKARQVTISAMGELRDPGFQG

SEQ ID NO: 15542 - protein, 1049 aa, unidentified
  REGION 1..1049: note = Cas Enzyme sequence
MAISGAYRLALDLGSTSLGWAMFRLGEDGSPTALIRSGVRIFSDGRNPKDGSSLAVTRRAARAMRRRRDRLLKRKSRMLGQLVRHGFFPADEAARKALERLNPYQLRAKGLREALTPGEFARVLFHINQRRGFQSNRKTDRKDNDSGALKQAIHQLRERMTASGCQTVGEWFWQVRMQQRPEGVAKQGVRARYRETPYTTDEGKKRIDKSYDLYVDRAMIAQEFDALWAAQAALQPALFTEVARADLRDTLLHQRPLRPVRPGRCTLLPDEERAPLALPSTQRFRILQEVNHLRLLDGTLSEVPLTLAQRDAVVAALEAHSKRSFDQLRKLLKLSGSVRFNLEDAKRTELKGNATSAALARKDLLGAAWAGFAAELQDEIAWQIVNEEGEGTLIAWLQQHTGVDEARAESIANVALPEGYGSLSRKALARIVPELQRDVVTYDKAVQAAGFAHHSDLGFDFDHESDEVERVGERTIASTGEIKPVYAFKELPYYGRALQRHVAFAKDKPRNDEERYGKIANPTVHIGLNQVRVVVNALIRRYGRPAEVVVELARDLKQSREQKQEAQKKQADNQRRNARIRERVAETLGISTERVRASDIQKWILWEELSFDVADRRCPYSGVQISAAMLLSEQVEIEHILPFSQTLDDSLNNRTVAMRQANRIKRNRTPWAARADFEAQGWSYEGILQRAERMPLRKRYRFAPDGYERWLGEDKDFLARALNDTRYLSRVAAEYLRLVCPGSATRVIPGQMTAMLRAKFGLNDVLGLDGEKNRNDHRHHAVDACVIGVTDQGLLQRFAQANAQAREGGLTRLVESMPLPWDTYRDHVERAVRHIWVSHKPDHGFEGAMMEETSYGIRKDGTIKQRRKADGSAGREVTNLIRIAEPAQPARHGVDGEGRPLPYKGYVGGSNYSIEITRNEQGKWDGEVISTFDAYRIVRAAGEGDAGWRQLRHARLGQNGKPLVMRLVIGDCVRLQLRDREEVMRVVSVNSAGRLTLAAIHEANVDKRNADKTDPYSYTYKNAAPLQQAMARRVSVSPMGELRDPGFQG

SEQ ID NO: 15543 - protein, 1018 aa, unidentified
  REGION 1..1018: note = Cas Enzyme sequence
MKYRLALDLGSTSLGWAMVLLNDKAEPCALIRAGVRIFPDGRNPKDGSSLAVTRRNARAMRRRRDRLLKRKARMQRLLVEHGFFPADEASRKALETLNPYELRAKGLDAALTPAEFARALFHLNQRRGFKSNRRTDKKDNDSGALKAAIGSLRAQLDPAGADSKARTVGELLWRRMNDPDVRTVRARYREQRVLKEDGKTRVDKSYDLYVDRAMVEAEFDALWARQAELNPAQFNEPARAALKDCLLHQRNLRPVKPGRCTLEPDEPRAPLALPSQQRFRILQEVNHLRLLGGRLLEEALNLEQRDKLVAALEEGSESFKTAIPKLLGLPGTVQFNLADAKRTELKGNATSMLLGKKDFFGPAWRDFSEARQDEIVMRIQEEESEAQLVDWLVESTGVDEAHALKIANAALPEGYGSLSAKALAKILPAMRAEVITYDKAVQAAGYDHHSHISHAASTGEILPELPYYGEYLQRHVGFGTGELKDPPEKRFGRIANPTVHIGLNQVRVVVNALIKRYGLPSEVIVEVARDLKQSQDQRRETQEQQAKNQKRNERLRKVTAEIRGCAEERVRLTDIQKLILWEELSFDVADRRCPYSGLQIAAADVLTERVEIEHILPFSMTLDDSLNNKTVALRQANRVKGNRTPWDAREDFAAQGWDYDGILLRAERMPRAKRQRFAPDGYEKWLKEDKDFLARALNDTRHLSRVAREYLSLICPAGTRVIPGRMTAELRRRFGLNDILGLDGEKNRNDHRHHAVDACVVAVTDQGLLQRFAQASADARGKGLDRLVETMPDPWLSYREHVRRAVNAIWVSHKPDHGYEGSMFKATAFGIRRDGSVVQKLNADGESGRTNEYVVPITAPAQLQRHGLDDQGQPRAYKGYVPDGNFCIEIVNNEAGKWQGEVTATFEAYAVARKQGAAALHAPARSLSGKPLVMRLMIDDLIRLEIDGRLRVMRIASINAAGRLSLADHNEANVDARNRDKNGDWRYTYKQAGSLKAAKGRRVTISPSGELRDPGFKE

SEQ ID NO: 15544 - protein, 1067 aa, unidentified
  REGION 1..1067: note = Cas Enzyme sequence
MLPRMKYRLALDIGTNSIGWCLIRLDAKEPPRPVAVIRAGVRVFPDGREPARGKGEVGTSLAATRRQARAMRRRRDRLLKRKARLQAALVRLGFWPQDEAARKALVTLDPYQLRSEGLDKPLTPAQFGRALFHLNQRRGFQSNRKTDKKDNDSGLLKTAIRKLREALAVEGARTVGEWLAKRHAKRESVRARLRGKTVKDKAYDLYIDRAMVAEEFDRLWSVQAALDPMAFSDAKRDELRDILLHQRPLRPVRPGRCTLLPTEERAALALPSTQRFRMFQELNNLRLMTPGLQEVPLSRMQRDTLAGLLDQGDVTFTRMLKALKLPGTTKFNLQDVKRDRLKGNSTAKVLADEDLFGDRWREFDLATQDGIVDRLLNDASESALVAWLVEHTGVDEARAERIADTGLPEGFGNLSRAALALVLPELEGDVVTYDVAVARAGFDSHSALSHAEQTGEVMRELPYYGEPLQRHVGFADPKAKDSDPPEKRFGRIANPTVHIGLNELRKVVNGLIARYGHPSEVVVEVARELKQGQQQRKDEHQRQADRQAQNDIWRQQIKELPGRDTRDVSVLDLQRMRLWHELNPDDIANRRCPYTGEQISMAMLFSAEVEIDHILPFSMTLDDSLNNKLVALRRANRDKGNRPPFEAFGHSPTGYDYDAILQRAALMPKDKAKRFAADGYQRWLREDKDFLARALTDTAYLSRVAKEYLSLICPANKVRVIPGRLTAMLRGKFGLNKVLSLSGDKNRDDHRHHAIDAAVIGVTDQGLLQRFSKASADARSASLDRLVEEMPLPWPTYREHVARAVAHLIVSHKPDHGHEGALHNDTAYGLRPNGEVAHRVMLGSFKSAAEVEKKTLADDKLKQWLLERTAGLSGKEFAMRVEQLQQERGVRRVQIVEKLAVIRVSDARANERHGIDADGQPTAYKGYKGDSNYCIEIWRDEGGKWRGDVISTYEASQIVRASGGKLTRLRHPTLSQAGNPLVMRLMIGDMVKAEFKGSVRVLQVCKIKSVGAVFVAEHREANVRARDDAKDVSLIYGSYSAGSLQKARGRAVFVSPIGDMRDPGFSG

SEQ ID NO: 15545 - protein, 1067 aa, unidentified
  REGION 1..1067: note = Cas Enzyme sequence
MLPRMKYRLAIDIGTNSIGWCLIRLDSQEPPRPVAIIRAGVRIFPDGREPARGKGEVGTSLAATRRQARAMRRRRDRLLKRKARLQAALVRLGFWPQDEAARKALVTLNPYQLRSEGLDKPLTPAQFGRALFHLNQRRGFQSNRKTDKKDNDSGLLKTAIRKLRETLAVEGARTVGEWLAKRHAKRESVRARLRGKTVKDKAYDLYIDRAMVAEEFDRLWSVQAALDPTAFSNAKRDELRDILLHQRPLRPVRPGRCTLIPTEERAALALPSTQRFRMFQELNNLRLMTPGLQEVPLSREQRDTLAGLLDQGDVTFTRMLKALKLPGTTKFNLQDIKRDRLKGNSTAKVLADEDLFGDRWREFDLATQDGIVDRLLNDATESALVAWLVEHTGVDEARAERITDTGLPEGFGNLSRAALARVLPELECDVVTYDVAVARAGFDSHSALSHAEQTGEVMRELPYYGEPLQRHVGFADPKAKDNDPPEKRFGRIANPTVHIGLNELRKVVNGLIARYGHPSEVVVEVARELKQGQQQRKDEHQRQADRQAQNDIWRQQIKELPGRDTRDVSVLDLQRMRLWHELNPDDIANRRCPYTGEQISMAMLFSAEVEIDHILPFSMTLDDSLNNKLVALRRANRDKGNRPPFEAFGHSPSGYDYDAILQRAALMPKDKAKRFAADGYQRWLREDKDFLARALTDTAYLSRVAKEYLSLICPANKVRVIPGRLTAMLRGKFGLNKVLSLSGDKNRDDHRHHAIDAAVIGVTDQGLLQRFSKASADARSASLDRLVEEMPLPWPTYREHVARAVAHLIVSHKPDHGHEGALHNDTAYGLRPDGEVAHRVMLDSFKSAAEVEKKTFADDKLKQWVLERTAGLSGKEFAARVEQLQREHGIRRVRVVEKLAVIPMTHASAAERHGLDADGKPIAYKGYKGDSNYCIEIWRDEKGKWRSDVISTYDASRIVRSSGGNLARLRHPRLSQSGHPLVMRLMIGDMVKADFKGAVRVLQVCKIKSVGAVFVADHREANIRARADANDDSLIYGSFSAGSLQKACGRAVFVSPIGDLRDPGFSG

SEQ ID NO: 15546 - protein, 1067 aa, unidentified
  REGION 1..1067: note = Cas Enzyme sequence
MLPRMKYRLALDIGTNSIGWCLIRLDSQEPPRPVAIIRAGVRIFPDGREPARGKGEVGTSLAATRRQARAMRRRRDRLLKRKARLQAALVRLGFWPQDEAARKALVTLNPYQLRSEGLDKPLTPAQFGRALFHLNQRRGFQSNRKTDKKDNDSGLLKTAIRKLRETLAVEGARTVGEWLAKRHAKRESVRARLRGKTVKDKAYDLYIDRAMVAEEFDRLWSVQAALDPTAFSNAKRDELRDILLHQRPLRPVRPGRCTLIPTEERAALALPSTQRFRMFQELNNLRLMTPGLQEVPLSREQRDTLAGLLDQGDVTFTRMLKALKLPGTTKFNLQDIKRDRLKGNSTAKVLADEDLFGDRWREFDLATQDGIVDRLLNDASESALVAWLVEHTGVDEARAERIADTGLPEGFGNLSRAALARVLPELECDVVTYDVAVARAGFDSHSALSHAEQTGEVMRELPYYGEPLQRHVGFADPKAKDSDPPEKRFGRIANPTVHIGLNELRKVVNGLIARYGHPSEVVVEVARELKQGQQQRKDEHQRQADRQAQNDIWRQQIKELPGRDTRDVSVLDLQRMRLWHELNPDDIANRRCPYTGEQISMAMLFSAEVEIDHILPFSMTLDDSLNNKLVALRRANRDKGNRPPFEAFGHSPSGYDYDAILQRAALMPKDKAKRFAADGYQRWLREDKDFLARALTDTAYLSRVAKEYLSLICPANKVRVIPGRLTAMLRGKFGLNKVLSLSGDKNRDDHRHHAIDAAVIGVTDQGLLQRFSKASADARSASLDRLVEEMPLPWPTYREHVARAVAHLIVSHKPDHGHEGALHNDTAYGLRPDGEVAHRVMLDSFKSAAEVEKKTFADDKLKQWVLERTAGLSGKEFAARVEQLQREHGIRRVRVVEKLAVIPMTHASAAERHGLDADGKPIAYKGYKGDSNYCIEIWRDEKGKWRSDVISTYDASRIVRSSGGNLARLRHPRLSQSGHPLVMRLMIGDMVKADFKGAVRVLQVCKIKTVGAVFVADHREANIRARDDANDDSLIYGSFSAGSLQKACGRAVFVSPIGDLRDPGFSG

SEQ ID NO: 15547 - protein, 1036 aa, unidentified
  REGION 1..1036: note = Cas Enzyme sequence
MLRYRLGLDLGTNSLGWSIVALGDTGEPTRLEGLGVRIFSDGRNPKDGSSLAVMRRGPRQMRRRRDRYLRRRERFMQALIDHGLMPADAPERKTLESLDPYFLRTRGLDEKLPLFELGRALFHLNQRRGFQSNRKTDKRRDDDTGKIKQAIAAFREEVKGRARTVGEALQLRRLEGKPVRARTVGEGAKASYELYVDRALIAEEFDALWKAQQRFHDARPSDKARDYLRATLLHQRELRPVRPGRCTLEPNEERAPNALPSAQRFRLYQELNNLRVALPGEFERPLTLEERDTLAQDLDRREKADFDRLRKLLRLPDGAAFNLERNRKAVLGNATGYRLAGKRAFGKRWHDLQPQEQDEIVSLLLDEPSEEKVMHELSARWKLSHEQAQAAADTRLPDSFARLGRTAIAKVLPELRKAVVSYSDAVAAAGYASHSQLGTGELLERLPYYGIVLERHVAFGSGDPSHGDEKRYGRIANPSVHIGLNQLRKLVNALIERYGRPAEVHIELTRELKLSRERKEVIEEQNKRNRERNEVLAAKLRDLGQAVNAENLQRLKLWEELNPANPADRRCAYTGEQISIGRLFSPEVEIEHILPFERTLDDSMDNKTVSVRRANRDKGARTPHEAFSYSPPGYDWQEILARAANLPVRKRQRFSETALADFLRGQDFLARQLTDTAYLSRAAREYLSAICPENRIVSLPGRLTALLRGKWGLNRLLSDADRKDRSDHRHHAIDAVVVAATDRGMLQSLATASARARELGLQKLVERMPKAWEGFHEQLAAKIRRVVVSHKPDHGPEGALHNETAYGILAGPDKKDRFEVRYRLPVSSLTTRERIEAVRDAPIRAELLSLIEKTPQKEFRGALADFSRTRGMRHVRINETLSVIPVRDRNGKVYKAYKGDSNYCYEIHRDERGRWDGRLVTTFLANQKLYKDFRADNGRFRTQTFEGEPLVMRLCIDDALAIEDNGARRIMRVVKQSEGMITLAEHFESGNLKERDKDDADPFGYLYKAPNALRELKARRVFVDPLGRVLDPGFKG

SEQ ID NO: 15548 - protein, 1120 aa, unidentified
  REGION 1..1120: note = Cas Enzyme sequence
MAVYRIGLDVGTNSIGWSVLELNGAGEPCTVTAAGVRIFSDGRADKSKATLKADRRKARSARRRRDRFKQRQTFLLDVLKRVGLFPKDESKRKALQLLNPLELRTKALSEKLEPYHMGRALFHLNQRRGFKSNRKDRSEETTSGKVSNSVRMLLEQMHLIDPPMPAEEYKGLSKTDKKQVRQEEAENRNLALKNLAMQSKLTYGSFLWQRQQEGKQTRARPGAGDNGKLYDVYPTRELYEDEFKKIWNAQTKHHPALMTDEVRERIRHIIFTQRPLKPQQRGQCQFLPEEKRTFRAMPSFQRYRIYQEINNLDWIGSSGKCFLKDYPAARDAIIGITERPTLKEKPTAQNAQVSFHKMKKLLKQMDLAEGNFAFNFETPKRNGLDGNQTSNIMQHEDYVGEAWHDWTLEQQDDFIALILDDTKTDEDVRCELINRYKLSEHAATSCMNAPLIEGMASLSLKAAGLLLQKMRDGYHIQSDAIIAVAKEVEKFVNPFIRAGKGEMLSELPYYGEAFSDGRHIIPGDRQEADRHDDLKYYGGVTNPTVHIALNQIRHVVNELIHRYGHPKSIAIELARDLPAGKEGRAAINKEQADNQEKNEKLDEILRDLGQTINSGNRLRLRLWQELDENDPNGRCCPFTGKKICKADLFGDSIEIEHLIPFSISLDDSRANKVLCTRQANRDKGNRAPFDAFGNSPDGYSWGDILERAKQLPKPKQWRFQEDALKIWKRDYSDFTERHLNDTRYIGRLAKEYLENICLFNKIDVLTGRLTALLRGYWGLNGILGDHNQAQETKKNRNDHRHHAVDAIVIGMTSRSMLQKVATAANRAEELHLDRLFERSANGKNPIDPWPGFRNHVKEIVNKILVSYKPKRKTLGKNTTDGQLHNDTAYGIISGPDKQGRYNVVVRCPIQEFKKRQHVEAVRDTQLRAEFLQAFDAEGPTGVARLAGDKKIRRLRRTETLSVIPIRDKFGKGYKAYKGDSNWGMEIYEYPKGHKKASQWQGVVISRYEANQDSFRLGYTQKPHPAARLVMRLQIDDCVEIEQGGLKQIMRVQKLSRNGSLDLAPHNEANVDARNRDNDDPFKYLNITASKLKESNGRKVHVSPAGRVSYEQRRKPRRKNE

SEQ ID NO: 15549 - protein, 1161 aa, unidentified
  REGION 1..1161: note = Cas Enzyme sequence
MNGKKYRLGLDVGTNSLGWSVLELDAETKPCAILAAGSRIFAEGREAKTKATLAATRRGARSARRRRDRFKQRQTFLLSELIKAGLFPKASEDRQELQKRNPLELRSDALRRQLRPWEVGRALFHLNQRRGFKSNRKDQSEETVSGVVSRSARLLLEDMKLIGPEANKEDIRKLSPAEKKQIRQDEAQARKEALGKLNERKDLSYGSFLHQRQLNGQPTRARPATAGDGKLYDVYPTRELYEDEFQKIWQTQAAYHPELMTISAKERIHRAIFHQRPLKPQKRGKCAYMSDEDRAFRALPSFQRYRIYQEVNSLEWWDLGEIKKVRDYREARDEIVNLLENVSTNNGQLTFGKMKNILKRIGITEGNFKFNFETEKRKGLDGNLTSNLMRHEDRIGPSWHDWPLAKQDDFIDTILNGTPQHQERDRKRLDGVGPNSPPDGAKDDEEVLAYLCERFNLPQQIAENCMNSRLKDDTASISLRAARLMLEKMRQGVVDAETGEIVLPLQSDAAFAVALEEPSFIDPSRSKGDDGKYRLLNKLPYYGEAFRDGRHIISGTGKPEDDDKTRWGGVTNPTVHIALNQIRLVVNELIDRFGRPESIAIELGRDLPLGPKKRGEIEREQKENQARNEKFDATLTELGQKPNAGNRLRLFLWHELSDDPNGRCCPFSGRTIGIADLFNGSTEIEHLIPFSRSLDDSRANKVVCTRDANQFKGNRTPFEAFGGSPDGYNWSEIGARAEALPSSKGWRFKPDAWDIWQQGADGDFTSRHLNDTRYIGRLTREYLETICHVDRIDVVTGRLTSLLRRHWDLNRVLDDGSDRKNRDDHRHHAVDAIVVGMTSRSLLQKVSTKARELESCDIDPARNLSRVFAPADDPSNRIDPWSGFRNDVESVVSKIVVSHKARRKSLDSPHTTDGQLHNDTAYGLVEKLNEDGLWEVVSRKPVTVLKKLQDIESIRDPRLREAFKSRFEAAEASTSGSGYKAVQDMAGELNIRRVRCIEKLSVIGITDKFDNTYKAYKGDSNWGIEIYSWPTGHKKAGKWEGVMVPRFDAHQNGFRPGFTFRPHPAARLIMRLRINDCIQMLVAKESEERRIYRLQKVSKNRMSFAEIHEANVDSRNRSKEEKFKYSEVAASTLQSLQAKKVHISPTGLVSCERRRRYRRAG

SEQ ID NO: 15550 - protein, 1161 aa, unidentified; identical to SEQ ID NO: 15549
  REGION 1..1161: note = Cas Enzyme sequence

SEQ ID NO: 15551 - protein, 1056 aa, unidentified
  REGION 1..1056: note = Cas Enzyme sequence
MQNKMHYRLALDLGSTSLGWAMIRLNADNQPCAVIKAGVRIFSDGRNPKDGSSLAVTRREARAMRRRRDRLLKRKARMMRTLIEYGFFPAEEVQRKALETLNPYVLRAKGLDEALTPAEFGRALFHINQRRGFKSNRKTDKKDHDSGALKTAINKLRETLNKENCRTVGEWLYKRDLSGKPVRARYHQDKEIKEDGKTRINKYYDLYIDRAMIENEFDELWKKQSELNAAMFTDKARDDLKDVLLHQRPLKPVKPGRCTLIPDEERAPLALPSTQRFRMYQEVNNLRILRDGLKEEPLALHQRDTLITALEESNKCTFTKIKKLLGVGGAVRFNFEDPKREELKGNTTSAILGKKEHFGPAWFKLDETKQDAIVMQLITEENEGKLVRWLQTEGGVDEQHADAIANVGLPEGYGSLSAKALARILPELRRGVVTYDKAVQAAGFEHHSKLTTNSEIHGVTTKIESVDQDTGEIKAFHIHKELPYYGEYLQRHVGFGSGKPEDQPEKRYGKIANPTVHIGLNQTRLVVNSLIRRYGHPSEVIVEVARDLKQSREQRKVEQERQAKNQKRNERLRKEAAEILKIGEERVSRDDIEKMILWIELNETDSVGRKCPYSGVPISAAMLLSNEVEIEHILPFYRTFDDSLNNKTVSMRQANRIKGNRTPWEARQNFEAQGWKFEDILARAGNMRKEKRYRFAEDGYQRWLKDDDGFLPRALNDTRHLSKVAREYLTLICPQATRVIPGRMTAMLRAKFGLNDVLGLHGEKNRNDHRHHAVDACVIAVTDQGLLQRFAQASASAREKQLNRLVESMPLPWDSYREHVQRAVENIWVSHKPDHDYQDEMFDKTIYNADGFSRIAAKVRTVIPFNARQDSSSEQRHRDKDGQPKPYKGLLSNSNYCVEIVREGHIWEGEVIPTYKAYEFVREFKNQNRGCTEKHVFDALRNPARSLSGKPLVMRLSIDDTIRAEIDGITESLQVLKINSSGSITFIRINETNIPGRYNAKLAAQKLAAEGKAFDKGALNDAFFQKAVSANSLRELKARRVTISPIGELHDPGFKE

SEQ ID NO: 15552 - protein, 1034 aa, unidentified
  REGION 1..1034: note = Cas Enzyme sequence
LGHFEKATTNDHGGNMGIRTMRYRLALDLGTTSIGWAMLRLRETDGADTPCAVIRAGVRIFSNGREPAPPGEQGESLAVTRRTARAMRRNRDRKLKRKAQLMATLIETGFFPADDSARKALDVLDPYELRATGLTNPLTPEQFGRAIFHLNQRRGFLSNRKTDKKDNESGALKAAIRRVRETLVAQDCITIGQWLAKQHKNRAPIRARYRELRVQKPDGKFRTDKSYDLYIDRAMIRHEFDELWKAQAGFAPALYTEAKRERIAGVIFHQRPLKPVKPGRCTFLPDQERAPQAMPSTQRLRIYQELNHLAILGEDGFEHSLTKAQRDAVAKLLFESATVTFQKIATKLKLGGRVRFNLEDAKRDRLQGDKTGVLLSKPDFFGPTWHEYSLARQDEIVGKLLKEDNEEQLIGWLSNEFPIDEPRAERIANASLPEGYSRLGAEATRRILEKLIEDVVPYSTAAKNAGFHHSVLSHAQETGEILPSLPYYGEYLQRHVGFGSGEPTDSPEKRYGRIANPTVHIGLNEVRKVVNALIARYGHPSQIIVEVTRDLKNGKARRDEIRKQQAENQKRNKRFETDIKAIVPGSVQKRDLTKMKLWEELNPQNVMERRCPYTGENISINMLLSEAVEIEHILPFSRTLDDSLNNKTVCLLRANRYKKNRTPFEAFGESKDGFDYAKILERVSTMNAAKRKRFAPDGLEKWLKEDRDFVARALNDTAYLSRVAREYLSLVCPYQQVIAIPGRLTGMLRGKLGLNDILGLSGEKNRNDHRHHAVDACVIGITDRALLSRFAKASASARESALNKLIDEMPEPFANYRAHVQRAVQAIVVSHKPDHSHEGRMHNDTAYGLLGDGLVAYTKHIDGQKLREPERLNVIEMAEPSAVARHGVLPDGKPRPYKGYKGDSNYCIEIVRNDHGKWEGEVISTFQAYQVVRSGGIAKLRDKRKSVSGKPLVMRLIVNDFVTLTRDNSRVLMRVATISGNGQIFMARPHEANVDARNRNKSDDFSYTSKMAGSLQTAQGRQTTVSPIGLIERN

SEQ ID NO: 15553 - protein, 1003 aa, unidentified
  REGION 1..1003: note = Cas Enzyme sequence
LVQVLVKAGLLPEDRKLAEELHKFDPYWLRAAALDQRLEPWEIGRAIFHLNQRRGFKSNRVADAADDERGAVKAGSAALAAKLVAEQARTLGELLARLNGRDKFGRRLKDAGSPGSSRQRSVRFRPRAQGSKNLYDLYPTRDMLADELNAIWLAQQQWHGPELLSPETLQRVRRIVIDQRPLKKPLVGRCTLSPDPDVVRCHGLNIDRGERAPKAHPLFQRFRILQDVCQLRVLRPGLPERALTVAERNAIADVLMSRASCVAFERLQQAAGISEECRFNHEGWGRTGLDPDETAARLAKRGSFGPGWRKLDREQQVEVVERLLAEDDEVRLLDWLTSRFELSRDQANAVANVRLPQGHCRFGRTALSKLVFTMEHESRDAVDKGTGEIYERPLTYDEAVSAMGHHHSDRRPESKLDRLPYYGSALPSHVISWPGSPEGSQENIGRVPNPTVHIGMNQLRAVVNALIETYGRPGEIVVELARELKLSAQRKRELQRRQNDGRKRNEAFREELARLGLGDTYRNRLLLRLYEELPADERVCVYSGSPISKSMLFREDVEIDHVLPHSRTLDDSFWNKVLCLRAANQQKGNQTPAEAWSEDELSEIGERAGRVVPAKAWRFAPDALERVGDEGGDLLSRHLRDTQHLSRLAKTYLELVCGKVRASPGRLTAMLRAKWGLNGLLSGSGTSSESAGKNRLDHRHHAVDAFVLACTDKGLLQRVSKASGRAEKLDLDRLYPKCEFPEPFKGYRQGLAERLGCIVVSHKPDHGIAGGRGDLSRSATSGRLLEDTAYGLVEEHVDGKDYNLVSRKPLISLKQAEVDRIRDPALRRELRCLTEGCSGAEYHRALESFSKRTGVRRVRILKSKGPVQVVRHGRSFEKAYLPGDNHRIEIYETPDGKWRGEAVSVFAANQAGYESKWRQQHTGARIVMVVHKGDLIEADFKEGDGRIAYRVVRLEASANRLRLAPHFAATADGEFRKAYSRLKAAGARLVRVDAIGRVRSASA

SEQ ID NO: 15554 - protein, 1083 aa, unidentified
  REGION 1..1083: note = Cas Enzyme sequence
MAAADYRLGLDLGTNSIGWCAVQLDEAGNPSGVLGAGVRILTPNEEAGRDPQSKASLAASRRAARSARRRRDRFVRRRERLVQVLVKAGLLPEDRKLAEELHKFDPYWLRAAALDQRLEPWEIGRAIFHLNQRRGFKSNRVADAADDERGAVKAGSAALAAKLVAEQARTLGELLARLNGRDKFGRRLKDAGSPGSSRQRSVRFRPRAQGSKNLYDLYPTRDMLADELNAIWLAQQQWHGPELLSPETLQRVRRIVIDQRPLKKPLVGRCTLSPDPDVVRCHGLNIDRGERAPKAHPLFQRFRILQDVCQLRVLRPGLPERALTVAERNAIADVLMSRASCVAFERLQQAAGISEECRFNHEGWGRTGLDPDETAARLAKRGSFGPGWRKLDREQQVEVVERLLAEDDEVRLLDWLTSRFELSRDQANAVANVRLPQGHCRFGRTALSKLVFTMEHESRDAVDKGTGEIYERPLTYDEAVSAMGHHHSDRRPESKLDRLPYYGSALPSHVISWPGSPEGSQENIGRVPNPTVHIGMNQLRAVVNALIETYGRPGEIVVELARELKLSAQRKRELQRRQNDGRKRNEAFREELARLGLGDTYRNRLLLRLYEELPADERVCVYSGSPISKSMLFREDVEIDHVLPHSRTLDDSFWNKVLCLRAANQQKGNQTPAEAWSEDELSEIGERAGRVVPAKAWRFAPDALERVGDEGGDLLSRHLRDTQHLSRLAKTYLELVCGKVRASPGRLTAMLRAKWGLNGLLSGSGTSSESAGKNRLDHRHHAVDAFVLACTDKGLLQRVSKASGRAEKLDLDRLYPKCEFPEPFKGYRQGLAERLGCIVVSHKPDHGIAGGRGDLSRSATSGRLLEDTAYGLVEEHVDGKDYNLVSRKPLISLKQAEVDRIRDPALRRELRCLTEGCSGAEYHRALESFSKRTGVRRVRILKSKGPVQVVRHGRSFEKAYLPGDNHRIEIYETPDGKWRGEAVSVFAANQAGYESKWRQQHTGARIVMVVHKGDLIEADFKEGDGRIAYRVVRLEASANRLRLAPHFAATADGEFRKAYSRLKAAGARLVRVDAIGRVRSASA

SEQ ID NO: 15555 - protein, 1049 aa, unidentified
  REGION 1..1049: note = Cas Enzyme sequence
MEKKPSLKYRLGLDVGTNSLGWFMVWLNDANEPVGLGPGGVRIFPDGMTNDKKASNAAERRLARGQRRNRDRYLERRGALMGAMIDGGLMPNDEAARKALVDLDPYDLRARAITEKLPLHHIGRALFHLNQRRGFKSNRKSDGANDEKGAIKEASSRLREAMAAANAKTLGVFLDGMHREREGVRVRNTSSGNKATYDFYPTRDLLADEFEAIWRQQSKHHPQLTDAVRERVFDTIFFQRPLKSPPIGKCALDPAKSPDDADGFRLAKAHPLSQRFRIWQEVRNLMVGETGSSPRDLTKEEADIIALALLQSNTVTFDRMRKLLKLPEGAHFNLESERRKELLGDQTAKRLGAKKLFGKTWRGFPLERQIEIVERLLSEQNEEALIEWLTFETGVDRELAEQIADTPLPEGYGRLGRRAISAILPHMEGGLRYHEAAEAAGYDHAKGPTGEILGYLPYYGEWLQDQVVGTGDPRDKKESRWGRFPNPTVHIGLGQIRRIVNALIKKYGPPEQIVVELARDLKNSKKRKDEIEKEQKANQRKNDLRRETIEAEGHRPNHDSLLRMRLWEELNEKDSLDRRCPYTGEVISIKRLFSAEVEIDHIIPFQACWDDSAANKTVCMRDANRAKGKQTPHEAFGHSPNINGRQYDWGAIAALAASLPKNKRWRFEPKALERFNTTGGFQARQLMETSWLARLTREYLSCITNPNEVWVTPGRLTAMIRAKWGLNTLLPDHKFTNAKNRTDHRHHAIDALVICLTDRGLLQRMSGAYDDDRQKISVPEPWEGFRGQLDDALKSMTVSHRPDHGREGKLHEASAYGLNKNQKEGEGNLVYRKALTDLNENEIDRIRDPEIREALTIWLEETKGAETKLADALATFGERTDLPFAPHGIRHVRLTKKEKLEYLVPIKDKDGAAYKAYSSGENLFVELYETSDGKWHGEPVSVFQANQKGYKPCWHTQFPEAKFIMQVYKGDLLKIHHDGLEKIVKVVRLSPSNNIFYLVQHNEAGSFPARHSNTDDPFRWVFGSYGKIKEWDATLVRVDELGTVWKYQP

SEQ ID NO: 15556 - protein, 954 aa, unidentified
  REGION 1..954: note = Cas Enzyme sequence
MIRKLLYRLALDLGSTSLGWAMIRLNQNNEPVAIIKAGVRIFSDGRNPKDGTSLAVNRRNARAMRRRRDRLLKRKARMMQALIEHGFFPKDETERKALERLDPYALRAKGLDDALTPAEFARALFHINQRRGFKSNRKTDAKESDSSVMKSAIHSLRALLANGEARTVGEWLHQRSRAGEPTRARRREKITTNEDGRNKREVSYDLYVDRTMVEQEFDALWAKQSALNPAIYTHAIGAELRDILLHQRPLKPVRPGRCTLIPTEERAPLALPSVQRFRIYQEANNLRILGRGLESMPLAKDQRDKVVDALERNGKQTFTQLKKLLALGGGATFTHEDVKRTELKGNGTSAALSKTNHFGKRWFTLDSALQDEIVTRILTEESEVALVNWLVAATGVDEACAERIAQVGLAEGYGSLSRAALARILPELARDVVTYDKAVIAAGFEHHSNLNPAATGEILPELPYYGEPLQRYVGFADPRATESDPPEKRFGRIANPTVHIGLNQVRKVVNALVHKYGHPAEVIVEVARDLKQNKEQRDEESKRQRANQDRNNRYRSLIATQLGIAEEKVRRDDMQKVLLWEELNLGDPLNRKCPYSGVSISLGMLLSDAVEIEHILPFSMTLDDSLNNKTVATRRANRDKGNATPWQAFGERSVSGYDFGDILDRAELMPKNKRYRFGKDGYQQWLREDKDFIARALNDTRYLSRVAREYLRLICPGARVIPGQMTAMLRGRFGLNSVLGVDGEKNRNDHRHHAVDACVIGVTDQGMLEKFASASASARGKHLSRLVEAMPEPWPNYRAHVERAVNAIWVSHKPDHSYEGAMHNETAYGLLADGLVRHYKVVDGKRERTVEPLKVLPMSSHQGRHRHGLGDDGAPRPYKGYKGDSNYCIDIVRNEKGKWDGEVVSTFSAYQIVRTEGVSRLRDSRLSISGKPLVMRLIVNDYVRLNVNGVLRTM

SEQ ID NO: 15557 - protein, 1089 aa, unidentified
  REGION 1..1089: note = Cas Enzyme sequence
MLPYKVEPVKIFFHTPLGRKIMWKLGLDLGTNSIGWSAFCHPGDSEPDWNAWSLKDAGVRIIPDGRQPPEKGRVGESLAVQRRQARGMRRNLDRRKNRLQALVQALLARGLLPAEPDARKEIITGHSPYALRAQAADSAHPLTAHQLGRVLLHLGLRRGFLSNRKSDSAEEATDFKKKISALHRALAHHLLTAEAVAALPDDTPAQAQPWTLGQFLWRREEAGLPLRFRGQDGDFYPDRALYRAEFEAIRAAQSPHHPTLTAEDWDCLRDQHILFQHPLRPVERGACSFYPDQPRTFRDTPIAQRFRILKEVSILRWLDDQQRTHRLDIEQFQTVVATLERQEKASFGGLRRLKRADETPLFEKGCRFNIEDEKRPHLDGNRVAVMMRRNPALERLWQDRTAAELDDIFDRLHTPLKDGTMMDDATLIGSLISDFALTRSEANALTALPLSSITTSYSRQAMEQLCPLMEATGCDEYDAAVALLGKDEADQRLAGFQQHPELLPALPYYGEILRGSMLGADPRKPAETDPEGHYGRIGNPTVHIALNQVRKLVNELIERFGEPPAVIQVELSRDLKLPKAKRDAIGLENARNERANKERAKWWAAMTNGAEPTPRDLKKIKLWEELARDEVARRCLFTGRIVSAGHLVNGEVEIEHILPRSRTLDDSLGNLTLSFRDANRLKGNRTPFEAFGHDQHRDQGIVWAEILERIKGLPPAKAARFAENAMDAWEVNTDFAARQMTDNATIARLARRYLTAVCPQVFPAPGRLTAMIRSQWRLNGLLSDDNQKNRNDHRHHTVDAFVIGLATRSMLQRTSSALSHGREQVRLPDLPDPLRDALRERLDRLVVSFKPDHGGQGAMFNETAYGFVDRNKALLVTRKPIASLSEKELDAIRDPQWKAKISDFFEQHTPAARSNTSQRAKLLAEFGRLHGVKSLRILVKNASVTPVASAPYKGYAKAAYVCCDVWAVPKGKPGKWKTGEWTWHGVFTAYSDCPQGQPPQSSETKPHPAARFVTRLFKDDLIAYDEGGQTEIMRVAGFSTTNNRIDLRPYTAAESQQKFYGINKLGAKALRKVSVSPSGVVAMGKGHTP

SEQ ID NO: 15558 - protein, 1089 aa, unidentified
  REGION 1..1089: note = Cas Enzyme sequence
MLPYKVEPVKIFFRTPLGRKIMWKLGLDLGTNSIGWSAFCHPGDSEPDWNAWSLKDAGVRIIPDGRQPPEKGRVGESLAVQRRQARGMRRNRDRWKNRLQALVQALLARGLLPAEPDARKEIITGHSPYALRAQAADSAHPLTAHQLGRVLLHLGLRRGFLSNRKSDSAEEATDFKKKISALHRALAHHLLTAEAVAALPDDTPAQAQPWTLGQFLWRREEAGLPLRFRGQDGDFYPDRALYRAEFEAIRAAQSPHHPTLTAEDWDGLRDQHILFQHPLRPVERGACSFYPDQPRTFRDTPIAQRFRILKEVSILRWLDDQQRAHRLDIEQFQTVVAALERQEKASFGGLRRLKRGDGSPLFEKGCRFTIEDEKRPHLDGNRVAVMMRRNPALERLWQDRTAAELDDIFDRLHTPLKDGTMMDDATLIGSLISDFALTRSEANALAALPLSSITTSYSRHAMEQLCPLMEATGCDEYDAAVALLGKDEADQRLAGFQQHPELLPALPYYGEILRGSMLGADPRKPAETDPEGHYGRIGNPTVHIALNQIRKLVNELIERFGEPPAVIQVELSRDLKLPKAKRDAIGLENARNERANKERAKWWATMTNGAEPTPRDLKKIKLWEELARDEVARRCLFTGRVISAGHLVNGEVEIEHILPRSRTLDDSLGNLTLSFRDANRLKGNRTPFEAFGHDQHREQGIVWAEILERIKGLPSAKAARFAENAMDAWEVNTDFAARQMTDNATIARLARRYLTAVCPQVFPAPGRLTAMIRSQWRLNGLLSDDNQKNRNDHRHHTVDAFVIGLATRSMLQRTSSAMSHGREQVRLPDLPDPLRDALRERLDRLVVSFKPDHGGQGAMFNETAYGFVDRDKALLVTRKPIASLSEKELDAIRDPQWKAKISDFFEQHTPAARSNTSQRAKLLAEFGRLHGVKSLRILVKNASVTPVASAPYKGYAKAAYVCCDVWAVPKGKPGKWKTGEWTWHGVFTAYSDCPQGQPPQSSETKPHPAARFVTRLFKDDLIAYDEGGQTEIMRVAGFSTTNNRIDLRPYTAAESDRKYMSINTLGAKALRKVSVSPSGVVAMGKGHTP

SEQ ID NO: 15559 - protein, 1022 aa, unidentified
  REGION 1..1022: note = Cas Enzyme sequence
MRLNDEGNPDRIVRLGVRIFSDSRNPKDGTSLATARRLARQMRRRRDRYLRRRTALLNALVRHGLMPEDRDQRLDLRRLDPYELRARALSEALPPHQFGRALFHLNQRRGFLSNRRTDRRTDDNEKGAIKASIRSTRTALETSGSHTLGEWLWQRRQAGQDVRARRFGPGARDPYEFYADRALVEQEFEALWEGQMRLSPGALSTEARVAIHRIIFHQRPLRPVDPGRCALDSTDPRAPLALPSAQRFRLLQELNHLRLQLPDASERALSLQERDVLLERLRRQKTMTFQAMREAIGVPRGARFSLESEKRTALKGDETAALLRKDDCFGKRWDSLALADQDAIVEQLLGDEPESATLQWLAERFSLTEKQSTAALELPLPDGYLRIGRHALARLVPILTNAVIDYSPALLLAGFTDHFALPDGSLPHLPYYGKALQRHVAFGTGKDEDPEEKRYGRVSNPTVHVGLNQVRKVVNALIDRFGKPEQVVIEVTRELKNSRERRIELERDQTKRQKENQRYDETLHQLGLRPSAEFRQRLRLWEELSDNPLERRCIYTGEPLSITRVLSPEVEIDHILPFSISLDDGASNKTLCLARANRFKGNRAPFEAFGDSPAGYDWDEIASRAAALPMSKRRRFSKDARERLSIDGDFLARHLNDTAYLSRVAREYLCLVCPQVWAVSGRLTALLRRQWGLNSLLSDSGAKDRTDQRHHTVDAAVVCVTDRSLLQRVSRASEQANLDGVQRLVDQMPRPWERFRGEMAFGLKRVVVSYKPDHSAGGALHNDTAYGIVRPPSHTGDAPLYAHRVPIVAIGPKDMVASPALSALIDKEIGSATGKERLSRLGSLSASTKVRRARIHESLSAIHINDAAGKPFKAFKGDSNYCVEIYVDGKGKWRDLVISTFDANQRTRHQQNRHLAANGHPLVMRLTQNDSVAIGENEERRIFRVVKFSPGNIVLAEHFEGGSLKKRDQDPKDVFKYKYASASALMREGARRVFVDPIGRVLDPGNRSCLDVSSISTNAGAS

SEQ ID NO: 15560 - protein, 1040 aa, unidentified
  REGION 1..1040: note = Cas Enzyme sequence
VRYRLGLDLGANSLGWCVMRLNDEGNPDRIVRLGVRIFSDSRNPKDGTSLATARRLARQMRRRRDRYLRRRTALLNALVRHGLMPEDRDQRLDLRRLDPYELRARALSEALPPHQFGRALFHLNQRRGFLSNRRTDRRTDDNEKGAIKASIRSTRTALETSGSHTLGEWLWQRRQAGQDVRARRFGPGARDPYEFYADRALVEQEFEALWEGQMRLSPGALSTEARVAIHRIIFHQRPLRPVDPGRCALDSTDPRAPLALPSAQRFRLLQELNHLRLQLPDASERALSLQERDVLLERLRRQKTMTFQAMREAIGVPRGARFSLESEKRTALKGDETAALLRKDDCFGKRWDSLALADQDAIVEQLLGDEPESATLQWLAERFSLTEKQSTAALELPLPDGYLRIGRHALARLVPILTNAVIDYSPALLLAGFTDHFALPDGSLPHLPYYGKALQRHVAFGTGKDEDPEEKRYGRVSNPTVHVGLNQVRKVVNALIDRFGKPEQVVIEVTRELKNSRERRIELERDQTKRQKENQRYDETLHQLGLRPSAEFRQRLRLWEELSDNPLERRCIYTGEPLSITRVLSPEVEIDHILPFSISLDDGASNKTLCLARANRFKGNRAPFEAFGDSPAGYDWDEIASRAAALPMSKRRRFSKDARERLSIDGDFLARHLNDTAYLSRVAREYLCLVCPQVWAVSGRLTALLRRQWGLNSLLSDSGAKDRTDQRHHTVDAAVVCVTDRSLLQRVSRASEQANLDGVQRLVDQMPRPWERFRGEMAFGLKRVVVSYKPDHSAGGALHNDTAYGIVRPPSHTGDAPLYAHRVPIVAIGPKDMVASPALSALIDKEIGSATGKERLSRLGSLSASTKVRRARIHESLSAIHINDAAGKPFKAFKGDSNYCVEIYVDGKGKWRDLVISTFDANQRTRHQQNRHLAANGHPLVMRLTQNDSVAIGENEERRIFRVVKFSPGNIVLAEHFEGGSLKKRDQDPKDVFKYKYASASALMREGARRVFVDPIGRVLDPGNRSCLDVSSISTNAGAS

SEQ ID NO: 15561 - protein, 1040 aa, unidentified; identical to SEQ ID NO: 15560
  REGION 1..1040: note = Cas Enzyme sequence

SEQ ID NO: 15562 - protein, 939 aa, unidentified
  REGION 1..939: note = Cas Enzyme sequence
MMRDLITHGFFQADESKRKVLLTLNPYALRAKGLDHALTPEEFGRALFHINQRRGFKSNRKTDKKENDAGALKLAISKLRQDMVAQNCRTVGEWLHQRDVSQQTVRARYRQTKIAKDDGKTKIEKSYDLYIDRAMIEAEFDALWAKQASFNPALYNDGARADLRDTLLHQRKLKPVKPGRCTLIPEEERAPLALPSTQRFRIYQEVNNLRILRDGLQEEPLTLAQRDMVVDALECNRKRTFTQIKRLLGLGSVTFNLEDAKRSELNGYSTGSELSKDAYFGDDWSGFSEVMQDAIVLELVTQESETALVRWLCAETGIDEKTAERVANAGLAEGYGSLSSKALGFILPELRRSVATYDKAVVAAGFDHHSNISAASTGEILPTLPYYGIALSRHVAFGSGRPEDSEEKRYGKIANPTVHIGLNQVRLVVNALIKRYGHPSEVIVELARDLKQSKDQREEETKRQAENQRRNARIRANIAGALGINEARVRTADIQKMILWEELSSDAATRCCPYSGVSISVNMLLSDQVEIEHILPFSDTLDDSLNNKTVSTRKANRLKGNRTPWAARGDFETQGWAYVDMLARAELMPKSKRYRFAEDAIQRWLKDDAGFLPRALNDTRYLSKVAKEYLSLICPQNTRAIPGRMTAMLRGKFGLNDVLGVDGEKNRNDHRHHAVDACVIAVTDQGLLQRFSRASASARERQLNRLVEDMPLPWDSYRDHVQRAVERIWVSHKPDHGHEGAMHNDTAYGLLGNGRVIVHKVVDGKRERIEDNLKVIEFTSSGASARHGVLPNGDPRPYKGYKGDSNYCIEIVRNDQGKWEGAVISTFEAYQIVRLHGARRLGDSSVGLSGKPLVMRLMMNDIVRLEVDGKQRTMRVATVSGNGQVFMCDTAEANVDARNRDKNDSFAYVSKMAGSFFKSRSRRVTISSIGDLCDPGFGG

SEQ ID NO: 15563 - protein, 1018 aa, unidentified
  REGION 1..1018: note = Cas Enzyme sequence
METRKLRYRLALDLGTTSIGWAMLRLNADDDPIAVIRAGVRIFGDGRNPQDGSSLAVTRREARAMRRNRDRKLKRRAKLMSALIELRFFPQDEEARKALDSLDPYELRARGLDHRLAPEEFARAVFHLNQRRGFKSNRKTDKADNESSALKFAIKRMREGLAEEGLRTVGEWLFKRHSRREPVRARYRETRVAREDGKSRILKSYDLYIDRAMVEHEFDLLWAKQSGFDQSRYSEAALILLKGILFHQRPLKPVKPGRCTLLPEEERAPLALPSVQQFRIYQELNHLAILTDDAREQFVTLDQRNAVARVLNEHSKSTFTKIATLLKLGGSVRFNLEDIKRDSLKGNLTAAKLSDDEMFGASWHGFPLERQDEIVWALLKEEDESALIGWLTKEFDLDEARAERIADARLPDGYGNLSRKALARILPELKAGVVTYDKAVVAAGFASHSALSHGEQTGEILLTELPYYGEPLQRHVGFGTGDPNDPPERRFGRIANPTVHIGLNQLRKVVNALIKRYGNPSEVIVEVTRELKQSRERKIEIQREQAARQTQNEQWRTDIQAVTGHDATAIDLQKMKLWVELNIKDAADRRCPYTGEQISVTRLFSDDVEIEHILPFSKTLDDSLNNKTVSLRRANRDKGNRTPFEAFGESQSGYEYATILQRANAMPKEKAKRFAVDGYERWLREDRDFLARALTDTAYLSRIAREYLSLVSAPNKVRVIPGRLTALLRGKFGLNAVLGLKGEKNRNDHRHHAVDACVIGVTDQGLLQRFANASASARDQQLSRLVESMPEPFPNYREHVARAVGSVIVSHRPDHNYEGQMHKDTAYGLVGAGVVRHTKVVDGKRVRESERLSVIEFSEPKAAHRHGLLPDGSARPYKGYKGDSNYCIEIIRTDAGRWAGEVVSTFAAYQIVRRSGVAGLRNPGTGIGGRSLVMRISKGDVLKVQIDGELAVFVVAWIRTDGRIALYKCHEANADARDRDKKDEFSYLVKSPGPLQKIAARRVTVSPIGDVRDPGFHE

SEQ ID NO: 15564 - protein, 999 aa, unidentified
  REGION 1..999: note = Cas Enzyme sequence
MVRLNAANEPTAIPKAGVRIFSDGRNPKDGSSLAVTRREARAMRRRRDRLLKRKSRMLRTLVEHSFFPVDEAQRKALETLNPYALRAKGLDAALTPAEFARALFHINQRRGFKSNRRTDKKDGDSSALKTAIRQLREALQAENCRTVGEWLHKRDAGGKTVRARFRQAKVQKDDGKTRIDKSYDLYIDRAMIEAEFDALWAKQAELNPVLFHEAARAELRYVLLHQRPLKPVKPGRCTLLPDEERAPLALPSTQRFRIYQEANNLRILREGLKEEALTLQQRDALVSALEANSKRSFVQIKKLLGIGGAVQFNFEDPKRQELKGNVTSAILGKAEYFGKAWFKLTEALQDEIVQQLVSEENEARLVRWLQDATGVDESRAEAIANAGLPEGYGSLSNQALTRILPELRRGVVVYSDAVQAAGFAHHSHIGAAVDGEIHACLPYYGKPLQRHVGFGTGDPDDSDEKRYGRIANPTVHIGLNQVRVVVNALIKRYGHPSEVIIELARDLKQSKEQRDEESRRQADNQRRNQRLRTSIAEVLQISAERVKAADIQKMILWEELSFDPAERRCPYSGVQISAHMLLSDQVEIEHILPFSRTLDDSLNNKTVALRTANRVKGNRTPWDAFGAQSAAGFDYASILARAESMPLHKRYRFAEDGYQRWLKEDQSFLARALNDTRHLSRVAREYLSLICPQNTRVIPGRMTAMLRAKFGLNDVLGLNGEKNRNDYRHHAVDACVIGVTDQGMLQRFAQASASAREQQLNRLVDDMPLPWPNYREHVMRAVNHIWVSHKPDHGHEGAMHNDTAYGLLGNGRVSVHKNVDGQRILIKDNLKVIEFSNPQASARHGLLPDGSPRPYKGYKGDSNYCLEIVRNDKGKWEGEVISTFEAYQLVRAHGTDGIARLRDRHLSASGKPLVMRLVIDDFVRLSIDGTLRTMRLASVNSAGRLTLADHQEANVDARNRDTQGDWRYTYKQAGSLHAAQGRRVTISPIGEVSDPGFKA

SEQ ID NO: 15565 - protein, 1034 aa, unidentified
  REGION 1..1034: note = Cas Enzyme sequence
VLQNGIHKKGGKDMPQKMRYRLALDLGSTSLGWAMVRLGPDNTPIAVIKAGVRIFSDGRNPKDGSSLAVTRRAARAMRRRRDRLLKRKARMMRTLVEHGFFPSDGRARKALELLNPYALRAKGLEEALKPEEFARALFHINQRRGFKSNRKTDKKDNDSGALKSAIKRLHAALDPGGAEGKPRTVGEYLYRRDHAGQTVRARFRQQRVEKEDGKTRIDKSYDLYIDRAMIEAEFDALWAKQSALNPELFNARAGAELKDCLLHQRPLKPVKPGRCTLMPEEERAPLALPSQQRFRIYQEVNNLRVLREGLKEEALALEQRDRLVDALERNGKRSFTQIKALLGLGGVVQFNFEDPKRQELKGNTTSAILSKKDLFGHAWFSFPEAKQDAIVMQLVTEENETALIRWLQEHAGANEAQGEAVANAGLPEGYGSLSAKALERILPELRRDVVTYDKAVQAAGFEHHSHISHAATGEILPALPYYGEYLQRHVGFGTGNDQDPAEKRFGKIANPTVHIGLNQVRVMVNALLKRYGHPSEVIVEVARDLKQSQDQRKEDQERQAKNQKRNDRLRGEAAALLQIAPEQVRQADIQKLILWEELSFDPADRRCPYSGVQISAQMVLNDQVEIEHILPFSRTLDDSLNNKTVAMRQANRVKGNRTPWEARADFAAQGWAYEGLLNRAEQMPRNKRYRFGEDGYQRWLKEDKDFLARALNDTRHLSRVAREYLSLICPQATRVIPGQMTAMLRAKFGLNDVLGLNGEKNRNDHRHHAVDACVIAVTDQGMLQRFAQASASARERQLNRLVDDMPLPWPSYREHVARAVNHIWVSHKPDHGHEGAMHNDTAYALLGGGMVSVRKVTEGIRQREISSLKVIEFADSKAIDRHGQLPDGSPRPYKGYKGDSNYCIEIVRAATGKWESEIVSTFDAYQIVQMYGLKRLSHPTLGVRGKPLIMRLIIGDYLRAYFRGETRLLTIKKIKSNGGIFVAEHQESNVRSREDARDDTLVYGSFTAGSLCKASGRKVTVSPIGEVDDPGFKD

SEQ ID NO: 15566 - protein, 1020 aa, unidentified
  REGION 1..1020: note = Cas Enzyme sequence
MPQKMRYRLALDLGSTSLGWAMLRLGPDNTPVAVIKAGVRIFSDGRNPKDGSSLAVTRRAARAMRRRRDRLLKRKARMMRTLVEHGFFPPDEKARKALELLNPYALRAKGLDEALKPEEFARALFHINQRRGFKSNRKTDKKDNDSGALKSAIKRLHAALDPSGAEGKPRTVGEYLYRRDHAGQTVRARFRQQRIEKEDGKTRIDKSYDLYIDRAMIEAEFDALWSKQTALNPQQYNEKARADLKDCLLHQRPLKPVKPGRCTLLPEEERAPLALPSQQRFRIFQEVNNLRVLREGLKEEALSMEQRDRLVDALERNGKRSFTQIKALLGLGGVVQFNFEDPKRQELKGNTTSAILSKNDNFGPSWFAFPEARQDAIVTQLVTEENETALIHWLQEHTGVDEAHAEAIANATLPEGYGSLSAKALARILPELRRDVVTYDKAVQAAGFDHHSNISHAATGEILPTLPYYGEYLQRHVGFGTGNTDDSPEKRYGKIANPTVHIGLNQVRVVVNALLKRYGHPSEVIIEVARDLKQSPDQRKEDQERQAKNQKRNERLRADAARILGVAPERVRHADIQKMILWEELSFDPADRRCPYSGVQIGAELVLSDQVEIEHILPFSQTLDDSLNNKTVAMRQANRIKGNRTPWEARADFAAQGWAYEGLLNRAEQMPRNKRYRFSEDGYQRWLKEDKDFLARALNDTRHLSRVAREYLSLICPQATRVIPGQMTAMLRAKFGLNDILGLDGEKNRNDHRHHAVDACVIAVTDQGMLQRFAQASASARERQLNRLVDDMPLPWPSYREHVARAVNHIWVSHKPDHGHEGAMHNDTAYALLGNGMVSVRKVTEGIRQREISSLKVIELGDGKAIERHGMLPDGSPRPYKGYKGDSNYCIEIVRSEKGKWEGEIVSTFDAYQIVRKYGPNRLSHPTLGVRGKPLVMRLIIGDYLRAFFRGEPRLLTIKKIKSNGGIFVAEHRESNVRSREDAKDETLVYGSFTPGSLCKASGRKVTVSPIGELADPGFK

SEQ ID NO: 15567 - protein, 1012 aa, unidentified
  REGION 1..1012: note = Cas Enzyme sequence
MQKMRYRLALDLGSTSLGWAMVRLDSQTEPCAVIKAGVRIFSDGRNPKDGSSLAVSRREARAMRRRRDRLLKRKNRMMATLLRHGFFPQDETARKALEKTDPFALRAKGLDQILLPEEFARALFHINQRRGFKSNRKTDKKENDSSALKKAIGQLREAMQDTGCRTVGEWLYARHQQGLSVRARYRENRITKDDGKTKIEKSYDLYIDRAMIEAEFDALWAKQSELNPTRFHDTARAELKDCLLHQRPLKPVKPGRCTLLPDEERAPLALPSQQRFRIYQEVNNLRLLREGLSEESLTLAQRDQLAQALETNTKRSFTQIQKLLGFSGQFNLQDEKRTELKGNSTSAMLSKKEFFGSQWVSFDEAQQDAIVMQLVSEENEARLIAWLQTETGVDEITAERIANLPLAEGYGSLSAKALETILPALRGEVITYDKAVLAAGFDHHSHISHAATGEILPELPYYGQYLQRHVGFGTGKPEDPAEKRYGKIANPTVHIGLNQVRTVVNALIKRYGHPSEVIVELARDLKQSQEQRKEEQKRQADNQRRNERMRSVIADLLNTSPDRVRTSDLQKMILWGELSFNVADRRCPYSGVQISAQMLFSDQVEIEHILPFSQTLDDSLNNKTVAMRQANRIKGNRTPAEAAADFETQGWPAAEMLQRASLMPKGKRYRFAQDGLEQWLREDKGFLARALNDTRHLSRVAREYLSLICPQGTRVIPGRMTAMLRAKFGLNDILGLDGEKNRNDHRHHAVDACVIAVTDQGLLQRFAKASASAREKQLNKLVETMPLPWPSYRDHVQRAIQNIWVSHKPDHGHEGAMHNDTAYGLLGGGRVQVRKWVEGARTREISALKVIEFSDASASARHGLLPNGEPRPYKGYKGDSNYCMEIVRNEKGKWEGEVVSTFEAYQLVRQYGLTRLRHPALSVSARPLVMRLMIGDSVGIEMEGLRKIYRLSYMASAGTMAFSECHESNVDKRTRTKELSYLFKTAGSLQKSKGRRVAISPAGELKDTGFSG

SEQ ID NO: 15568 - protein, 1018 aa, unidentified
  REGION 1..1018: note = Cas Enzyme sequence
MNQEEIVPNMRYRLALDLGSTSLGWAMVRLNPQNEPCAVIKAGVRIFSDGRNPKDGSSLAVSRREARAMRRRRDRLLKRKNRMMATLLRHGFFPQDDGARKALVNTDPFALRAKGLDQTLLPEEFARALFHINQRRGFKSNRKTDKKENDSGALKTAISQLRQAMQATGCRTVGEWLYARQQQGLSVRARYRENRITKDDGKTKIEKSYDLYIDRAMIEAEFDALWAKQSELNPALFHETARAELKDCLLHQRPLKPVKPGRCTLMPEEERAPLALPSQQRFRIYQEVNNLRLLREGLSEEPLTLTQRDQLADALETNNKRTFTQIQKLLGFSGQFNLQDEKRTELKGNSTSATLAKKEFFGSQWTSFDEAKQDAIVMQLVTEENEARLIAWLMTETGVDDITAERIANAPLAEGYGSLSAKALEKILPALRAEVITYDKAVLAAGFDHHSHISHAATGEILPDLPYYGQYLQRHVGFGTGKPEDPAEKRYGKIANPTVHIGLNQVRTVVNALIKRYGHPSEVIVELARDLKQSQEQRKEEQAQQAKNQRRNERMREDIAKLLNTVPERVRTIDLQKMILWEELSFNVADRRCPYSGVQISAQMLFSEQVEIEHILPFSQTLDDSLNNKTVAMRQANRIKGNRTPAEAAADFAAQGWPLEDMLHRASLMPKGKRYRFATDGMAQWLKEDKGFLARALNDTRHLSRVAREYLSLICPQGTRVIPGRMTAMLRAKFGLNDILGPDGVKNRNDHRHHAVDACVIAVTDQGLLNRFAQASASAREKQLNKLVETMPLPWDSYRDHVARAIHNIWVSHKPDHGHEGAMHNDTAYGLLGGGHVQVRKRVDGVRIRETAALKVIEFADRQAHPRHGLLPNGEPRPYKGYKGDSNYCMEIVRTEKGKWEGEVVSTFEAYQLVRQHGLARLRHPALSLSGRPLVMRLLRNDTLRLDHNGEQRTVRICKMTEEGVIALADTTESNVDARTRTKDLSYIFKTAGSLQKSKGRRVAISPSGEMKDPGFFD

SEQ ID NO: 15569 - protein, 1028 aa, unidentified
  REGION 1..1028: note = Cas Enzyme sequence
MQKMRYRLALDLGSTSLGWAMVRLDSQTEPCAVIKAGVRIFSDGRNPKDGSSLAVSRREARAMRRRRDRLLKRKNRMMATLLRHGFFPQDETARKALEKTDPFALRAKGLDQILLPEEFARALFHINQRRGFKSNRKTDKKENDSSALKKAIGQLREAMQDTGCRTVGEWLYARHQQGLSVRARYRENRITKDDGKTKIEKSYDLYIDRAMIEAEFDALWAKQSELNPTRFHDTARAELKDCLLHQRPLKPVKPGRCTLLPDEERAPLALPSQQRFRIYQEVNNLRLLREGLSEESLTLAQRDQLAQALETNTKRSFTQIQKLLGFSGQFNLQDEKRTELKGNSTSAMLSKKEFFGSQWVSFDEAQQDAIVMQLVSEENEARLIAWLQTETGVDEITAERIANLPLAEGYGSLSAKALETILPALRAEVITYDKAVLAAGFDHHSHISHAATGEILPELPYYGQYLQRHVGFGTGKPEDPAEKRYGKIANPTVHIGLNQVRTVVNALIKRYGHPSEVIVELARDLKQSQEQRREEQKRQADNQRRNERMRSVIADLLNTSPERVRTSDLQKMILWEELSFNVADRRCPYSGVQISAQMLFSDQVEIEHILPFSQTLDDSLNNKTVAMRQANRIKGNRTPAEAAADFETQGWPAAEMLQRASLMPKGKRYRFAQDGLEQWLREDKGFLARALNDTRHLSRVAREYLSLICPQGTRVIPGRMTAMLRAKFGLNDILGLDGEKNRNDHRHHAVDACVIAVTDQGLLQRFAKASASAREKQLNKLVETMPLPWPNYRDHVQRAIQNIWVSHKPDHGHEGAMFDATIYTATGDSKSAAKTRNVIPFFPREQSSSAVLKRHQALGGATPYKGLLPNSNYCIEISKAETGEWLGEVLRTYDAYQVVRRFKNVEEGVRHLRNPKMTMSQRPLLMRLMIDDYIRAKVDDHWLILQVLKISSSGSVTFIKPNETNIGARYIAKLTAQKAQKNSAIYDPGALDDNFFQRAFSALSLQNSQARQIAISPIGELRDPGFVG

SEQ ID NO: 15570 - protein, 1053 aa, unidentified
  REGION 1..1053: note = Cas Enzyme sequence
MSQGMRYRLALDLGSTSLGWAMIRLNAENQPCAVIKAGVRIFSDGRNPKDGSSLAVTRREARAMRRRRDRLIKRKARMMQALVTHGFFPKIEAERKALETLNPYTLRAKGLDAALSPAEFGRALFHINQRRGFKSNRKTDKPDNDSSALKNAIKTLRQKLLDTGSRTVGEWLHKRDAAGELVRARYREVKVIKDNGKPGINKSYDLYIDRAMIEAEFDALWVAQAAFNSALFNNTARDELKDALLFQRPLKPVIPGRCTLLPEEMRAPLALPSTQRFRIYQELANLRILGNGLREQALTLEQRNKLAEALETGHKSFKTAIPKLLGLSGTVKFNLADAKRLELKGNATSAILSKKDLFGDDWWAFDEAKQDAIVFQLVKEENEAKLVAWLQSETGVDESRAEKLANVALPEGYGSLSAKALARILPALRHEVTTYDKAVIAAGFDHHSRLNTYGEVPGRTFDTGHKRVDLATGEIFDLHAFLALPYYGEALQRHVGFGTGKLDDTPEKRFGRIANPTVHIGLNQVRLVVNALIKRYGHPSQVIVEVARDLKQSKDHSIKDQEPFKLKTGCTCQRCVTARQAFNQIRNQRHRTLIAGILHISEERVRGADLQKMVLWEELSFDPAERRCPYSGVQISAAMLLSDEVEIEHILPFSQTLDDSLNNKTVSMRHANRYKGNQTPWDAFGKNQVQGFDYSAILQRAELMPRAKRSRFAEDGMERWLKDDKGFLARALNDTKYLSKVAREYMSLICPQDTRVIPGQMTAMLRGKFGLNDVLGINGEKNRNDHRHHAVDACVIGVTDQGLLQRFAKASADAREKQLNRLVETMPDPWPTYRAHVMLAVSRIWVSHKPDHGHEGAMHNDTAYGLLGNGRVRVHKQVEGKRTYIEDNLKVIEFGNAKAVHRHGVLPDGSPRPYKGYKGDSNYCIEIVRNEKGKWEGEVISTFEAYQLVRTSGLARLKHFSLSMSERPLAMRLIRGDFVRLNHDGEIKTLRLCKMSGDGVMAFAATIEANVDARTRTKEISYIFKTAGSMQKSEARRITISPIGELNDPGFKA

SEQ ID NO: 15571 - protein, 936 aa, unidentified
  REGION 1..936: note = Cas Enzyme sequence
AEFGRALFHINQRRGFKSNRKTDKPDNDSSALKNAIKTLRQKLLDTGSRTVGEWLHKRDAAGELVRARYREVKVIKDNGKPGINKSYDLYIDRAMIEAEFDALWVAQAAFNSALFNNTARDELKDALLFQRPLKPVIPGRCTLLPEEMRAPLALPSTQRFRIYQELANLRILGNGLREQALTLEQRNKLAEALETGHKSFKTAIPKLLGLSGTVKFNLADAKRLELKGNATSAILSKKDLFGDDWWAFDEAKQDAIVFQLVKEENEAKLVAWLQSETGVDESRAEKLANVALPEGYGSLSAKALARILPALRHEVTTYDKAVIAAGFDHHSRLNTYGEVPGRTFDTGHKRVDLATGEIFDLHAFLALPYYGEALQRHVGFGTGKLDDTPEKRFGRIANPTVHIGLNQVGLVVNALIKRYGHPSQVIVEVARDLKQSKDHSIKDQEPFKLKTGCTCQRCVTARQAFNQIRNQRHRTLIAGILHISEERVRGADLQKMVLWEELSFDPAERRCPYSGVQISAAMLLSDEVEIEHILPFSQTLDDSLNNKTVSMRHANRYKGNQTPWDAFGKNQVQGFDYSAILQRAELMPRAKRSRLAEDGMERWLKDDKGFLARALNDTKYLSKVAREYMSLICPQDTRVIPGQMTAMLRGKFGLNDVLGINGEKNRNDHRHHAVDACVIGVTDQGLLQRFAKASADAREKQLNRLVETMPDPWPTYRAHVMLAVSRIWVSHKPDHGHEGAMHNDTAYGLLGNGRVRVHKQVEGKRTYIEDNLKVIEFGNAKAVHRHGVLPDGSPRPYKGYKGDSNYCIEIVRNEKGKWEGEVISTFEAYQLVRTSGLARLKHFSLSMSERPLAMRLIRGDFVRLNHDGEIKTLRLCKMSGDGVMAFAATIEANVDARTRTKEISYIFKTAGSMQKSEARRITISPIGELNDPGFKA

SEQ ID NO: 15572 - protein, 1023 aa, unidentified
  REGION 1..1023: note = Cas Enzyme sequence
MAEKKQTSYRLGVDIGTGSVAWAAFEVNSQGPQRLMASSTVIFGEPVLPKEMKLKNEQRRHARLLRRQVERKKERISKIMHIAAKLEITPEKLATALLAQKETQQLWLLRIKALDQKISLEEYFLIVLRLAKNRGYNGDIPKAKKSGDLGKVASALTTTQTIREAHKEARTVAEAIWLNQSHTALNQKKFRKLADTGTYVLRKDILDEFDQISREQIKHHPALLNALDHYYPELQSKEKTLYFWDQQPATLLEALKVAVFYQRPLHAFTDLIGACSLEPEEKRVVAAHPAHQAFRIEKLLADLRWGDNKTGEKLSAVQKDFLRVKLESTAEPSFSAIYKELDKAGLMHPDGLIFNFHTPRRDTLRGNSTRSRLKSLGMLAAFDAMSENDQDALFVALANDVLAPESWGHDQAKESILQQYGETIVLFLDELAASENGLDRLKGLGFEAGRVSYGATALKRLSQVMREQGLDEFEAISLLYPSRSTHSTPTGELKTISDLNLRSPVVEHALDYTRRELLNVVRRFGPPQAMVIELAKEVKSTLEQRDATTKRQNQEERDNKEAREEIAKANCKITNTAILRYKLWKQQAKTCPYSGQIIGSVEEAVSGTRYEIEHILPKKLHGVGNRFEDVVLASKQFNGLKSGHETPFLAAQRLGAQKWNWETTEQAIKVISRAGSAFKAKAKIISDKTPFRLDALDDEAFIDRQLQETQWIGRIVQQWCSQLCSDVTVIRGGLTAELRRAWGFHTLLEEVRIAEGKHNSEKAATLFYKANRLGEPVFDKRSDHRHHMIDACVIALSTRQNYTAAVKARNARATGQRSNYEPPACPIPNLRQHLLKTLQGYCIWHVPDRLVSGLMFDQMPFSLDADGKTLRKDGKVSNNKFSPKMDRLITHQDRQGREHKKALRKSEAACMRVTDELMELVTIADFQKKYIRAGKLTIPKNERLIFKGDLLVFTNNNSVFRVAQLKESAGICAVIASETQTFDNLMGTGLNRKFGKISDLQKAKVINHPIELVEHIRATRTSQ

SEQ ID NO: 15573 - protein, 1158 aa, unidentified
  REGION 1..1158: note = Cas Enzyme sequence
MKKYRLGLDVGTNSLGWGVLELDEDGVPCAIAAAGSRIFAEGRDNKSKATLAATRREKRSARRRRDRFKQRQKFLLHELTRARLFPKSEQVRKELQKRNPLALRARALVQRLEPYEVSRALFHLNQRRGFKSNRKDRSEEAARGRVSRSARLLLEGMNLIGPEVLETEEYKKLSKEGKKQARRAEADARKQALRKLADNSELTYGDFLYRRQCQRKPTRARPGAGNDGKLYDIYPTRELYEDEFKKIWRAQSQHHAELMTEDVRRRIHRAIFHQRPLRPQKRGKCTYLPSEDRTFRAMPSFQRYRIYQEVNNLEWQDGHSSKRVRDYPGARDEIVRLLEKVATPKGLVNFREIKGVLKRLNYAEGDFKFNFEKAKRQGLEGNLTSNLMQDEDRVGEEWHSWPLERQDEFVDVLLNRTPEQQERDRNKLAGIGNLAPPDGAQDDSDDRRHLMERFGLSEFAADKCLNAPLKDDTSNISCKAARLMLAAMRDGLADPKTGEFSLPLQNEAAAAVAREVSGFVNPFRAKGDDGKYPLLDKLPYYGEAFGDGRHIIPGTGKEEDDDKTRWGGVTNPTVHIALNQIRLVVNELIDRFGHPHSIAIELGRELPAGEEKRREIEREQKKNQDRNQGFNENLLELGQKPNADNRLRLFLWEQLSDDPNGRCCPFSGDKIGIADLFSGRTEIEHLIPFSDSLDDSRANKVVCTRKANRDKGNRTPYEAFGDSPDGYVWGEIAARAKQLTDSKRWRFQKDAREIWQRDEDADFTSRHLNDTRYIGRLAREYLERICPVDRIDVLTGRLTSLLRGHWGLNSVLRDDQDGIGGKNRDDHRHHAVDAIVIGMTSRSMLQKVSAEARKLEEMELMSPQSLGRLFPPAADGKSAIDPWTGFRSDVADTVGHIVVSHKVRRKKLRRGSTDGQLHNDTAYGIIGEAEKGSACEVVTRKPVSALKMLKDIKRIRDPRLRTDFRSAFEDAAAGQEANAMQELARRRGIRRLRRTETLSVIPIKDAAGKPYKAYKGDSNWGIEIYSFPRGHKKADKWEGVVISRFEANQPHFQAGQTRRPHPAAKLVMRLQINDCVEMEQGGERKMYRLQLVGKHGGMSFAELHEANVDSRNRSKEDSFKYLLVSANPLKNRSAIKVHVSPTGRVSHEHRRLPRRQRV

SEQ ID NO: 15574 - protein, 1158 aa, unidentified; identical to SEQ ID NO: 15573
  REGION 1..1158: note = Cas Enzyme sequence

SEQ ID NO: 15575 - protein, 1038 aa, unidentified
  REGION 1..1038: note = Cas Enzyme sequence
MTTTLGLDLGPSSIGWALIDEESKTIIAAGSRVFPEGVDNFDTKKEKSRNEDRRIARGMRRQIARRAQRKAMLREALIRCGVFPKDAAEQQRVLAEDPYLLRARGVDPAAPSLTSHQIGRCLLHLNQRRGFLSNRKKDRGDKEVQGMLAEINELAADMGDKTLGQHLAERIAADPLQRIRGKHTRRSMLVDEFNRLWDTQAKHHPGLLTDELRYGSKGQPEVYPKVPQTGAKGRDWLAQFGIHGILFFQRKMYWPKSAVGLCELEPKQKRCPKADRLAQRFRLLQEVNNLRLIDPDNHTERGLAEDERALLLDKLGAKKEMTFDQIRKALGFLDTVKFNLEKGSRSKLWGLPVDHALKLAFGKAWGKLSEDDKNDVVRRLADNNRDDDQIAAMLRERWGLSEEQAEEVLSRAEQFPAGYINLSRMALEKLLPHMERGLVYQAKDEGNSAIHAAGYTRRDELQRRIFDKLPRPEDARDAKIGDIPNPVVKRTLTELRKVVNAIIREYGKPDAVHVEMAREVRQGEKARAETGKRMRDREAERDAAADKVRENGIKVNRDAINRYLMWEEQEHVCVYSGRAISFAQLFSGEVDVDDILPYSRCLDDSQMNKVVSFRDSNNEKGNRWPHQWLADSDPARYDAICQRARKLPYPKYRRFLQKELELDDFIARQLVDTGYIARATGEYLRCLFDQPHHVLGLKGQLTATLRWQWGLNSVLRHDDLDLKNRDDHRHHALDAIVVALTNRKRLQQLSRIDKQGGTAATGEVLPDPWDDFRGDVEKIVNQINVSHRVQRKVSGGLHEDTFYGPTQTPGEFVSRQSIDPSSPKGVTLSYSMVPGIVDKAIRELVMARLVARDGALKSGSSKVPANHFVPTLQMSSGVEVKKVRVRKLDQTIQPIRKGQSTEAWVKPGENHHAVLFKYQSGNRVACDAVYVNRLDATRRLGAKEPVIVRTHPDKKDAEFVMSLSPGELVLIKEDGRERLMAVSTLVSTQKRIHLVDARDARRSSDKKDKGLTPNSLITKYHARKVTVDPLGRIRWAND

SEQ ID NO: 15576 - protein, 1054 aa, unidentified
  REGION 1..1054: note = Cas Enzyme sequence
MSAAVNTLWNIDNVPISGTTKGNAMTRPDEGLRYRLGLDLGTGSLGWAVLELDAHGKPCRIVRMGSRIFGSGREPKTLTSLAADRRQARQMRRRRDRYIQRRTRLMHELVAAGLMPTDEVERAALKTLDPFELRARGLDEQLEPHELGRALYHLQQRRGFKSNRKADRGNVEKSAMKQAIRDLDAAMGDDETVGSHMWRRIQDGKRARIVPEKIGSKNSYEFYVDRAMIEREFDRLWETQRKFHSDILTDANKAKISHAIFDQRPLKPVDPGRCTLEPGQKRAPVALVSTQLFRIYQELNALRVQDQTSVTLANRPLTREERDAGVAFLGTKAKVSLSALKKELFGREPMTLSLEAGERAHILGDIVSAELSKASAIGARWWGLALAKQDAIAAVLHDAESDEEVITQLLAHGLTQEEAEGAADASLPEGYSRLSRVAIGKILPHLIDDWDTEADAALTYDRAVLAAGYASHSDLHGGELFEALPYYGQVLRRHTQDLANRDSYHVRTTANPGEWEFGKVANPTVHVGLNQVRVVVNALVERYGSPAEIHVEVARDLGQSAEGRREASSKRAQNEKANDALRAELAALGQRDTFANRERLRLYNELSALNHVCVLTGIPIPKSRLFTNDFQVDHALPYSRTLDDSLSNKILVHHTANQYKKARSPFEAYASLENREDNPEWAAILDRAESAFGKTSPKFRRFSADAMDRYENGEQDFIARQLTDTSYLARLTREYLATLVLAGDDGFHPERIVAMPGRLTSLLRGKWGLNSLLSDNGEKQRSDHRHHAVDGLVIALSDRSTLKAVTDANKKAEDKYRLANDAGVKKLLDDLPLPWVGFVDDAQAAVDRIVVSHKPDHNERGQLHEETAYGVHDGPDKEGRYLVAKSGEEPKWRPVVPIFRRGEGPDSALPYKAYVGGSNYCIEIVRNAKGRWEGEVISTFQANQADFQAFMGETSTFRSQSFSGRDLVMRLVAEDCIAVEREEGVREVLRFIKTSGASQMFFTNVREGNVDARSRDKSVAFAMLSKNPGPLQAIRARRVFVDPIGRVFDPGFAG

SEQ ID NO: 15577 - protein, 1054 aa, unidentified; identical to SEQ ID NO: 15576
  REGION 1..1054: note = Cas Enzyme sequence

SEQ ID NO: 15578 - protein, 972 aa, unidentified
  REGION 1..972: note = Cas Enzyme sequence
ADRRQARQMRRRRDRYIQRRTRLMHELVAAGLMPTDEVERAALKTLDPFELRARGLDEQLEPHELGRALYHLQQRRGFKSNRKADRGNVEKSAMKQAIRDLDAAMGDDETVGSHMWRRIQDGKRARIVPEKIGSKNSYEFYVDRAMIEREFDRLWETQRKFHSDILTDANKAKISHAIFDQRPLKPVDPGRCTLEPGQKRAPVALVSTQLFRIYQELNALRVQDQTSVTLANRPLTREERDAGVAFLGTKAKVSLSALKKELFGREPMTLSLEAGERAHILGDIVSAELSKASAIGARWWGLALAKQDAIAAVLHDAESDEEVITQLLAHGLTQEEAEGAADASLPEGYSRLSRVAIGKILPHLIDDWDTEADAALTYDRAVLAAGYASHSDLHGGELFEALPYYGQVLRRHTQDLANRDSYHVRTTANPGEWEFGKVANPTVHVGLNQVRVVVNALVERYGSPAEIHVEVARDLGQSAEGRREASSKRAQNEKANDALRAELAALGQRDTFANRERLRLYNELSALNHVCVLTGIPIPKSRLFTNDFQVDHALPYSRTLDDSLSNKILVHHTANQYKKARSPFEAYASLENREDNPEWAAILDRAESAFGKTSPKFRRFSADAMDRYENGEQDFIARQLTDTSYLARLTREYLATLVLAGDDGFHPERIVAMPGRLTSLLRGKWGLNSLLSDNGEKQRSDHRHHAVDGLVIALSDRSTLKAVTDANKKAEDKYRLANDAGVKKLLDDLPLPWVGFVDDAQAAVDRIVVSHKPDHNERGQLHEETAYGVHDGPDKEGRYLVAKSGEEPKWRPVVPIFRRGEGPDSALPYKAYVGGSNYCIEIVRNAKGRWEGEVISTFQANQADFQAFMGETSTFRSQSFSGRDLVMRLVAEDCIAVEREEGVREVLRFIKTSGASQMFFTNVREGNVDARSRDKSVAFAMLSKNPGPLQAIRARRVFVDPIGRVFDPGFAG

SEQ ID NO: 15579 - protein, 1114 aa, unidentified
  REGION 1..1114: note = Cas Enzyme sequence
MKYRLGLDVGTGSLGWAVLELNEAGEPFRVERLGSRIFGTGRKPQDNTSLAADRRQARSVRRRHDRYLQRRKLLLAELTAAGLFPTDLAERAALKILQPFQLRAEGLERVLTPYELGRALYHLQQRRGFKSNRKADKGLSDSGPMKIAIADLRATIPAGQTLGSVLWSRIGSGQGARARHEGDGTKRQYDFYVERDMVEAEFDALWEAQRHHHPALLTGAARERIHHAIFHQRPLKPVDAGKCRYEEGQRRAPNALVTSQLFRLWSEVNSLRVRDTRKLQLDPQPLTREQRDMAIDFLKDVPKRTLPQLRKHLFGPATGLKFTHEEGERASFNGDQVSAALCHPEAFGSAWWNLSLDQQDEIARRVDNLGALQPGIEPGQEVEWTDEAMMAWLKEVHGLDRAHAEYVTNVNLPEGFGRHSTIAMRKLLERLIGGWDIASDKALTYDKAVVAVAAAAIARGDTGEARRYQSHSERHKGDLFALLPYYGQVLSHYTQEVARTNDDSVRRALNPDEAEYGRIANPTVHIGLNQVRIVVNALVERYGAPHEIHVELARELGQSEKAREESSRVRAENERRNIVLDKELADVFGRPANHANREKLRLYKDLGPLNHACVYTGKKVTVANLFTKEFEVDHILPFQRTLDDSYGNKMLIHHSANAYKSGKSPFEAYGNSPEWPMIVERAAKIRRVDLGIAHACVFGKGEGRRACQDPTGRSSVNRFSEDAMERYNNADQDFIARQLTDTAYLAVATKEYVGSLIDPNRVWTLPGRLTGLLRGKWGLNNLLSGGSQKVRSDHRHHAIDAAVIALTDGMTLQRLTEANQRAGGIYGADEDGVKKLLKDFEQPWEGFYREMERKVAGIVVSHRPDHGPEGQLHQDTAYSVGDSRKKADGTEYLISLRKRYEPSARDKKAGVRGHTVSECGGDCKFHKPRWSSVIPIFRRGEGPDSALPYKAYIGGSNYCIEIVRLSSGKWAGEVISTFQANTREYQDFMKDKAAFHRTNCRGQDLVMRLVAGDTVVIEQGDLRRVMRLCVLSSAGRMSFAEHNEGNVDARDTETRKVRKGSGADPDSDMEEGSAIETDGLFSYMLKNSDPLRKLRARRVFVDPLGNVLDPGFTP

SEQ ID NO: 15580 - protein, 1004 aa, unidentified
  REGION 1..1004: note = Cas Enzyme sequence
LKRSKESVGDPTSFVLGLDIGASSIGWAVLKTDSNDGAQSVVACGTRVFEAGVEGSIETGRDTPRGVARRDARLSRRQTARRVQRRRNVYRALMSAGLLPQLSSLDHSGVDGAIREIDTHLRRQWIAEGDHKGQLVFPYQIRAAAAQGPLDPQSLGRAIYHLAQRRGFLSNRRVDKKDEKIGVVKEGIASLAADMTAGNHNTLGQFFASIDPRDIRIRNRYTHRTMYQHEFDAIAAANTQVPAETWAAIRKCIFFQRKLKSSAHLIGRCTCIPKARRIPMWHPLFQRYRILEKISNLRVRDPSDGIWHPLPDQERAVLLSYLTENEKATPAKIKTLLKLKGRELSIETEGSSAMIGNRTGCAMRAVFGERWNGMSPDEQMKALLDVHSFEKDESLKRRGERRWNLSPESAAKLASTRLEPSYASFSAKAIVLLLPHLERGLNSRQAIDIVFPSRFAVAESCDRLPPVSEILPDLRNPAVGRALTEVRSLVNQIIGRWGKPTTVRLELARDLKKSRDQRDLISKENRSQERIREQAAVRVVQEAGIPRPSRGDIEKCLLAEECDFTCPYTGKKFGMRDLFGPHPTVDVEHIIPFSRSLDDSFVNKTLCVADENRQVKRNKTPWEAYGRMGERFSEIMGRVDKFRGGRASAKRERFLMKDVGEELLSEFASRQLNDTRFASTMAAKFVALLYGGVNDASGTKCVQASTGGVTARLRRAWRMGYALHDEGEKNRDDHRNHALDAIAIALSSPGIVKRMADAARRGAEAGRDGKLLEFSEPWSGFLEDVKAAISTAVVSHRPDRRLAGKLHEDTYYSRPLRVGNEWVHRVRKPTANSEAAQSTKTRGQVRHTRTEGDRTPVAIETQTGTRWVAPGSNHHMAIYEVVGKSKTSWEAETVTRLEAHRRKRCGEPIIRTDRGDGSRFLFSLRSGDTIRLRDQDGLAMLAVVRSASGKTIEAIGINDARSTKDVRDGGVSMGRLRLSLTKMRARGVEKVDVNPIGVLTVARD

SEQ ID NO: 15581 - protein, 1004 aa, unidentified
  REGION 1..1004: note = Cas Enzyme sequence
LKRSKESVGDPTSFVLGLDIGASSIGWAVLKTDSNDGAQSVVACGTRVFEAGVEGSIETGRDTPRGVARRDARLSRRQTARRVQRRRNVYRALMSAGLLPQLSSLDHSGVDGAIREIDTHLRRQWIAEGDHKGQLVFPYQIRAAAAQGPLDPQSLGRAIYHLAQRRGFLSNRRVDKKDEKIGVVKEGIASLAADMTAGNHNTLGQFFASIDPRDIRIRNRYTHRTMYQHEFDAIAAANTQVPAETWAAIRKCIFFQRKLKSSAHLIGRCTCIPKARRIPMWHPLFQRYRILEKISNLRVRDPSDGIWHPLPDQERAVLLSYLTENEKATPAKIKTLLKLKGRELSIETEGSSAMIGNRTGCAMRAVFGERWNGMSPDEQMKALLDVHSFEKDESLKRRGERRWNLSPESAAKLASTRLEPSYASFSAKAIVLLLPHLERGLNSRQAIDIVFPSRFAVAESCDRLPPVSEILPDLRNPAVGRALTEVRSLVNQIIGRWGKPTTVRLELARDLKKSRDQRDLISKENRSQERIREQAAVRVVQEAGIPRPSRGDIEKCLLAEECDFTCPYTGKKFGMRDLFGPHPTVDVEHIIPFSRSLDDSFVNKTLCVADENRQVKRNKTPWEAYGRMGERFSEIMGRVDKFRGGRASAKRERFLMKDVGEELLSEFASRQLNDTRFASTMAAKFVALLYGGVNDASGTKCVQASTGGVTARLRRAWRMGYALHDEGEKNRDDHRNHALDAIAIALSSPGIVKRMADAARRGAEAGRDGKLLEFSEPWSGFLEDVKAAISTAVVSHRPDRRLAGKLHEDTYYSRPLRVGNEWVHRVRKPTANSEAAQSTKTRGQVRHTRTEGDRRPVALETKTGTRWVAPRSNHHMAIYEVVGKSKTSWEAETVTRLEAHRRKRCGEPIIRTDRGDGSRFLFSLRSGDTIRLRDQDGLAMLAVVRSASGKTIEAIGINDARSTKDVRDGGVSMGRLRLSLTKMRARGVEKVDVNPIGVLTVARD

SEQ ID NO: 15582 - protein, 911 aa, unidentified
  REGION 1..911: note = Cas Enzyme sequence
MSAGLLPQLSSLDHSGVDGAIRETDTHLRRQWIAEGDHKGQLMFPYQIRAAAAQGPLDPQSLGRAIYHLAQRRGFLSNRRVDKKDEKIGVVKEGIASLAADMAAGNHNTLGQFFASIDPRDIRIRNRYTHRTMYQHEFDAIAAANTQVPAETWAAIRKCIFFQRKLKSSAHLIGRCSCIPKARRIPMWHPLFQRYRILEQISNLKVRDPSDGTWHPLPDQERAVLLNHLTENEKATPAKIKTLLKLKRRELSIETEGSSAMIGNRTGCAMRAVFGERWNGMSPDEQMKAILDVHSFEKDESLKRCGEKRWNLSPESATKLASTRLEPSYASLSAKAIGQLLPHLERGLNSRQAIDIVFPSRFAVAKSCDRLPPVSEILPDLRNPAVGRSLTEVRSLVNQIIGRWGKPTTVRLELARDLKRSRDQRDLISKENRSQERIREQAAVRVVQEAGIPRPSRGDIEKCLLADECDFTCPYTGKKFGMRDLFGSHPTVDVEHIIPFSRSLDDSFVNKTLCVADENRQVKRNKTPWEAYGRMGERFSEIMGRVDKFRGGRASAKRERFLMKDVGEELLSEFASRQLNDTRFASTMAAKFVALLYGGVNDASGTKCVQASTGGVTARLRRAWRMGYALHDEGEKNRDDHRNHALDAIAIALSSPGIVKRMADAARRGADAGRDGKLLEFSEPWPGFLEDVKAAISTAVVSHRPDRRLAGKLHEDTYYSRPLRVGNELVHRVRKPTADSETAQSTKTRGQVRHTRTEGNRTPVAIETKTGTRWVAPGSNHHMAIYEVVGKSKTSWEAEIVTRLEAHRRKRCGEPIIRRDRGDGSRFLFSLRSGDTIRLRDQDGLAMLAVVRAASGKTIEAIGINDARSRKDVQDGGASLGRLLLSLTKMRARGVEKVDVNAIGVLTVARD

SEQ ID NO: 15583 - protein, 1015 aa, unidentified
  REGION 1..1015: note = Cas Enzyme sequence
MGKMNYRLALDLGSTSLGWALVRLNAEKVPCAVIKAGVRIFSDGRNPKDGSSLAVSRREARAMRRRRDRLLKRKARMLQTLVRHGFFPQSEPQRKALEKLEPLALRAKGLDQPLLPEEFARALFHINQRRGFKSNRKTDKKENDSSALKNAIGQLRQAMQDTGCRTVGEWLFARHQQGLSIRARYRENRITRDDGKTKIEKSYDLYIDRAMIEAEFDALWAKQAELQPQLFHAAARDELKDCLLHQRPLKPVKPGRCTLMPDEERAPLALPSQQRFRIYQEINNLRLLREGLSEEPLTLTQRDQLAQALETNSKRSFTQIKKILGFSGQFNLEDDKRKELKGNSTSATLARKELFGSQWTSFDEAKQDAIVMQLVSEENEARLIAWLKTQTGVDEPTAERIANTALPEGYGSLSAQALAKILPELRQEVITYDKAVMAAGFDHHSHISYAVTGEILQALPYYGEYLQRHVGFGTGKPEDPPEKRYGKIANPTVHIGLNQVRTVVNALIRRYGHPSEVIVEVARDLKQSQEQRKEDQKRRADNQRRNERMRGQIAELLQTSPERVRTTDLQKMILWEELSFNAAERRCPYSGVQISAQMLFSDQVEIEHILPFSQTLDDSLNNKTVAMRQANRIKGNRTPWQAKDDFAAQGWTAADMLARVELMPKNKRYRFGENGYAQWLREDKGFLARALNDTRHLSRVAKEYLSLICPQNTRAIPGQMTAMLRAKFGLNDILGLNGEKNRNDHRHHAVDACVIAVTDQGMLQRFANASASARERQLNKLVDTMPLPWGSYREHVQRAVENIWVSHKPDHGHEGAMHNDTAYGLLGDDRVHVRKMLDGQRVREESTLKVIPFTNARANARHGLLPNGEPKPYKGYKGDSNYCIEIVRNDKGKWEGEVISTFEAYQLVRQGGVKRLRHPTLSCSGRQLVMRLMIDDCIRLKNEQNQQMTLRVAKVGGNGQFFMAPINETNVDARNRDVNDSFSYVSKMAGSLQKAQGRRVSISPIGELRDPGFTG

SEQ ID NO: 15584 - protein, 916 aa, unidentified
  REGION 1..916: note = Cas Enzyme sequence
MDKHHCKTMAETFCAELGIDPLGNKKSSHVRFKGLNAAFPREIVEAEVRHILRAHFGKLKSVDECLERTLLEDWHTVNCAEIKLPSRYAGGLLFGQLVPRFDNRIISVCPISGHKVPSRNSREFYEFRWAMQLANIAVAAEGDRDLRPLTAAERESIDKVMRESGHLTAKQLKEVVRKETNCVRDNLDTMLMHPDAKEALLLDPVTKLLTSAKIAQLWRAMPQQLQKRFAGKLRQGKQVALAEVRAALVLLNVSTLAFDAEVQRQIDSANSKGRKKQRQITSDEFLAEPLSIPRLDGRAAYSREILRQAVAEVMSGKHPKEKDGCLYRSEEIRHAQINREIAQQTNNHLVRHRLLILQRLLRDMISEFAAGDKSRIDGVTIEVTRDLREMSGKTNKQIAQELGLRLANFKSVVEKLEADESFMRKLRDLGWHRIPPGIIRKARIAEDLGWTCPYTLQKYEPIDLLTKRVDKDHIVPRSERMSDALDSLVITFSTINKWKGKRTALKFIEDEQGKSVPDLPNLSVITANRYKQFVEALEAFKGHDDDKRRKRKRKELLLLRDYEEQEFTPRDLTQTSQLVRLGALAIRKDFIGEKKQPVITPLPGSVTGTLRKGWNRNLLGCLSTACPQVLDANGEIKTKTDIRDITHLHHALDAIVLGLSAFYIPNNGRIWELIVKRKLDDTEKLQLRALGIFDFSPEGFGLKALPPEVEKQLRARLAEKRVVQHIPARIEGLRVEQNIWRVVKREKGETTLRQQIRQPDGKRIEKEAKEKNAKLLGLAPLMGNGKLQKLKGVLIIPENFGVALDPEPTIIPFHKVWTRLEELKKSNNGKMPRLLRNGQLIEVPNGIYRGIWRVFSAKNNASGMALDIGHPDVVRLKNKVQGHRINVLLFSLLKSGMQIVKTPLTGMATCPSTSSA

SEQ ID NO: 15585 - protein, 1107 aa, unidentified
  REGION 1..1107: note = Cas Enzyme sequence
MKSKTHTLSFDIGYASIGWCVLSANKEELDVPEILGTGVVTFPTDDCLASKRRDLRRTRRHIRSTRQRIERIKLWLLSRGFLTREDLDRPGHPAPFLLAAAALQEHRKLNAHELWTVLRWYAHNRGYDGNSLWSRDESNDDDTEKETNAKSLMAQYGTATMCETVCACLGLSPKDHSKRISSALPYKTLNAAYPRQIVRNEVAELLRKHQLLDAESVRFLLKAEALTKTERDALSATGIKLPLRYHGGLLFGQLVPRFDNRIISRCPITWAQRYDDEIANGKTEKEARHLAEKYSKVPAAKSAEYLEYRFARILANLKIDGESIPSESRRHLYDVARKQGSLTATDLKKALASLHPKAKTNVSDYFTLHPDSAKALVLDPVADAVRRASGKNSTLAPIWPHLSDEANEFIKARWAKNQGISLAEILQISGDEARLLKELEPAFAKANKPKNGKTKFADIAQYLIRTTVSPEFPSGRAPYARPVLRRVVAEVLLGQDPTKPAGKTSASEGENKPEDGVLYQLQNPHSRANELRGERPLDQLTNNHLVRHRLLILERLVADLASEFNIPENPNIIVEVARELKEFSGKTAKEIASELNSKLKDFKATIAYLEKHAPDLSLNGGLIRKARIAMDMGWQCPFTGDLYDAYALNKLESEHIIPYATRNTNALHALVLTWPEINRMKGKRSALQFIEEEGGKKVPNKENLCILPRKPYEDLVGKLKVSGHDDDRRRQKARKALLLTTQLDEKELGFTDGQLTQTSQLMKLAMRGLKKRFPAAQIDPVPGPVTAEIRKGWRLTGTLAQVCPEILDDDGKPKPKDEIRSLTHMHHALDAATLALIAHFFPFRQHGQDQKGKLWKAMLKRNKSAEEIDLLTRTRLYKRTTKAKPQSDGTVREQADAQLTDLPADLKNSLGRSLAQARVMQHIPADRSGAKAELTTWGIIKREGYNDDARITLQQNLTVVEEGRRKRTRKEREERAGKLLGPNPKSGLGKLAEISGAMIIGENYGLALDPTPAVIPFHNVTARLAEFRAANCGNPVRILRNGMLIHIANWPGKNGVWRIMSCKASMKVDLSKTQETKASWREVAVASLLTRGLSILPQRYTGHPITD

SEQ ID NO: 15586 - protein, 1096 aa, unidentified
  REGION 1..1096: note = Cas Enzyme sequence
MSDAVSFSFDIGHASIGWAALAADGKVLGCGSVIFPKEDCQNFARAGLRRQRRHVAATRNRMKRLRQLFVEKGVLTVQEAYEQAQPSSGVMMPWLLAAQALEKGRQLTWRELWQVIRWYAHNRGYDGNAEWAGDGPTAEDTEKVQNAKQMMEDSGADSMAVAICRFLEVDLETGVLHGDKYFKGQNVAFPRETVRGEVRTILTQAESYLPGCDVTFIRMVMDELSPEEAKRFGLPERYRGGLLFGQMIPRFDNRIISTCPISGEKTPLKHCPEYYRYRWAELMANLAVEVDGVKRPLLPREREALHACMTEQGYLTKGQLKKALEEITGGSAKQVDDYFLHAEMEKALVLDPVRKEVTGSKLGPIWQTLSSKHQKIFANQFFRDGKIKLEDWRARLLKDGEDVSAFDAAVEEVVAQTKPRGKRKAEPLTVDALMTQVHRLGAAASGRAPYSRQLMQQAVEEVMAGLHPKAVKSDDPSNPQQRNGCLARTNEILERERGRRLDEQTNNHLVRHRMLMFRRLLEDLYQQYAGGDIRRVGPTTIEVARDMVEYSGMSAQDKAKLFGQKVAPFNRAEKYLREAFEDADIFKPITYNMIRKARIAMAQNWVCPYTGRSFGPQEIAYDQVDFEHIVPRSQKISDSLDGLVITFREVNKMKGNRLALDFVRQCAGTSVAVVYEDENSEIVSEKRFRQIVDGWYPKRDPRSLPNATDEDFIRWRRKQNLLRETYDEKDNDFTPRLLTFTSHLNKLAALEARKFWHAEAAKVDALRQVEPEHLVGHMQGSVTHRFRSDWKLLGCLAEVCPEVVEKVGDDSRLLPKAQIREITHLHHAVDAVAIGLTRQCFARLGYPVLEREKCQTILKRKASNNDERDWLASLGIFQFDHQGRHHLKPLDEDIRASLIAALAQKRVVQHVPASMSGLKVEQTQWRVLHGPDGDGKLTLRQRGPRENGHRRFKEAKEASSRVLGFAPTREESKLKPRQAGIVISENFGAAISDAGATVIPFHRVWNRLQELKGADGKPPLVIRRGQVIQVANGRYKGLWRIHSVKDNKTGVSLDMARPELVKAENKKAGCGMNVRLASLVKNGLRQYETTLTGDPM

SEQ ID NO: 15587 - protein, 1084 aa, unidentified
  REGION 1..1084: note = Cas Enzyme sequence
MDTPVTTPDVSFSFDIGDASIGWAALSTPPRAVYPKILGCGVLLFPKDDCQNKERAKNRRQRRHIAATRNRVARIRNLLVSMGALTEEQAEAQKKGASGIMMPWLLAARALHGAALSWMELWQVLRWYAHNRGYDGNARWARAGEEEKEDIKKVQKANALMEQYGTSTMAETICAFLGVNPEDQNPHIGEKAPYFKGESMAFRREIVRGEAEKIVRSQFGKLPGCDAAFLSLLMGRDLTAEEKKRFKLPQRYAGGLLFGQMIPRFDNRIITKCPVTGEKTPLKHCTDYYRYRWARLLANLRVKEEGADNKRALTAPERAELTRRMEKTGGLTKTQLKKALEEITHADAKSLDDQFFSPETEKALVLDPVRDALSGAPFENVWPLVPEALQRRIAGEFFKSGRLSLADLLAAVRKAGADTTQMENAIRLDFLKAAKRKRKEPLTYEAYLADVKHVAEASGRAPYSRPVLRKVYEEVLSGMDPAAIADSQPPSAPEKRNGCIAITNEFLDREAEKRLDDMTNNHLVRQRMGMFRRLFGELFKTYAGGQPSRVAEVTIEVARDLQEYAGKNAKEKAALFSEKAKPFQKAEAVLRKGFEEAGIARHPTYSMIRKARIAMAQNWTCPYTGRHFSAADIANDRVDFEHIIPHALRRSDALEGLAIAFRDINIAKRKRTALEFIRSGEEGLMTESRFREYVEGLYPKSRPGRDASDEDKINWRRKQWFLREEYDERDAEFTKAALTVTSHLNKLAALEARRILRTSAKEAGLAESLPEHRVGHMVGAITGEFRKEKKWDLLGCLEPVCPEVVDPVTGKHLPKGEIRNITHLHHAVDAITIGIARNIFPGHVVKREVCEAILSRRPNPAQRSTLESMGVFFFDKDGSAHLKDMPEELRQNIIAKLAECRVVQHVPRSKHGLRAELTQWGVKHYDAEADCVKLVQYTRDSANGNARKLKEAWENPRKLLGYNPVGESKLKPRKAVVVIGVNFGIALLPEPVVLPFHKVWERLRELAEKNGGKIPTVLRQGDVIDVPNGRYKGRWQIRSTKDNAAGVAVSIAKPHLVETFKENVLVSSLIKSGMTIVRQPLIGS

SEQ ID NO: 15588 - protein, 1065 aa, unidentified
  REGION 1..1065: note = Cas Enzyme sequence
MSNDAKNKPAILGCGSVIFGADDCLASKRRGFRRQRRHIRATRQRIARIELYLKHLGVLSEKQIADKHQAGGGHSAPWLLAARVLRGGATLKWPELWDVLRWYAHNRGYDGNRKWSENDAIAVQEDVEKVGNAMALYEKFGTSTMCETWCAISGLDPLGKKISCNLGGLARPKAMKAAFPQEHVEKEVRRVLEAHVGKLKGCDDKFIDALLEDWQKAGCSEIKLPLRFQGGLLFGQLVPRFDNRIIASCPLTFEQAYQDALSDGASPETASLHARKVSKVPGKSCPEFLRFRWAMLVANVRIASGKGAVRSLTPAERVQLDDAMRSAGFMTKGTFKSAVRSLTEGASDNLDQMFLHPDADDALVLDPVRKALSKEPWNDLFATLSADQQRKVIGRLRRQKPVDIEALVELGGKAAQAIIEALSSTQAASSTTGRGKKSKASNEEPPKPSLQVRRPSGRAPFTREVMQKASDFVFATDRHPTEEGGPLYRTDAVRMAQLQRAIDEQTNNHLVRHRLKILQRLNSHIVEVYAGGKANAIDRVALEVNRDLRSLSGKTTKQIAQDLGLRLSNFKSVAKKLEDDFAGHDVRITAGLIRKARIAEDQSWKCPYTGQSFSAFDLLHRRVDKDHIIPRSERPSDSLDSLVITFSEVNKMKGKRTALRFIEECGGQSVEGLPTLSVKTRTQYLEDVKALETYRGHDDDKRRKRKRKDLLQLAAYVEKTFTPRDLTQTSQLVRLGAQMLEAEFADSKKKPVITSLPGSVTGAVRRSWGVLGCLAAANPDVLDPEDPDENGHPRVRPKTEIRKITHLHHALDACVLALADRFLPRDGGAWELLVKRRLTPAEQKRAQDLFGRQVNISKDGQLELNDLPAFLKQQIASRLAEHRVVQHVPAEMSGLIAEQNPWRVLEISNGQATITQRIRQDDGTRPRKTKTEKAGKLLGLSPDGDSAKLKANKSVLVIGENFGAALDPHPQIIPFHKVWHRLQELRKANKGNSPRVIRNGMLIGVQGGAEKRRGLWRICSVKNSKTGIKLDVARPDECAATWREVAVSSLLRDGMVIVPARLCGN

SEQ ID NO: 15589 - protein, 1140 aa, unidentified
  REGION 1..1140: note = Cas Enzyme sequence
MAQLLFSFDIGHASIGWAVLDTSAERLPQLKGCGSVLFPTDDCLASTRRQLRRQRRHIRSTRMRITRMKRLLGQLGVLKPSQLDEPGGPWPWKLAARVHAGGPLLSWRELWDVLRWYAHNRGYDGNRKWSRDDEEDADDTEKVKNARFLLEKHGKATMCETICAKLKINPLSDDKKTSPIAYKTSNAAFPRDVVRDEVIALLEKHVGKLPQLSPALITALCAEDNTPKDGASVRGVLKQLGFDAHLPGRFVGGLLFGQAVPRFDNRIIGECPVSGEKRPLKDCREYLEFRWAEILANITVRRTKDGDKTPLSAEERKALTAIARKEGGFTAGEFKKAVLEISKAQASNVELMMTHPDAPDALVLDPAIRFTKTNGMVKAVWDELPTVVQKRILGRWNKRRQVSWAWLLQQPEAPKNLEAKLQAAWKETKRKPRKGEEEAKWEDRVKQSIAPVFPSGRAPYSRLKMMEVVAQVMEAKKHPRTNGGVLDPELIKKHDLAKEIDDLTNNHLVRHRLKILLRLVDDMVKTYAEGDPKQVDKCVIEVARDLVEFSGKNNYDIKAEIHGRLKDFESAAEMLDEAIIGTGKQISAELIRKTRIAQDMSMTCPYTGHIYCMKEVIYGKVEKEHIIPRSKRPSDSLDSLVLTFPEINREKKDLTALQFIRQFAGRRFKTSCGTLDIWSEAKYRAFLEKHGLDPKSKPTRKEAARRKIHFDDLVRNWKRRAKLELESYEEREFTPRDLTLTSHLCRLAARSLEQYFSFPAHVRQRIQGPTPRKSELQPFDKPQKTPSVISMPGSVTAETRKAWKCLGCLGPACPEVMQEVQDTDKNGELKFDKAGKPVMKKVVRTKGEIRSITHLHHALDACVIAFASHVMPKDGKLWEQIVTRKVLKHDEEAFRERYGWHGLLKLAEPKDENSRGKTRKLEVLDLPDTFKKQIVEALKERRVVQHVPADMSGARLEMNTWRVLRQEGDQVHLRQRTFGPKDIDPETGARNRTTKEAKERATKLVGLKPGKLSSLKGALVIGENYGVALEPEPTMIAFHQVKKQLDELRMKNGGKPVTVLRNGMLILVPQGDFAGVWRIRSCKDKAAKGLVLNLTHADRCPSTATNAVWAKEDVRIRTLIKAGMTIAEADYCGIAPFETT

SEQ ID NO: 15590 - protein, 1102 aa, unidentified
  REGION 1..1102: note = Cas Enzyme sequence
MKKLSFAFDIGHASIGWAVLDITQNQTPAIKGCGSVLFPTDDCLASTRRQLRRQRRHIRSTRMRIARMKRLLAQLGVLTPAQLDEPGGPWPWKLASRVHAGGPLLTWRELWDVLRWYAHNRGYDGNRKWSRDEEEDTDDTEKVKAARALLEKFGKATMCETICAKLKIDPLSDDKKTSPIAYKTSNAAFPRDVVRDEVIALLEKHIGKLPKLDAAFITALCAEDNTPKDVKSVRDVLKELGFDAHLPGRYVGGLLFGQAVPRFDNRIIGECPVSGAKRPLKDCREYLEFRWAEILANITVRHTKEGDKVPLTAEERKALTDIARKEGGFTAGEFKKAVLEVSNAEASNAELMMTHPDAADALVLDPALRFTKTNGMLKAVWNDLPEVLQKRTLGRWNKRRRVSWAWLLKQPEAPNTLEAKLQAAWNDTKRKARKGEEEAKWEDRVKQSISPTFPSGRAPYGREVMKRVVEQVMEGKMHPRENGGVLDAEVIKKHDLGKEIDDLTNNHLVRHRLKILLRLTDDMVKTYADGDPTQVDKCVIEVARDLVEFSGKTNKEVAQELGIKLKNFKDVSKRLSTDLEGTSIPINAGLIRKARIADDLDWKCPYTGHEFDPITLARGKVDKDHIIPRSLRPSDSLDSLVVTFAEVNKWKANRTARQFIEEEQGKPVPGKPELTIFTVKQYEAFVNKLAGEKKPNRFTPGQGSLDDKLRQWSRKQKMLLKDYEEKEFTPRDLTVTSHLVRLSARQLEKRFVHLQNTDRIVSLPGSVTGVVRKAWDCLGCLAPACPEVMAMLPTVNEKREYVMDADGKPSLSLQVRPKGEIRDITHLHHALDACVITFASHFLPKDGKLWEQIVTKKVLRHDEEAFRERYQWHGLLKLAEPKDERDKARAKKLEVLDLPDTFKKQIVEALKERRVVQHVPADMSGARLEMNTWRVLRQEGDQVHLRQRTFGPKDIDPETGARKRTTKEAKERASKLVGLKPGKLSALQGALVIGENYGVALEPEPTMIAFHQVKKQLEELRKKNGGKPPRVLRNGMLIRVSSGDFTGTWRVRSLKNLAAKGLVLNLTHADRCQSEVPRVAWSKVEVRVNSLIKGGLVLLNEG

SEQ ID NO: 15591 - protein, 1104 aa, unidentified
  REGION 1..1104: note = Cas Enzyme sequence
MSRYVLGLDIGITSVGYGVIDVDNDLFVDYGVRLFKEGTAAENETRRTKRGSRRLKRRKSNRLNDMKNLLKKNDLYFDNYRNYNPYEMRVKGLNEKLSSKELCTAIMHITKSRGTTLEVLADESQDDEGTKATLSKNAKELSNGKYVCEVQLDRLNNNHRIRGAENNFKTEDYVKELKEILKHQDLNEELCNQIIEIVSRRRRYDQGPGSEKSPTPYGSYRLVDGVLKHVNLIDEMRGRCSVYPNEFRAPKQSYTAELFNLLNDLNNLTIKGEKITVEEKKKVIAVVNEKGNITVKQLLKLLDAQEDEVTGFRIDKNDKPLITEFKGYSKVLKVFKKYNQQELLEDKLIVDQVIDICTKSKGIDERKKDIKELYPEFDNELIEELASIKGVSAYHSLSFKAMHMINKEMLTTEMNQIQVLHEIEMFDKNRKSLKGKKNIEPDEEAILSPVAKRAHRETFKVINALRKQYGEFDSIVIEMTRDKNSKEQVKRINDNQKRFKNENDQVDEIIKNAGIDPERVNGKTKTKVRLYLQQYCKTAYTQQDIDLHTLIFDDKAYEIDHIIPISISLDDSLSNKVLASRLENQQKGNLTPMMAYLKGKFTDGNLERYKLFVNSNKNFNHKKRSNLLDEQDITKEDVARKFINRNLVDTSYACRTVLNTLQHYFKDNEIDTKVHTIRGQSTNIFRKRINLQKDREQDYFHHAIDALIVASLKKMNIVNSYLMHYDYSDLYDEETGEVFDVLPDKQFIDQRYISFISDLKNIYQESNQYNLGYITQEQMHYPLIKVSHKIDTKPNRQIADETIYSTRNIEGQDMLVEKIKNIYDPKEKKAIELVNNIINDDTDKYIMKHKDPQTFEKIKEVVLNHFNDYKDSKEYYVIDKKGKYSLKEESPLTSYYNENGAITKYSKKNNGPAITSMKFYSEKLGNHLAITSNYNANNKKVILKQISPYRTDFYLSPEGKYKFVTIRYKDVFYKETIHKFVIDENWYHEEKTKKGIQDGWKFVCSMHRDELIGLIKPEGKKFVYDASINGGQTQYHDGKHYEILKFTATNNDKANMFEVKPINTNCSKRLMPSVGTFIKIQKFATDVLGNMYEVKDNRLKLEFD

SEQ ID NO: 15592 - protein, 1221 aa, unidentified
  REGION 1..1221: note = Cas Enzyme sequence
MKTLGLDLGTNSLGWAVVDTDVAENPIPHKGVVVFEEGVNREQSDSLETPATVRRAKRMARRLRFRRHLRRRLVLKILIERKMCPLTQEELKAWSQTGLFPKENAAFIEWLKSTDTRNPYCDRARAATEKTDPLTLGRAIYHLAQRRGFKSGRKDQPMEGEENNSAKAKDLKGLKKEIDDLKEKLTTTGLTLGQYFFNEIKAGRKVRKQRTGRGEHYEKEWAKIAEVQNLDQAFADKIAHVLFWQRPLREQSHLVGKCPLEPKRKRIQIGHPDFEEFRALSFVNNIRLVDCEKKIPLTAEQRAVVAECFVRKTPFEFKTIRKALEKKFHNELKTATFNFEDSVSLSPSKITVALMDVLPDVAHWQIAFDALTFFDRFVDGDEKLKAWAQLHEIQRKDKHGILRKPSKGLGLSEEAAEKFIKIRIPEGRASYSLHAIRKILPFLRKGIELSQAIFLAKCPDVLRDFTENEDAFIEELDRINEDYRKDKKNAEREGTKPERIETLEERRREWFDKKVKSNLALGVKEPFEMLYFRDPKADSSYAALGDEERTLVKNGILPSVKLGMIRNPLVQRSMTMLRRLVNELRRKGIIDKDTRIHIELARDVNSRNDRRAILEWQKQNEAKRKEATDALEQYIPQPTEMDKLKYILWTEQHFKCPYTGKQIPLCPYTGKEIKDITFFSGFDIEHTIPRSRSGDDSQANKTLCDSDFNRNIKKGQMPSELPDHDEILARLRPWKEKIDELKKLKEKQKKTAKGVSKDNPDARADAQKKMLVTKLELKYWEDKYYRFTKKPDDVTPSFISRQLVDTGIMTRHAVALLKTVYSDVYPVNGQAVAFARKMWKVQAADETKDRSDHTHHATDALVIAALSRDRFQKICAELKADDERKNPQFSVAPPFDGFAQAVYDATATILVKHVTRHNELKQTKRKSIRLSSPKKTLNGIITRAETGGDTVRGQLHEDTFYGKICKPGQTKPVCVIRKALVSCTEKDVAAIVDATIRKCVQDTLAQMGGDFKKAIAQDVFKMASGVPIRKVRVEVTPHTSLNEIRQHMTTPSKHDYKKPVYACTAAGSNLGIAVYQHADGKQHFIIEKLLDHVREVVPQPPSGTTLVGRILPGAMTLARPQTECNEVLPHIKSPVLLYKVRKFSGNNITLWFHREARAKKDLELALSSIGKSSSGASSIDFKHPHEILCLNLKKAWSSFLFEGIHFKMDLDGSILFKDNLC

SEQ ID NO: 15593 - protein, 1050 aa, unidentified
  REGION 1..1050: note = Cas Enzyme sequence
MSYTLGLDLGSNSIGWAAIDLEGGQFHGAGVRVFPEGVDRDTTGTEKSKNLQRRTARGHRRQIARRARRKALLRQAIRECGWWGDDSHEQLVGVDPYFLRAKALDEQLTLPELARVFMHLNQRRGFLSNRKADRGRAKENSETLQEISQLQDDIVKSGARTLGEYFHHLREQDPEQGRSLRVRGRHTHRLMFLQEFERIWESQQRFYPDILTEKLRFGRHGRQDYPKEPIPRKRTGGATFLQEFGFHGLLFFQRSLYWPKSVIGRCELEPREKRCERADRAAQKFRLLNEVNNLRVIPQSGEPRDLNPEERKKLIAYLSSVKEASFDAIRKQLKLLEGDGFNLEAGKRTKLDGMPIDTALSSKKLFDKKAWQKKSEEEKDAIVRSLIDDEEPEILHKATSEWGVSEEIAHELANIDLTAIVRGYASYSRAAILKLLPHLEAGYRMMSKDGLPSALAQAGYLRPDQQKGAKGKKIPLPSEKVVNPLVKQALYEVRKVVHAVIKEWGIPKAIHIELAREVQGTATKRQEQIEKMRRQEARRQEAAEFARERGVAPTRNAIERYLLWREQGEDCAYSYPPRTISPNQLFSSEVDVDHILPYSRSLDDSLMNKVLVFRSENHDKTNQTVWEWVGTSNPEKYESILQRARNLPVDIRNRKRSKLQTKDVVLEQFLNRQLTDTAYITTQVVDLLKHLEGVDVVPVKGQCTAELRHMWGLNAVLRDDGLNLKKNRDDHRHHAVDAIVIALTSRSTLQTLARVRGTKEQLAPPWANFRNDVETVIDGIKVSHKAVRDISGALHEETIYGPTSKPHRANTEQDERPHASGWIEEEGVFVFRKPIEALTLSMVNDIRDPQVKAVIIERLAEFGLDPSQKKPIPKEVWKTPLFLTRKSGRTSSNPSPIRHVRVIKRDLTIQTIRGGSACVKPGNTHHITIFELPAKEGKKPKRELVAVTMLEATQRARNGETLVSRRHPTIPDAKFLFSLSWGEMISAEINGRDDLYVFRTAASTTGQMAFVSHTDARPSKDVTLFRPRANTLEAQKVIVDPLGRIRNAND

SEQ ID NO: 15594 - protein, 1068 aa, unidentified
  REGION 1..1068: note = Cas Enzyme sequence
LPTKNTFHWYEKQINRPWLVTLGLSIRKGNSMSKKILGLDLGSNSIGWALLEEKDGVPCGIIDLGSRIFTKAVEEKTPTPKNMKRREARLARRVIQRRARRKSRMLNYLVSLNLLPKELQGNTQPEIILNDLGDPYQLRAKALDHALTPHELGRVFLHLVQRRGFLSNRKTLLGDMIDDPDVLDILNELDDNDDDKPSGEEGEFKQDIAKLRQAIADSGNRTLGEYLSKFDHHDSKRNRARDGGHQRTDRQMYHEELDLIWEEQKQHHPVLSNQVKEQIEHIIFYQRPLKLKADRVGKCSLETQKKRAQIAKLECQRFRYLQDINNLEYFQSQEDKFVKLTETDRENLKDLFEFKPTVTFAQIRKTLGFDKKAEFNLERGDKKLKGNRTACEIREVLLKWNVDPQWDEMSEEDQYQLVEDLLTITKKSALKTRLLNHWKFDIRTVIDLCLLEFESGHSNLSLKAIRKLLPYLEAGQIFSDARQSAGYGYEVKQTELVEKLGMPPETANPIVNKALHELRRVINALIKEHGKPDYIRIEMARDLEMNTKRYKANEARQKKNRKANEEATEKFILMRQKNAHLGLSNYPSRDDKIRYRLWKDQNERCAYSGDTISLSTLFSPEIDIDHIIPYSQSLDNSYMNKVVCFAAENRYKGQRTPIDAFGGNKEKWNQITQRIYRWDKGLKSKKDRFYMTASDVMKRDFISSQLNDTRYISKVALNYLKQLVGDTNVTVTKGIMTGWLRHQWQLNNLIGFDRSQKDRVDHRHHTIDALVTACIDRRLYNTLVAQAKDLERKSPELHMRDLHIDEPWKTLRGDLDASLSEMIVAHTPQRKISGALHEETGAGFIKGVGTVYRANLDTDFKITQVKKIIDEDVKNIIKAHLEKYNNKPKEAFAEGITVFHKDGKTPIKRVRIVQAKTTLKKLESSKLGIKDRNGKVFRWMAYGNLHHVEILYNKTTDKFSGEFVTTLEASHRARGIGMPKQPIIKTDHGENLEFVMALHINDLVRANNLIYRVQKLDSAGNRMMLRLHTAATISNKEEELFLVINKNNYESYGLRKISINSIGKIIND

SEQ ID NO: 15595 - protein, 1087 aa, unidentified
  REGION 1..1087: note = Cas Enzyme sequence
VGRRIKSSPKEKMSQLVLGLDLGPNSIGWALVRDDAEHPDNSEIVDIGVRVFPEGVDAFDTSKEKSRNEDRRIARAMRRQIRRRAVRREKLIAELIGVGLWPAGSATQAAALEADPYDLRRRALTERLEPHEIGRILLHLNRRRGFLSNRKKDRGDAEAQGMLAEINQNEAARVAGGFETIGALLATKVKRSKEDHVLRQSPDDRLRNRHLARRQYLHEFNAVWNAQAGHHPELLTDALRYGALGKPESEVAALAPRKPIPKHDPRRKGLSDLEAFGLQGLIFFQRPIYWPRSVVGQCELEPKLKRCPRADRHFDRFRVLQEVNNLRYANPDTNEEEPLTAEQRTLVLDYLASHDKATFDQLRKKLGFLESVKFNLEQGKRSTIKGMTIDCLMAAKDVCGPAWHKRPEAERDAIVDLLRENQSEDELVKQTLVDRFGFTAAQADAAIDVDLPIGYVALSRTAIDKLLPHLEKGLIYQSVSDPERSALHAAGYLRRDELRRRLFDFLPDLSRVNPADCKIGDLPNPVVKRALVEVRKVVNAILRKHGKPDAVHVEMARSLRMGPKARSEYNSTIRSREKIREDAAAKIRQGGDHVSREGIIRYLLWQEQGHECIYCGKPISQAQLFGGAADVDHVLPYSRTLDDSQMNKVVCHRECNHDKGQKSPYEWLAASNPDHYSAVVQRAGALLRKGSFPYPKYKRFQQKELDLDKFIARQLTDTGYITRATVEYVQLLFDKPSDVLGLKGQLTAELRWQWGLGTILAEMPDSPAWSENADLGAGEKNRADHRHHAIDALVVALTNRKRLRLLSEITRKGGARKTGEILFDPWEGFRDDAVKRVARINVSHRVERKVRGALHEETQYGPTANPEEWVVRKPVTALSANEVERIRDPAIRHIVLDALKVAGINVGRGKKPDAKQMQAALANLKMPSGVPIKKVRLTKPEKTIAALRQEGSPHQTYVKPGNTHHLCIFEFEEKGKTKREAVFVTMLEATNRIKRKLPVVQRVHPTRPEAKFVMSLSSREMVLAAWKGSPKLLQFKTAASTQGQIYFSDHADARRSTDQTKYVATANSLDARKVTVDPLGKILWAND

SEQ ID NO: 15596 - protein, 1264 aa, unidentified
  REGION 1..1264: note = Cas Enzyme sequence
ALAVALSPFEFGRVLLHLAQRRGALGLRIIDPDDPDATDSDREDGKVKKAIGEVQSQMRKCGARTYGEFIAQLRDTSVTQITTPDNRPKGRRNGPREYRSAVRNKAGSYKHCADRTMIRDEFAKLWEAQKRLGGPLAEILSGELRLALDDDARNSDWRHKGLLFGQRMQTWDLGTLGRCVLEPTERCVAHADSIASRYLVVETINNLKIIERGKQPRSLAIAERSKIKNFLSEPLGEVTRGKQKGQPKRSVTVTDLRDLMGWGNASKTSAFRFNIEADKERSINTDWFSREIIHGAITAAKWQQLSLRSREGINRAILKHDPDDETHDEKLKALVMQEWAGLKEAQADLLVAAWKKRPRPDAKRLSMSRRAVRNLLTVMDRDEPWPDADQPGETRWLTQIEARKRIAKDENFLDVTTGNPLDEHARRRYVTGTKGATARDRHYMKKHLLMKNKEPVYGPDGLPLHEPPPAPLISNPVVRKTIHEVRRHIIDYLTNLGCKPDEIHVELAREAKMGKKDSDRVLFMNRLRNRIRNDIIDVHGLSAVSATQQRAAVERVVLSVQQDGVCPLCGNQKIKTKITPRMAANGEGCEVAHIIPKASGGHNGLGNLVLAHTACNRDMGRRTPRQYWEATLSGGFDEGFRWIEGIYADIQRPSPWTVNEVSGDALWLCYFAGGPSRWGPTYDGLKIGQFKKDIKDIQEMTERQGAATKYAARQVMTYLADALYDGKGLPERSTGTEQNPETRRIFANDGLWTSRLRREWGLFFDRHGAKAHGLTNEQEHELKEKNRGDHRHHAIDAIVIALCSERVRKAWDARELAADQADINTANEEAMDNYRRQHPLPLPMAYKSRDELRAAVQLAVFGEGPLERPVAHRPVKRKLIGALHEETLFGPVVDRAGSLTANFSAKKSVLQLDPNHLRRPRRETEKKAIERLALLRLKEKSGDEKTARKWARSVVSSLGYQPAIVDPPPGKSGIVRDIALRLRIRDCLSGFQYAKRNKNGEQVGEARSINPDDFTDYEIKQAFEAGAICQASGVPINTVVLLRTMSGPVVIDRKRPDYATGKMVHDDDPASKRAYLGGNNHHVEIRVAKNKKGDEVWSGQIVTAFEAAQRKLTKLRAFREAGIPKLKVLRKLSKAERAKFHAELRRIETAHPVIDRCENVDNGGKFVMSLCEGEMLKMKHKQTGEVGYFVVAKLDKPQSIVVVPHWDARAATERKGSDGKKVADSKREQFAVTPSDLKDLAPPGEDHAVKVRVSPLGKLVVLTD

SEQ ID NO: 15597 - protein, 1350 aa, unidentified
  REGION 1..1350: note = Cas Enzyme sequence
VTTILGLDIGSNSVGSAWVDTEKRIIRAGVSVFPCGVEEKEDGRGAPKNQKRREKRSLRRSLARKSSRKRKLRALLKKHGLFPTEPHQVNALMTTDAWELRAEGLSRELTAFEFGRVLLHICQRRGALGLKLLDVDEDDDTGKNDAKADEDGKVKEAIDATRKAMQLHNSATFGELMATLARRRRSPVMGADGKPKLNGSGVPITFSHKIRNELANFEFHADRQMLRDEFKRLWETQILFNSPLSRILTDDLKRQLDNPTGDEIWRHRGLLFGQRRTYWKTGTLGRCKLEPTDECVPIADRHASFYRVIETVNNIRIRGPQDHDFRPLTSNERQKVIDRLRSQKSGTVAAVRDALGIGTKSLKKAGIPQDAYALNLERDEDRDINTDWFYRAIIVEGIGEKIWDAWDENKREGLNRAILRFDPSEEIDKQKFAAVAEKLGLDSEKQERLLAQWSTRPKLEKRLRLSRRAVLNLLPYMDKQDTNSRWPTQIEARLSFANDPNAADRTSNQSITSKQRERYSLGANILNKRDRHYLKKHPEMVLPPAPMLTNPVVRKAIHEVRRHVIAHIRAAGSKPDRVVIEFARETTKTAKQSDQILARNRFREKYRRGIREDVIRPAFGAMYDSLSTNQLRASEDRVILCEQQRKHCAYSDNTITPIQAALGNGLEVDHIVPYSRCGDNSLNNRVLCYRDSNRNKLNQTPREWWGAEFDENIRRLRFMDGIDKSKIHPYFSKRDYANKWKNLSAENVPSEWKGNQLSDTAYAAREVQAYLQHALWPDEPSFLAGDICRRVFVTKGAYTAQLRRDWQLYRNRLSDTDNRVTRDLLAAKDRGDHREHAIDAVAIALTDGSRIQALAAILTNQQQAWIRAKNQGIKTEVIKRKPLDPPWGNIRSFRHQVLSLIYDDFDDNQEDRGSSSTNRAIVVSHRPVGRKLVGKFHEDSLFGAVPHDRKLYTGSIRVTDLKPNHLRMPVPEKEEDAISRLSERYLKSNTASNPRDAKRIAKEFVASKAYIPRLVDPPPEKSGLIRDIGLRKQVRAAIEDRLQRFGIDRTADTFTSADLKKILNPIDPATGRPQFIPLTMKSGVPIKRIVLLRTMNDPVIVSRRRWNEQFEKWEIDDSPKASRAYVGGNNHHIEIRTNDKGQWSGEIVSMHEAARRARVQKTDPVDRSNDPDRGGAFVLSLAEGETVFMRHKQTGVPGYFVVVKLVKPATVEFKQHWDARRATGERNEQGEPIEDSARASIAVSAAQLARLAAPGEATPIKVVVNPLGELHTVEPLASREDRLADIDPRVMLIAQEALAARRSKNELNEGLRRRKHGSWSWMRAKLKREKLTHLAAQLSAAVRLLDKEKS

SEQ ID NO: 15598 - protein, 1258 aa, unidentified
  REGION 1..1258: note = Cas Enzyme sequence
MKTDAWRLRAEGLGRELTPFEFGRVLLHICQRRGALGLKLPDSEQDDDTGKSKADVDEDGKVKEAIDATRTAMQLHNATTFGELMATLAQSRRSPVMSVDGKPKLNGSGLPITFSHKIRNELGNFEFHADRQMLRDEFVRLWETQIHFQSELSSILTEDLKRQLDDPTGDEVWRHRGLLFGQRRTYWKTGTLGRCKLEPTDECVPIADRHASFYRVVETVNNIRIRGPQDHNFRPLYSDERQKVIDRLRSQKSGTVAAVRDALGIGTKSLKKMGIPPEAYALNLERDEDREINTDWFYRAIVVEGIGEKAWEAWGENKREGLNRAILRFDPSEEIDTQKFASVAKKLGLDSEKLDRLLAQWRTRPKLEKRLKLSRRAVLNLLPYMDKPDTNGHWPTQIEARMGLANDANAMDRTSIQPITSKQRERYSLGANNLSKRDRHYLKKHPEMVLPPAPTLTNPVVRKAIHEVRRHVIAHIRASGSKPDRVVIEFARETTKTAKQNDQILARNRFREKYRLGIRENVIRVAFGAMYDSLSTNQLRAAEDRVILCEQQEKNCAYTGQTITPMQAALGNGLEIDHIVPYSRCGDNSLNNRVLCYRDSNRNKLNQTPREWWGAAFDEHIRPMRFMDGIDKKQIQPYFSKRDYANKWKNLSAENVPGEWKGNQLSDTAYAAKEVEAYLQQSLWPDEPSFLAGDTRRRISVTKGAYTAQLRRDWQLYRQRSGDADNRVVRDLLAAKDRGDHREHAIDAVAIAFTDGSRIQALAAIMTHQQNAWIRAKNQGSKPESIKRKPLDPPWGNIQSFRREVLSLIYDDFDDIQEKRDTGSSNRAIVVSHRPVGRKLVGRFHEDSLFGSVPDDEKLYTGSIRIADLKPNHLRMPVPEKEEDAICRLAERYLKSKTVSNPRDAKKIAKEFVASKAYVPRLVDPPPEKSGLIRDIGLRNQVRSAIEDRLRRCGIDRTADSFTASDLKKILNPVNPDTGRPQFSPLTMNSGVPIKRMVLLRTMNDPVIVPRRRWNEELMEWEIDESPKASRAYVGGNNHHIEIRTNDKGVWSGEIVSMYEAARRARVQKTDPVDRSYDPNRGGAFVLSLAEGETVYMRHKQTGVPGYFVVVKLVKPATIEFKAHWDARRATGEKNEQGELITDSARASIPVSAAQLAGLAAPGEVTPIKVLVNPLGQIQRVEPLPSREDQLVEVDPRVLLIAREAVVARRSKNELKGSLRKRKHGSWSWMRARLKREKLEHLAAQLSVAVRLLDRENS

SEQ ID NO: 15599 - protein, 1279 aa, unidentified
  REGION 1..1279: note = Cas Enzyme sequence
LRALLKKHGLFPTEPHQVNALMTTDAWELRAEGLSRELTAFEFGRVLLHICQRRGALGLKLLDVDEDDDTGKNDAKADEDGKVKEAIDATRKAMQLHNSATFGELMATLARRRRSPVMGADGKPKLNGSGVPITFSHKIRNELANFEFHADRQMLRDEFKRLWETQILFNSPLSRILTDDLKRQLDNPTGDEIWRHRGLLFGQRRTYWKTGTLGRCKLEPTDECVPIADRHASFYRVIETVNNIRIRGPQDHDFRPLTSNERQKVIDRLRSQKSGTVAAVRDALGIGTKSLKKAGIPQDAYALNLERDEDRDINTDWFYRAIIVEGIGEKIWDAWDENKREGLNRAILRFDPSEEIDKQKFAAVAEKLGLDSEKQERLLAQWSTRPKLEKRLRLSRRAVLNLLPYMDKQDTNSRWPTQIEARLSFANDPNAADRTSNQSITSKQRERYSLGANILNKRDRHYLKKHPEMVLPPAPMLTNPVVRKAIHEVRRHVIAHIRAAGSKPDRVVIEFARETTKTAKQSDQILARNRFREKYRRGIREDVIRPAFGAMYDSLSTNQLRASEDRVILCEQQRKHCAYSDNTITPIQAALGNGLEVDHIVPYSRCGDNSLNNRVLCYRDSNRNKLNQTPREWWGAEFDENIRRLRFMDGIDKSKIHPYFSKRDYANKWKNLSAENVPSEWKGNQLSDTAYAAREVQAYLQHALWPDEPSFLAGDICRRVFVTKGAYTAQLRRDWQLYRNRLSDTDNRVTRDLLAAKDRGDHREHAIDAVAIALTDGSRIQALAAILTNQQQAWIRAKNQGIKTEVIKRKPLDPPWGNIRSFRHQVLSLIYDDFDDNQEDRGSSSTNRAIVVSHRPVGRKLVGKFHEDSLFGAVPHDRKLYTGSIRVTDLKPNHLRMPVPEKEEDAISRLSERYLKSNTASNPRDAKRIAKEFVASKAYIPRLVDPPPEKSGLIRDIGLRKQVRAAIEDRLQRFGIDRTADTFTSADLKKILNPIDPATGRPQFIPLTMKSGVPIKRIVLLRTMNDPVIVSRRRWNEQFEKWEIDDSPKASRAYVGGNNHHIEIRTNDKGQWSGEIVSMHEAARRARVQKTDPVDRSNDPDRGGAFVLSLAEGETVFMRHKQTGVPGYFVVVKLVKPATVEFKQHWDARRATGERNEQGEPIEDSARASIAVSAAQLARLAAPGEATPIKVVVNPLGELHTVEPLASREDRLADIDPRVMLIAQEALAARRSKNELNEGLRRRKHGSWSWMRAKLKREKLTHLAAQLSAAVRLLDKEKS

SEQ ID NO: 15600 - protein, 987 aa, unidentified
  REGION 1..987: note = Cas Enzyme sequence
LTPHEFGRVLVHLSRRRGALGLDADSKDEGKMKDAVARVRAALAGRTFGEYMADLYDERTHPVEGKTSLFRDPIRNRRDSYEFHADRALIEDEFSRLWHSQKSRGGPVSGLLTDELLAKLNSSHPAKGWRQQGAIFGQRKTYWNQGSLSRCALEPTDLCCPQADMHAQEFRVLECVNNLRIEKRGELPRPLTPEERKRVVEALCRQKTATPATVRKALGIHKKEIKDFYTLNVERDPDREINTNWFAREIVLAVFGEEAWGALSEQARESVNRAIQKFDPDSAADRDTLRAGCGKWWGLNADQTEKLLTAWAARPNLSKRISLSRRAVLKLLPHVREGLSVSEAKAAAGYPASGRTLNKAGRRFASKHPGSLPPAPYLSNPVVRKAIHETRRQVNAYVRHFGRKPDRVVVELARDAKQPAVLRNQQLAENRARAKEFARLVKEFELERLGERQQRNAILRIRLAAEQRFECAYSGRRITSRMAAHGQSDEGERIEVDHIIPQSRTDDNSFNNLVLCYAGSNRDKGNRTPREWLTTEAFRLVEQRFAHLAGKDRLQIDGFEVRPNRRKWENLHREAPTVEDFASSQLTDTAYAARQVAAYLEEALYGGDDSGKRHVFCTKGRYTPLLRNDWQLYRDGRPKERTDHREHALDAVAVACTSPAVIQEVARRAEEQELAKVASGMTPRRRHLLPPWGTADEFRSQVLGAIDSAIVCHRPAKRRIAGALHEDSRYGVVDVVRKLFVIRIPIGKLTAKMLRMPRGDVSSPVAEDHDLALGKGGLVRDLSLRRRLRECLSQRGLDPDRVTDKEVQDVGKAGGFTTTAGVPIRQVRVLRTIAEPVVIGSCAFIGGNNHHMPIWEDLRTGKWSGVAVSMFEAAQRVRQSDGRLSPVDRTDPPGRKFVMSLSEGETIHARRPDRPADAPEAIGYFIVTRVARTWVEFASHTDAAPARSQDRWSAPPSVLKHCGTKPQTPPRKVHVSPLGEVEVLERD

SEQ ID NO: 15601 - protein, 1066 aa, unidentified
  REGION 1..1066: note = Cas Enzyme sequence
MGNYVLGLDLGPTSVGWAAVQLDENNNPTGFALLKDGRSQKPALGSRIFEAGVDKLGEGKNEQTKAKPRQEKRSLRRMNRRKKGRKLRLVALLKDRGLLSVDLEKLYKIDPYELRDRAINEQISLDEISRIILHITQRRGFKSNRKQPEKADERGKIKDGIRELEAQRGNLTVGQFWYKKINESKGKAPQAIRNKGNYSFMARREDYRAELDLIFDCQKKFYPEILDENLMTKISSILFDQIPFELSSNKKRNVIGMCSLLPNQRRCSLASRKAQEFRLLQKISDLRIIEDYKPRELTESERKKLYERLMSTKELTFKQIRSKGVLGVGDNVGFNLEHEGNKKIVGNIIDAAFAEKTIFDKAWHGLTEDNKQKAWDIFLTEFYTEDNTMSCQQLANLYKTEFGIEVQNPEKLEQITVPVSNINYSEKALDKLLPFMREGYDLYNAQRKAEFKNTWRVLKKLQLPDKSQGFQCNNPIVKTTLFQVRKIVNSLLRELGKPKAIIIETTRDFNAGAEKRQQIIKRQKDNQTNREKAQNEIREYYGYDPAVHIPSIEVTKYLLWRNQNEYCPYSCKKIGMRDLLSRDTEVDHILPYSMSLDNSMGNKVVCFVKENQDKRQNTPLSWLGKDSKRFEEIQNNIENGVFGNDDRKWERFFVTNDEISEKYTPERLLRDTSYIATEVRSFLQKLYPVQSADQQVLTTKGTITAELRNVWDINAMLRDGEVGPKNREDLRHHAVDAAVIAVSRAGMIQKITKRLQEAWPKRPSKAGNIPQPWETFNSDLFAAVMQIKVSHRVQRKVRGKLHKETIFNKEINGPNQGKFITTVSLNGITAAQVGKICDERIKELVAERLEEFNGDSKKAFDKPLFLPANPDKAERGERKIEGDVPIKKVRIAENSSTKVQIDDHIWCEPGNNHHVEIFKAKVKGKETLIRRVYTLLEVSQKLAVMAGCDDIEKRKKAIISRENPFPDDPTITDVEFLMSLAIGESVLMKGKNGETVLARVGKISAGSESPTAIDINFLEHQLSRVEGSISDKTPNAYRFRSLSTFTQSEIKKVTVTPLGFIRWAND

SEQ ID NO: 15602 - protein, 1080 aa, unidentified
  REGION 1..1080: note = Cas Enzyme sequence
MSVTLGLDIGPSSIGWALVDEKNENIIDLGVRIFPEGVDNFDTKKEKSRNEDRRIARGMRRQIARRARRKRRLRDALIQAGLFPADPDAQDSLYQLNPYELRAKALEEKLTPHQIGRVFLHLNQRRGFLSNRKKDRGDKEVKGMLEEIGQLSSDIAETGSRTLGEYLFRKYQSFDHAQCAENDHVRNRHTRRDMLEIEFETIWDAQAKYHPELLTEQLRYGALGKGSYPCKPRRKPKGMSDLEAFGLHGMIFFQRKMYWPKSVVGLCDLEPKEKRCQRFDRHAQRFRLLQEVNNLRYIDPDSHEECCLDEQQRTLLLDYLGTREKATFDQIRKKLGFLESVKFNLERGQRPSLKGMIVDWMMAKAVGKNWHKRPENEKDEIVRILLDNEREDDAIADRLVSEFGFTAEQADAVLRVDFPAGYVNLSLKAIDKLLPYLERGLVYQSASDPEQSALHAAGYLRRDELQRRLFDRLPDPVRMNPRDCPIGDIPNPVVKRTLTELRKVVNAIIREYGKPDAVHVEMGRSVRMGPKARSEYNSRMREREAVRARAANEIREYSHKYPDQRVRVNRDNILRFLLWEEQNHECVYCQQTISLQHLFGGEVDVDHILPYSRCLDDSQSNKVVAHRRCNHEKGQRTPYEWLAESDPRQFETICQHAASLLKEGRMAYGKYRKFLQKELDLDSFIARQLTDTGYISRATAEYLRLLFEQPHDVLGLKGQHTAELRRQWGLNTVLRHDELDLKNREDHRHHAVDAVVVALTNRSRLQQLSKATTEVQWLDDETKEIQHRRQYAGDRIGVPWDSFRHDLEEAINTINVSHRPERKVAGALHEDTFYGPTPEPGVFIVRKPLEALSSNEIPLIRDEHIRQIIENRLAEHGIEIGRGKKVEAKKWKEALCDTSNPVVIPPSKKRLKRNPNAQGIPIKKVRVYRHEQTIQPIREGRPDQAYVKPGSTHHLAIFEWKQNGKRKRDAVFVTQLDAINRVKNGEQVIQRTPPPNHPTIPPDAQFVMSLSRGEMVLANVNGQQRLLILKTAVATSTQMRFAEHNDSRKSTEFKMWRFTPNTLDARKVAVDPLGRIRWAN

SEQ ID NO: 15603 - protein, 972 aa, unidentified
  REGION 1..972: note = Cas Enzyme sequence
VDRDQQGGEVSKNENRRIKRGMRRQIARRSRRKAALRAALAAAGLLPIDSAQIAVTDQLDPYALRAKGLDEKLELHEFGRVLIHLNQRRGFKSNRKGAKTKEERGMLAEITELAKQIENSGSRTLGEYLHAQRAGGPPPVRIRGKHTRRQMLEHEFDLLWRKQREFYPEVLTEELRTELWDRIIAFQRAMYWPKSVVGQCELEQREKRCRREHRIAQRFRLLQEVNNLRVIDGTGELRGLTADEREKLLAFLAKSKERTFDEVRSHLGMPESSGFNFEFGDRRKLIGLPTDVLLSGKKFFGSRWGELSEDVKNRVVEVLLDDGIEESEFSRIAREEWGVADDLAAKLAEIDLKAGYASYSLKAMARLIPYLERGLPLSGKAGEPDALHSAGYLRPDEREVGTRGFLPEPPEVTNPLVRAALFQVRQLVNAVVREFGKPGAIHVELARDVKGTAEERRRQSQRMRERERKRAEVAKLIEASGITPRRSDIERYMLWEEQGKICVYSGIPISQAQLFNGDVDVDHILPYSRSLDDSQSNKVVAFRAQNQEKGNQTPYEWLADRNPDRYEAVLQRAAKLPFAKRSKFAVKSVQLEEFIQRQLNDTKYISRKVVEYVRCLGVDVVCSKGQRTAELRHRWGLESVLRGDGLELKNREDHRHHAIDAIVIALTDRKRLQSLAGSRGGTQLALPWAEFRTDAAASVNEINVSFRVERRVSGPLHEETLYGPTDKPWQGEGKAPPEAERKAGARPWAGKWIENAGIFTFRKPLESLTPAMVKDIRDENIRGLVRERLALHGIDPDTSKVIPAAVWKEPLRMPGKDGAVVKKVRLLKRDETILPIRSGRACVKTGSNHHVCIFEFDDGGKRTRDAVWVSMIEAARRVRDREPLIRREHPTRRDARFVMSLSRGEMVLGNFKGQERLCVFQTGASTTNQMIFAAHTDARRSSEKERFSAKPGTLASRKVTVDPLGRIRWAND

SEQ ID NO: 15604 - protein, 1065 aa, unidentified
  REGION 1..1065: note = Cas Enzyme sequence
MGKKVLGLDLGPNSIGWALVDVGDSKSQASLIDMGVRVFAEGVDAFDSGKEASRNEGRRTARAMRRQTKRRTLRRRRLTAALVSVGLWPADPAVQKELLQRDPYELRSQAVDPASDLSPYELGRVFLSLSRRRGFQSNKKTDKGKEAGDLLQEISENEKEREASGAPTLGAWLHQKSIAFDHRHRVPNDHVRRRHLSRKEYLDEFDQVWETQKAKHPQLLTDRLRYGMAGENRYPVVPTARPKPGDRLLDLFGLHGLIFFQRKMYWRTSVIGRCELEPKQKRAPIADRRVQLFRILQEVNNLSYIDPNTRETTFLDEGQRKCLIAKLMTEDKMTFDDIRKALGKLDGVRFNLENGKRRNLKGHRTDSTMAQKKYFGPDWYDLEEGVRTEVVEALLDPNLDEFQFAEKASNTWKFSPQQIERLLAVDLPTGYGSLSTKAIEKMLPYLQKGMIYSSSNPENSALGAAGYLRRDQLKRRLFDFLPSPARTKNTPIGNIPNPVVKRTLTEVRKLVNAVVREYGKPSEIHVEMARDLQMGSAKRKEVSSDMRKREAKREEIADRIKGAGERPTRDNILRYQLWEEQNRMCIYTGRSISQTQLFSEVGGVDIDHILPRSRTLDDSQSNKVLCFREANAEKGNRTPYEWLAQKDPDRYEALTGRVLSLLKSNGYAFSKYQKFLLKELKLEDFIARQLVDTAYITRATAEYLRCMFDADHHVLGLKGRLTSELRWRWGLETLLEELPDSPAWAEASKLRPGEKNRADHRHHSIDALVIALTDRSTLQKLSATLGDRFAAREETQFEPPWLGFRQQIKEKVASILVSHRVERKVSGQLHEKTLYGPTDKPGEWVVRKSIESLSLSEIPRIRDHAIREMVMKKLSAHGIEVGRGKEKDAKKLKELLSNLTMPSGVPIKKVRILKNEETIRPIRSGASTSYVKPGSTHHLCIFEWEEKGKRKRDAVFVSMLEATYRVKTGQPVIDRIPPDSHRTIPNDARFLMSLSSRELLLQNQEGRSQLLVFKTAASTQGQIYFALHSDARRSGDAKKYVCNANTLQGRKVVVDLLGRVRWAND

SEQ ID NO: 15605 - protein, 1065 aa, unidentified
  REGION 1..1065: note = Cas Enzyme sequence
MPKTVLGLDLGPNSIGWALVNDDPDKPAESKLIDLGVRVFPEGVDKFDTAKEVSRNESRRIARGMRRQIRRRARRRRKLKEALLSVGLWPSDPGEESKLYSVDPYQLRARAVREKLSPHEVGRVLLHLNQRRGFLSNRKKDRADKEVQGMLAEINENEREREAGGFDTIGAWLADKQASMDHTNRQENDHVRNRHLARQQYDDEFEAIWAEQAKYHSKLFTDELKYGAVGNQTYPVKPIPRSDERRDGKSPLEAFGIYGQIFFQRPMYWPKSVVGLCELEPNQKRCPRADRHAQRFRLMQEVNNLKFTDPNRHEELPLDKDQRTLLLDYLSKHDKRTFDQIKKKLGFLESVKFNLERGKRPSIKGMVVDCLMAKKDICPSWHDRPEEEKDHIVRMLLDHERDDDAMIRRLVDDHHFMPKDAEAALGVDFPTGYVHLSLKAIDKLLPHMEKGLVYQATSDPEHSALHAAGYLRRDELRRRLFDKLPDPSRVRAGDLRIGDIPNPVVKRALVELRKVVNAIIREYGKPDAVHLEMARTMQMGHEKRSEYNSQMREREAEREQAANVVRKQHKKVTRDAILRYLLWQEQASECVYCGKPISQTQLFGGEADMDHILPYSRCLDDSQMNKVVCHRKCNHDKGNRTPYEWLADTNPDAYDRVCMQAGSLLKKGLMRYPKYRRFLQKELELDKFIARQLTDTGYIAEATGEYLRCLFDKDHYVLGLKGQLTAELRWQWGLDKTLEELPDSPAWQQADNKQRPGEKNRADHRHHAIDAVVIALTNRSRLHQLSDIVRRGGARAHGEILDDPWPNFRKVVVQAVKKINVSHRVERKVRGALHEDTFYGPTPTAGEWVVRKRVIDLSSAEVERIRDPEIQRIVTMKLSKAGVVFGRGKKADAKKIREVLSKLTMPSGVPIQKVRLTKPELTIQPVRAGQPDQAFVKPGSTHHLCIFEFTEHGTTKREAVFVTMLEAMNRLKRREPIIQRTHAERPDARFVMSLSGREMVLANWKDGERLLTFKTAASTQGQIYFAEHTDARRSSDQTKFVATANSLDARKVTVDPLGRIRWAND

SEQ ID NO: 15606 - protein, 1296 aa, unidentified
  REGION 1..1296: note = Cas Enzyme sequence
LTEHRLLPTDRDLLKLLFAIDPWQLRRKAIDEELTPYEFGRVLLHVGQRRGALGLKLSDPVEIEESTVDPMRKKGKKEQTIETKQGDSDEKVKGAVEHTKRQMEHRAARTFGEMIAMIAVERRNPIFDRDGRPKLNADGEPVLYSAPVRNRLDSFEFHADRRLIRNEFETLWLTQTSFPSELASLLTEELRLALDNPQGDNKWRHQGAIFGQRRTYWDTGTLGRCDLEPTDRCVAIADRHASYYRVLETVNNIRIQGPSDRSLRSLTQDEHAAVVAKLRSQKSGSIPAIRQALKIDKRSLKKHDIPEDAHKLNIAGGDDRELNGDWFHSSIVLGAVGEETWKSWDESRKEGLNRAVLSSDPQDDDDAQRMQMVGKRFGLNDETSAQLVAAWRSRPKLEKRLKMSRRAVLNLLPYMEKPRADGHWLTQIEARIAFAHELETSNVAGTPEIRHRVRRYRLGCSRLTKKDRHFLDKHGLLPPAPTLSNPVVRKAIHEVRRHVIAHIRAHGGEFPDRIVIEFAREATKPKKLSDRIYFRSLNRNKIRKKIVEEVVKPAVGQQRFHQLSHNQLRAAVDRVVLCMQQRGVCAYSTKSLNPDGDNGPCAYLGKSITLRMAALGDGLEVDHVIPYSRCGDNSLNNRVLCFRDSNRNKGRQTPREWWGELFDERSAPMRFMADHQPAKDDYFEKRDYQAKWRNLSRADVPSEWKGSQLSDTAYAAREVQNYLQESLWPDEPTHLEGGNRRILVTKGIYTSILRKDWQLYQKLVRGHESSTEDMLHAALKNRGDHREHAIDAVAIALTDGERIQDLARHAKLVEEERAEAAAQGREPRRILRKPLDAPGGDVRSFRGHVLSQLFDEFDPVDAKDHDRPNAPRIVVAHRPVGRKLTGAFHEETLFGPVPGDETLYTGTKKTAEFSPNHLRLPRPETSSEAINRLSLRFHSHGLEADISKARKRAKSIVESPGFVPRLVDPPPGKSGIVRDLALRRILRDEISRRLSELSAPPVDRDADSFTKGDMSRILKSGPLRMPSGVPIKRVVLLRTMNDPVIIQRRMFDHATNRWSDGPSARSDRAYLGGNNQHIEIRENAKGQWSGEVIPTYTAARRLRIENRNSVDRGDDPARGGRFVMSLAEGETVYMRHKDTNELGYFVVFKLDKPQTIQFKHHWDARRAKGEKNEDGELLRDSKREEIAVTASQLKELAPHGEQTPIKVSVDPLGRVRRLEPLPTRNDDLGAIDPRVVAIARHAVALRSQRVTTTATASRAVAPGSWKWMHSRLAAEGLEHFRAQLSAAMRVLQGGQV

SEQ ID NO: 15607 - protein, 1140 aa, unidentified
  REGION 1..1140: note = Cas Enzyme sequence
MFLLITKSPQAKIGYTGYQFVFMLYFCQVFRFLFPLLYYRFRIHMTRRILGLDLGPNSIGWALVDLDDSNSDNSSLVDMGVRVFPEGVDNFDSAKEVSRNEDRRMARGMRRQTKRRVRRKRRLQDALISLGMFPEDFSEQQALLIQDPYELRSRALQKKLSLFEIGRIFLHLNQRRGFLSLSKKEKQDKEVQGMLAEINDLAAKIANSDHQTIGQHLYYKSQNLDHKDRTDNDHLRNRHTRRDMYEAEFDAIWNRQAQFYPELFTERLKYGQFGIQKYPCKPRKRPQGLSLLDAFGLHGLIFFQRSVYWPKSMIGRCELEPKELRCPRADRRAQRFRLLTEVNNLRIIDSSIPAERPLNAQERKLLIDKLAKKKEWEFEAIRKEIAKLPDSPSATQISFNLEKGKRPKMQGLQTDYILASKKAIGSEWHNMPDKVRNEIVALLVDPARNDDVLMEQLVIKYDLTEEQAEGALLADLPVGYLAISLKAINKLLPYMEKGMPYVRGSGTDDDGEPTDALHAAGYLRPDELQCRIFDILPDPQRTSLKECPIGDIPNPVVKRTLVELRKVVNAIIREYGKPNEIHVEMGRDVKTSPKPGSPSYKKYKDGIDRMRANEAKRDAAKNHLHENGKSFGAGGRNILKYLLWKEQGEHCIYSGQPISFNQLMSEAVEIDHILPYSKCLDDSQMNKVICFRQTRNSLGNHDKGNRTPYEWLADSRKSDYDQVCLRAKNLPYPKYKKFIQKHVNLEDFIERQLNEMRYIAKATAEYLRVIMQHNHEVIGLKGQLTAALRRMWGLDTLLAEIPGSPAWTEENELRSGQKNRADHRHHAVDALVIALTDRRRLQQLSSRFIDVERKDTDTGDTVFRTKHMGPKLEEPWPQFRTSVLESVKSINVSHRAQRQVSGRLHDETLYGPTEKEGQWVARKPVESLSANEVEKIRDPHIRKIIIKKLQDSGIEYGRRKSINNKQMKEALANLKMPSGVPIKKVRVLKPEQTIKRIRKYLADPTYVKPGKTHHLSLFEWQENGKTKRDAVFTTMLEATKKLKRGEPVIQRIHPDQPDAKFIMSLSNGEMISVNIGNDHFLLILQTSAQTEKKMTFALNTDARKSDTKKKYNMNTNTIFTKYNAKKVTVDPLGRIRWAND

SEQ ID NO: 15608 - protein, 1063 aa, unidentified
  REGION 1..1063: note = Cas Enzyme sequence
MKKRTLGLDLGPNSIGWALVEEYSEEKSGKLIDMGVRVFTEGLDAFDTAKESSRNEQRRVARGMRRQTARRRKRRKAITEALTSVGLWPSSKAQREDWIQRNPYELRAKAVSGTKLEPFEIGRTLLHLAKRRGFLSNRKTDTGGKDAEGLLHEIQENEAKRLQSGHPTLGSWLNEKYQSQEHTNRRQDDHVRRRHLSRKQYQHEFDTIWKSQSQFHPDLINDTLRWGKLGPTEFPCKPTPRNGQPESQLELFGIEGLLFFQRKMYWPTEVIGRCELEPKKRRCPIADRRFQRCRIWQELNNLRYIDPDNGKEFQLSVPQRKLLFTKLWETEKLELSKLRNALGFLETVKFNFERGERSFLKGNTADVVARKAWGKDWNHLEEELKDEIVEALTNPNLDDRELIQLATEKWKFNTEQISRLMKINLPSGYGSLSLKAIKKLLPHLEKGLTYSLQDESNSAIHAAGYLRRDQIKRRIYDFLPSPQVERKTPIGDIPNPVVKRTLTEVRKLVNAIIREYGKPDEVHIEMARNLKIGAKKRKEITKENGDRAKKRESIADTLSEQGVLRSRENILRYQLWEEQNHQCLYSGKTISLAQLLGEGAGVEIDHILPRSRTLDDSQTNKVLCFRDSNQAKGNRTPHEWLASSNPAQFDEIIQRANILLRSGKLPYTKYKKLLQKEVNTDEFVSRQLVDTAYITKVTGEYLRCLFESDQQILGLKGALTAELRWQWGLETILEQLPDSPAWSTKDQLRPGQKNRADHRHHAVDAVVIALTNRSRLQSLAKAMSDTTNQRQGELMEEPWQGFRGSIMERVSKVWVSHRVERKVSDELHEKTHYGKTERPDWWVSRKPVDKLEGSEIPNIRDGFIRELVIAKLKEAGIDVGRNTQVDSKRLKEVLADLKMPSGVPIRKVRVLKTDKTIRAIRKNKCETFVKPGSTHHLCIFEWEEKGKKKRDAVFLTMLEAINRVKSGEALIQRTPPKDDKKIPPDARFVMSLSTRELILSERNGEDTLLVYRHGKSTTKQMIFATHTDARPSSKFKEVSFQPGTLRGRKVTVDLLGRIRNAGD

SEQ ID NO: 15609 - protein, 1063 aa, unidentified
  REGION 1..1063: note = Cas Enzyme sequence
MKKRTLGLDLGPNSIGWALVEEYSEEKSGKLIDMGVRVFTEGLDAFDTAKESSRNEQRRVARGMRRQTARRRKRRKAITEALTSVGLWPSSKAQREDWIQRNPYELRAKAVSGTKLEPFEIGRTLLHLAKRRGFLSNRKTDTGGKDAEGLLHEIQENEAKRLQSGHPTLGSWLNEKYQSQEHTNRRQDDHVRRRHLSRKQYQHEFDTIWKSQSQFHPDLINDTLRWGKLGPTEFPCKPTPRNGQPESQLELFGIEGLLFFQRKMYWPTEVIGRCELEPKKRRCPIADRRFQRCRIWQELNNLRYIDPDNGKEFQLSVPQRKLLFTKLWETEKLELSKLRNALGFLETVKFNFERGERSFLKGNTTDVVARKAWGKDWNHLEEELKDEIVEALTNPNLDDRELIQLATEKWKFNTEQISRLMKINLPSGYGSLSLKAIKKLLPHLEKGLTYSLQDESNSAIHAAGYLRRDQIKRRIYDFLPSPQVERKTPIGDIPNPVVKRTLTEVRKLVNAIIREYGKPDEVHIEMARNLKIGAKKRKEITKENGDRAKKRESIADTLSEQGVLRSRENILRYQLWEEQNHQCLYSGKTISLAQLLGEGAGVEIDHILPRSRTLDDSQTNKVLCFRDSNQAKGNRTPHEWLASSNPAQFDEIIQRANILLRSGKLPYTKYKKLLQKEVNTDEFVSRQLVDTAYITKVTGEYLRCLFESDQQILGLKGALTAELRWQWGLETILEQLPDSPAWSTKDQLRPGQKNRADHRHHAVDAVVIALTNRSRLQSLAKAMSDTTNQRQGELMEEPWQGFRGSIMERVSKVWVSHRVERKVSDELHEKTHYGKTERPDWWVSRKPVDKLEGSEIPNIRDGFIRELVIAKLKEAGIDVGRNTQVDSKRLKEVLADLKMPSGVPIRKVRVLKTDKTIRAIRKNKCETFVKPGSTHHLCIFEWEEKGKKKRDAVFLTMLEAINRVKSGEALIQRTPPKDDKKIPPDARFVMSLSTRELILSERNGEDTLLVYRHGKSTTKQMIFATHTDARPSSKFKEVSFQPGTLRGRKVTVDLLGRIRNAGD

SEQ ID NO: 15610 - protein, 1063 aa, unidentified
  REGION 1..1063: note = Cas Enzyme sequence
MKKRTLGLDLGPNSIGWALVEEDSQQKGGCLIDMGVRVFTEGLDAFDTGKESSRNEKRRVARGMRRQTARRRKRRKEMTDALTSVGFWPSTAQERDNLMKLDPYELRAKAVSNVTLTPFELGRVFLHLTRRRGFLSNRKTDATGKEGEGLLHEIEENETKRVQSGHPTLGSWLNEKQQTQDPKNRKEDDHVRRRHLSRKQYQHEFDLIWKSQSGFHPKLLTDRLRWGNLGPIEFPCKPLPKTDRSATNLELFGVEGLLFFQRKMYWPTAVIGRCELEPKKRRCPLADRRYQRFRIWQEINNLRYIDPDSGRESQLTPGQRTLLFGKLWDVDKLEFSKIKKALGFLESVKFSLEKGEKSSIKGNATDKIAKGIWGKDWIHLEEALKDEIIEALTNPNLDDREFVNLATSKWGFDTEQISRLMKINLPSGYGSLSLKAIKKLLPHVEKGLTYSLQDEENSALHAAGYLRRDQLKKRIYDFLPSPQVERSAPIGDIPNPVVKRTLTEVRKLVNAIIREYGKPDEVHVEMARNLKIGAKKRKEITTENEKRAKKREDIASKLRDHGVLANRENILRYQLWEEQNRQCLYSGRTISVSQLLGEGAGVELDHILPRSRTLDDSQTNKVLCFRDSNQSKGNRTPSEWLASTNTAQFDEIIQRANILLRSGLMPYGKYKKLLQKDVNTDEFVSRQLVDTAYITKVTGEYLRCLFDADHHVLGLKGALTAELRWQWGLETILEQLPDSPAWATKDEMRPGEKNRADHRHHAIDAVVIALTNRSRLQSLAKSMSDRTNQREGELLDEPWENFRDTIKERVAKVWVSHRVERKVSGALHEETQYGKTERPDWWVTRKAVDTLKANEIPNIRDPLIRDLVISKLKQARIDFGRKAEVDPKRLKEILADLRMPSGVPIRKVRVLKTDKTIRSIRKKKSETFVKPGSTHHLSIFEWEENGKKRRAADFLTMLEASQRSKKGASIIQREAPARNEKIPTNARFVMSLAQRETVLVEQNDKVDLLIFRTAASTQGQIYFSHHSDARSSNDYKKMVFSANTLRGRKVTVDLLGRIRNAGD

SEQ ID NO: 15611 - protein, 1063 aa, unidentified; identical to SEQ ID NO: 15609
  REGION 1..1063: note = Cas Enzyme sequence

SEQ ID NO: 15612 - protein, 1065 aa, unidentified
  REGION 1..1065: note = Cas Enzyme sequence
MKKRTLGLDLGPNSIGWALVEEDSKTISGQLIDMGVRVFTEGLDAFDTAKESSRNEKRRVARGMRRQTARRRKRRQEITEALISLGLGPSSASKEQRDNWMRMDPYELRAKAVNDTMLEPLELGRIFLHLAKRRGFLSNRKTDASGTESEGLLHEIQENEAKRLQSGHPTLGSWLDEKQRLLKHTDRKEDDHVRRRHLSRKQYLHEFDTIWKAQANFHPELLTDDLRWGKLGRAEFPCKPIPRPSQSLSQLELFGIEGLLFFQRKMYWPTEVIGRCELEPKKRRCPIADRRFQKFRIWQELNNLRYVDPDNGNEFPLALAQRKLLFGKLWETEKLDFSKIRKALGFLESVKFNFERGERSFLKGNATDVVARRSWGKDWNLLDEQLKDEIIEALTNPNLDDRELIHLAGEKWRFTTDQIAKLMKINLPSGYGSLSLKAIQKLLPHLERGLVYSLQDEANSAIHAAGYLRRDQIKRRIYDFLPSPQVERKTPIGNIPNPVVKRTLTEVRKLVNAIIREYGKPDTVHIEMARNLKIGAKKRKEITRDNADRAKKRESIAEVLGKHGITRSRENILRYQLWQEQNHQCLYSGKTISIAQLLSDGGEVEIDHILPRSRTLDDSQTNKVLCFRDSNQSKGNRTPFEWLANSNPAQFEEIIQRANLLLRSGNLPYTKYKKLLQKEVSTDEFVSRQLVDTAYITKVTSEYLRCLFEFDHQILGLKGALTAELRWQWGLETILEEIPNSPAWAARAELRPGQKNRADHRHHAIDAVVIALTNRSRLQNLARSMSNRNNQRRGELMDTPWDCFRESIRQRVSRIWVSHRVERKISGALHEETHYGKTDQPDWWVTRKPVESLKGNEIPNIRDPFIRDLVISKLKEAGIDVGRNADIEAKRLKEAIKDLKLPSGVPIRKVRVLKTDKTVRSIRKNKCETHVKPGSTHHLSIFEWEVKGKKKRGAVFLTMLEASQRAKSGAPIIQRQVPPTSDSIPSRAAFVMSLAQREAVLVEDGDSWDLLIFRTAASTQGQMYFSHHSDARSSNDYKKIVYRANTLKGRKVSVDLLGRIRFAGD

SEQ ID NO: 15613 - protein, 1063 aa, unidentified
  REGION 1..1063: note = Cas Enzyme sequence
MKKRTLGLDLGPNSIGWALVEEDSKGNSGKLIDMGVRVFTEGLDAFDTAKESSRNEKRRVARGMRRQTARRRKRRKAVSEALTSLGLWPASPDHRSDWMQRNPYELRAKAVSGTRLEPFEIGRVFLHLAKRRGFLSNRKTDAAGKESEGLLHEIQENESKRVESGHPTLGSWLNEKHQSLIHSDRKNDDHVRRRHLSRRQYKHEFDAVWKAQANFHPELLRDEHRWGKLGSIEFPCKPIPRGDSAVSQFELFGIEGLLFFQRKMYWPTEVIGRCELEPKKRRCPIADRRFQRFRIWQELNNLRYVDPDNGNEFPLSLPQRKLLFTKLWETDKLDLAKLRKALGFLESVKFNFERGEKSSLKGNTTDFAARKAWGKDWSHLDEEQKDEIIEALTNPNLDDRELIQLATERWKFNNEQISKMMKINLPAGYGSLSLKAIQKLLPHLEKGLTYSLQDENNSAIHAAGYLRRDQIKRRIYDFLPSPQVERKTPIGDIPNPVVKRTLTEVRKLVNAIIREYGKPDEVHIEMARNLKMGAKKRKEITKENADRAKKRDSIAETLSDHGVIKNRENILRYQLWEEQNRQCMYSGKSISVAQLLNDGGGVEIDHILPRSRTLDDSQSNKVLCFRDANQSKGNRTPFEWLASANPQQFDEVIQRANLLLRSGKLPYSKYKKLLQKEVNTDEFVSRQLVDTAYITKVTSEYLRCLFDSDHKILGLKGALTAELRWHWGLETILEQLPDSPAWSTKDQSRPGQKNRADHRHHAIDAVVIALTNRSRLQTLAKAMSDKQNKVQGELLDEPWTGFRETVMDRVSKVWVSHRVERKVSGALHEETQYGKTNQPDRWVTRKAVDSLKANDIPNIRDPFIRDLIIAKLKEFGIEVGRNVEVDPKRLKEVLAELKMPSGVPIRKVRVEKSEKTIRPIRGNKCETFIKPGSTHHLSIFEWEEKGKKKRGAVFLTMLEAIKRVKSGVPLIQRIPPKPSEDIPSDAKFVMSLSMREMILVDVNSRETLLVFRTAAATSTQMLFAEHTDARPSSGIAKFTFYPGTLRGRKVTVDLLGRIRDAGD

SEQ ID NO: 15614 - protein, 1028 aa, unidentified
  REGION 1..1028: note = Cas Enzyme sequence
MTETTLGLDLGTNSIGWSLIDEAAHEIVAIGVRVFPEGVDRDQQGGEHPKNEQRRIARGMRRQIARRARRKRTLRTALVEAGLFPADPGEQTALIDRDPYELRARALNQRLSPHEIGRVLMHLNQRRGFLSNRKEDRKKKKEVSKLEDEISALAGEMRQANHRTLGEHFAAIRSTDPHTRVRGRHTRRDMYEREFEAVWQAQRQHHPDLLTDQLKYGDAGPQTFPRKPNPRGKSGTPLQKYGLHGLIFFQRPTYWPKSVIGQCELEPREKRCPRADRAAQRFRLLQEVNNIKVLVPGAPNERPLLPEERSLLLNYLTSGKERSFDQIRKHFTKKLAWPESVRFNLERGDRKKLLGMPTDAILSRKTLFGKAWRDRPEEEKTRIVRSLLHEDETTVYDRAVDEWGLSPQVADELLDTDLEDKTSKGYSSFSVVAIEKLLPHLERGLLMMSSDGSPSALSEAGYLRPDQRVVNQHEFLPQPPEITNPIVRAALHEVRKVVNAVIREYGRPTRIHLELAREAKGTAETRERRNRENRERERRRDEAADRLREMGHRVSSDAINRYLLWTEQHRECMYSHPTRTISQAQLLSGEVDIDHILPRERSLDNSMMNKVLCFRLENQEKDQQTPAEWVADSDPKKYEEMLQRCRRLPYPKARRFRVRDIVLDDFIARQLTDTSYITTQVHQYLRCLGCDIVCLRGSHTSTLRRHWGLNTVLRRDGLDLKNREDHRHHAVDAAVIALTDRSRLQQLARIRREGGTEATGEILPNPWEGFRADVEAAVNAIHVSHRPQRRVKGALHEETIYGPTHSEGEFTVRKPLEALTVSMVEDIRDETVRKVVKQRLRQFAAIIKGSSIPAEVWREPLIMKHRPSRREFAVPIKKVRLIRRDQTIQPIRNGTACVKPGRIHHACIFEVTDDRGRTRREAVYVTLLEAMRRKRAGAPIVSRTHPDRPEATFIMSLSPGDLLWAEFKGVERLVRVTTLVSTQERIHIVDARDARPSKTRVDEGRKPNTLKGRKVTVDPIGRLRWASD

SEQ ID NO: 15615 - protein, 1038 aa, unidentified
  REGION 1..1038: note = Cas Enzyme sequence
MTPCTLGLDLGSNSIGWALVNEEQGKLLAAGVRVFPEGVDRDQQGGEQSKNEQRRIARGMRRQIARRARRKQLLRKALVEAGLLPELALLPRETPERVAWETEQFQRASPYNLRRRALTERLDPHEIGRVLLHLNQRRGFLSNRKSDKARKKETQGMLKEISDLANEMGDKTLGQHLAEVQLADPHGRLRGRHTQRTMLQQEFEAIWTSQQSHHPTLLTDNLKYGSAGKQSYPREPETLGDSKIIERFGLYGVIFFQRPMYWPKWVVGQCELEPKQKRCPRADRVAQRFRLLQEVNNLRLLDSTQGDERPLIADERKHLLAILAEQKEMEFAKIRKKLGFLENVRFNLERGDRKKLDGMKTDATLASSKLFGKAWHKRPDSEKNAVVRTLLDDRLEDAEKLRRAKEEWGLSAEAAELLLDVDLPEGHASLSRLAIEKLLPYMERGLPLMTRDGTPCALAEAGYLRRDQQVVNQQPLLPLPPEVTNPLVRQALHEVRKLVNAVIREYGIPARIHIELAREVKGTAEDRERRTKEMRSRERNRDEAAKRIREQGVKVTRDAIDRYLLWEEQRHECVYSGRPISINQLLAGEIHEDHVLPYPRSLDNSLMNRVVCFRDENDAKRDRTPHEWLAAADSEKYDAILQRADKLPYAKARKFREKDIKLDDFIARQLVDTAYITRKVTEYVGCLGADVICTKGQLTAELRWQWGLDSVLRDDGLHLKNREDHRHHAVDAIVIALTNRSRLQQLARIRRHGGTARTGEVLPDPWTHFRTEVETLLSGVRVSHRVERKIRGALHEDTIYGPTAKPDATAKTIRPWAKGWVEKEGVFVCRKPVEQLTAAMIDDIRDTTIREMVLGRLKAHGVDLERAKSIPKEVWKEPLRMPSGVPVKKVRILRSDLTIQPIRGGTAYVKPGSLHHLCIFEYTDEKGKVRREAEFVSMLQAVERLKRREPLIQRVSKRTGAKFVMSLSAGEMVLATFKGCERLVHLATAASTQGQLYFVDHADARRSGEAEKLVAKANTLNGRKVTVDLLGRIRWAND

SEQ ID NO: 15616 - protein, 934 aa, unidentified
  REGION 1..934: note = Cas Enzyme sequence
PEERQKVIRKLRGPLFKKSKGKLLPKSSASFTDIKEALGIKPRDKSVSLNIEADEDRDINADWFHREIVHGAFTEERWRTMGERQRESVNRAVLKFNPEHEEDAKKLRNGAMSWWGLTDAAADRLIEAWIARPKLERRLNLSRKAIMNLLPRMEEFDRESGRWPTQQEARKNYAKLLDALYQKTGVVADRIASERYATGALGLTAADRYYMRLKKHQIAEGVPELPPAPTLSNPVVRKAIHEVRRHLLAYLRKFRCKPHRVVIELARITKQSERQRNAALARNSRRDKLRKIIIAKILPTAFEDARRLTLNQQRAAVDRVVLAQQQGRICPYCGNAGITDKIAAKGDDLEIDHIVPYSRCGDDGLNNKVLVHRTCNRGKGSLTPREWWGDGFEARIRFAEKLFKNAEPGKGEYFEKRDYNRKWENFNREVRGGDEFKNSQLTDTAYAARQVANYLADALYDGRGLPERGDGEGNQRIFFTMGRLTSMLRKDWQLFETVKPEGEARERTGGMTAEEELELAEKNRGDHRQHAIDAVTIALTDPRIKNKLARWAGDAAEYKEKHGQWPRRKKEDPPWGTVGNFRLQVLEKVYAELGSKPSAGASTREDGSGLIVVSHRPVKRRLTGAFHEDTHYGPVIGPLPPHRSESVDTLFTNRISADRLTPNHLRVPDGWDNLSVKLDDGGISVADKKATRRTLAAMEDPSPGKSGIVRDRALRDRIRKCLRENGLDPENFTTAGIKKLIADKKLTMASRVPIKGVVLLRTNTDPVSIPRKRWDPFSDRMIADQDPRTARVYIGGNNHHVPIREHRKSGKWSGEVVSTFVAAKRVRVEKRDAVDRSDDKDSFVMSLAEGEMVYARRKDRPEDSPNYFVVCKLDKAGNSCRIHFAPHWDARKASEQDRWDVTPGDLKDCGPTLGHPPYKVRVSPLGKPAPLHND

SEQ ID NO: 15617 - protein, 1030 aa, unidentified
  REGION 1..1030: note = Cas Enzyme sequence
MSKMVLGLDLGSNSIGWALLEQQDGKPNRIINLGSRIFIKAVEEKTPTPKNAKRRNARLIRRVLQRRARRKQKMLNYLLSLKLLPDELQDNYSPEAILNSLGNPYKLRAKGLDQALTAYELGRVLLHLVQRRGFLSNRKVLLGDMVDDPDVIAELNVLEESDEEQTARDKEETAFKKDIAELRATINQANCRTLGEYLATLDHHDCKRNRLRSGGHLRTDRQMYREELALIWEQQIQHHPILTEQVREKFEQIIFYQRPIKLKADRLGKCSLEPKRQRANIARLESQRFRYLQDINNLQYFENQTEQWLKLNPQQREKLIAVFEAEASISFAKIRKTLGLDKSQEINLERGSKKLKGNITACEIRKTLSIWDDLSNQQQLALVEDLLTFEKKSALKKRLINHWQFTPAIAVNLCLLEFEPGHSNLSTKAINALLPYLQQGQLYSDARISAGYGYEVEQQAIVEKLGKPPETANPIVRKGLHELKRLVNAIIAEYGKPDAIRVEMARDLEMNTKRYAEHEKQQKANTKANDDATAKFQEQRALSPHLALSHYPSKTDKIKYRLWLDQNRSCAYSCKPIELSSLFGPEIEIDHILPYSESLDDSYMNKVVCYTKFNRQKAQQTPIDAFSSNPNQWNQITQALKHWDRRLTAKKNRFYMTAAEVQQRDFISSQLNDTRYISRLALDYLKPLGSDISVSKGITTAWVRHQWGLNDLIGDDDTKDRSDHRHHAIDAVVIACIDRKFYRALVNTAKDLERKQSQLDMRDIHIDPVWPSLRHDLQQALSEVIIAHAPQLKLTGELHEVTGAGFIEGVGNVNRKNLDVNFSQVEKIVDPHVKAIVEKHLQRFNNKPKQAFAEGNPVYHKDGKTPIKRVRIVQSKTTLDKLQKTKFGARNRQGEIFKWLPYGNLHHVEILKDKTTGKYSGEFITTMLASQRAKGIGQDKQAIIKTDHGENIEFVMALHINDIVSVVDNSVRVFYRVQNLDSGGNRFILRLHTAAKLDRKEEEIFFSINDASFEKWQLQKHTINVIGKLL

SEQ ID NO: 15618 - protein, 1030 aa, unidentified
  REGION 1..1030: note = Cas Enzyme sequence
MSKTVLGLDLGSNSIGWALLEQQEGKPNRIINLGSRIFIKAVEEKTPTPKNAKRRNARLTRRVLQRRARRKQKMLNYLLSLKLLPDALQDNYSPEAILNALGNPYQLRAKGLDQALSAYELGRVLLHLVQRRGFLSNRKVLLGDMVDDPDVIAELSFLEESDEEQTARDKEETAFKKDIAELRATINQANCRTLGEYLATLDHHDCKRNRSRSGGHLRTDRQMYREELALIWQQQIQHHPILTEQVREKFEQIIFYQRPIKLKADRLGKCSLEPKRQRANIARLESQRFRYLQDINNLQYFENQTEQWLKLNPQQREKLIAVFEAEASISFAKIRKTLGLDKSQEINLERGSKKLKGNITACEIRKTLSIWDDLSNQQQLALVEDLLTFEKKSALKKRLINHWQFTPAIAVNLCLLEFEPGHSNLSTKAINALLSYLQQGQLYSDARISAGYGYEVEQQAIVEKLGKPPETANPIVRKGLHELKRLVNAIIAEYGKPDAIRVEMARDLEMNTKRYAEHEKQQKANTKANDDATAKFQEQRALSPHLALSHYPSKTDKIKYRLWLDQNRSCAYSCKPIELSSLFGPEIEIDHILPYSESLDDSYMNKVVCYTKFNRQKAQQTPIDAFSSNPNQWNQITQALKHWDRRLTAKKNRFYMTAAEVQQRDFISSQLNDTRYISRLALDYLKPLGSDISVSKGITTAWVRHQWGLNDLIGDDDTKDRSDHRHHAIDAVVIACIDRKFYRALVNTAKDLERKQSQLDMRDIHIDPVWPSLRHDLQQALSEVIIAHAPQLKLTGELHEVTGAGFIEGVGNVNRKNLDVNFSQVEKIVDPHVKAIVEKHLQRFNNKPKQAFAEGNPVYHKDGKTPIKRVRIVQSKTTLDKLQKTKFGARNRQGEIFKWLPYGNLHHVEILKDKTTGKYSGEFITTMLASQRAKGIGQDKQAIIKTDHGENIEFVMALHINDIVSVVDNSVRVFYRVQKLDSGGNRFILRLHTAAKLDRKEEEIFFSINDASFEKWQLQKHTINVIGKLL

SEQ ID NO: 15619 - protein, 1031 aa, unidentified
  REGION 1..1031: note = Cas Enzyme sequence
MGNKKKVLGLDLGSNSLGWALLEEQDGTVNRFIDIGSRIFSKAVEEKTPTPKNVKRRDMRLGRRVLQRRARRKQRMLNYLVSLNLLPAELQKNTQPEIQLNKIGNPYQLRVKALDYQLTPYEFGRVLLHFVSRRGFLSSKKQLAGDLVDDPDTMDYLNELDKKPTKDKEEGAFKSDIAGVRNAIEKSGYRTLGEYLHNIEQGECKRNRSHEGGHLRTDRKMYQDELTEIWKQQNQYFNQLPNDFMANNKGIKQIIFYQRPLKLKEDRIGKCSLETKNNRAAMARLEVQRFRYLQDVNNLEYFEREIDQWINIDTDKKQKLIEYFEQHKSINIRTLKKELGFDRHYKFNLEMKNLKGNVTAFEIRNILKKSWDDYNQEQQKALVDDLLSIKKKSALKNRLTKYWKLETSQAIQLCLLEFEPGHSSHSLKAINKLLPYLEQGFIYSEARVKAGYGYELKEIETHEKLTAPPETANPIVNRGLHELKRVINAIIKQYGKPDIVRIEMARDLEMNTKRYKDNEARQNKNKKENEKAVEAYRGLNLGSYPSYNDKIKYRLWQEQHHFCAYSCQSIPVNSVFTASVEIDHILPYKKSLDDSYMNKVLCFTAENRNKGDRTPKDAWGNNEEKWNQITQAIKGWKGMDAKVKRFFQTEVDLKNRDFISTQLNDTRYISKLAIEYVKQLGCDVTISKGITTAWLRHQWGLNNLIGETDKKERTDHRHHAIDAAVVACVDRSLYKQILNWTKNNVKELKVNSPYPDFRDELDEQLKHVIVSHDTQRKLSGGLHEETGAGYIEKHGGLVYRKNLSPDFNEKNVKKIIDDTVRKQVIEHLSKYENKPKLAFADNKTVYHKDGKTPIKRVRVLQSATTLKQLEKNKLGIKDKSGKIFKWMPYGNMHHVEIIKNEKTGKYKGEFVTMMEAHRRAMTGTKSARKRNIEREAIIKKHHGDDWVFVMALHINDLVSVDKGNNEREFYRVQKLGGGYDLTLRLHTEASTKREKWLIKSKKMLENSFVVFISDCDLKLHKINSIGILSHD

SEQ ID NO: 15620 - protein, 1033 aa, unidentified
  REGION 1..1033: note = Cas Enzyme sequence
MSKKILGLDLGSNSLGWALLEEKDGTVCKFIDIGSRIFSKAVEEKVPTPKNVKRRDMRLGRRVLQRRARRKQRMLNYLVSLNLLPKELQGHTQPEILLNEIGNPYELRTKALDEQLKPHELGRVLLHFVARRGFLSSKKQIAGDLVDDPDTITYLNELDDKPTKDKEEGQFKADIANVLLAIQEGSYRTLGEYLHNLEQGKCKRNRSHEGGHLRTDRKMYQDELEQIWEKQNQYFPHLPNDFFYDNEGIKRIIFYMRPLKLKKDRIGKCLLEPQKYRAAKARLEAQRFRYLQDVNNLAYFERQTDQWISLDHEKKQKLIEYFEHHPFINITNLRKELGFDKTYKFNLEMKNLKGNITACDIRAVLNTIWDEYTNEQQEALVEDLLSIKKKSALKTRLINHWNLDTSQAVQLCLLEFEPGHSNHSLKAIKNILPYLEKGHLYSCNTKDKPKGALQLAYPNANQQITINNAKLGTPPETANPIVNRGLHELKRVINAIIKQYGKPDVIRIEMARDLEMNTKRYKNNEAKQAKNKKENEKAVDAYRGLNLGKYPSYDDKIKYRLWQEQNHSCAYSGKTIPLNAVFTAEVEIDHILPYKKSLDDSYMNKVLCYTSENQNKGDRTPKDAWGGNEEKWNQITQAISGWKGLDSKVKRFFQTDSDLQKRDFISSQLNDTRYISRLALEYVKELGCDVSTSKGVTTAWLRHQWGLNNLIGETDKKERTDHRHHAIDAAVVACVDRNLYKQIQTWTQNNEQELKICSPYPNFRSEMEEYLKHVIISHTSQRKLSGSLHEETGAGYIEKHGGLVYRKNLMPDFTVKNANSIVDKTVKELVQSHLDKYENDPKKAFSDNIIIYHRDGKTPIKRVRVLQSKTTLKKVEQNKFPIRNKSGEIFKWMSYGNMHHVEIVQHKETGEYKAKFIMMMEAHRRAMTGTKSAQNRNVKREQIIKTNHGDDYEYIMALHINDLVSITKSGNEREFYRVQKLDTGSNRMVLRLHTAAKLDSKPEEIYFSFNLASFKKWNLKKNNVNAIGMLSHD

SEQ ID NO: 15621 - protein, 910 aa, unidentified
  REGION 1..910: note = Cas Enzyme sequence
QIAGDLVDDPDTITYLNELDDKPTKDKEEGQFKADITNVLLAIQEGGYRTLGEYLHNLEQGKCKRNRSHEGGHLRTDRKMYQDELEQIWKKQNQYFPHLPNDFIADNKGIKRIIFYQRPLKLKKDRIGKCLLEPQKYRAAKARLEVQRFRYLQDVNNLKYFERHTDQELSLNDKDKQTLITYFECSPSINITTLRKELGFDRYVKFNLEMKNLKGNITAFEIRTVLKTLWDNYTNKQQEALVEDLLSIKKKSVLKARLIKHWNLSVPQAVQLCLLEFEPGHSNHSLKAIRNLLPYLEKGHLYNCNDKDKPKGALQLAYPNANQQININNEKLGTPPETANPIVNRGLHELKRVINAIIKQYGKPDVIRIEMARDLEMNTKRYKENEARQAKNKKENEKAVDAYRGLKLGKYPSYDDKIKYRLWQEQNHFCAYSGKSIPLNAVFTAEVEIDHILPRKKSLDDSYMNKVLCYTSENRQKGDRTPKDAWGGNEEKWNQITQAISGWKGLDPKVKRFFQTDSDLQKRDFISSQLNDTRYISKLALGYVKELGCDVSTSKGVTTAWLRHQWGLNNLIGETDKKERTDHRHHAIDAAVVACVDRNLYKQIQTWTKNNVKELKINSPYPNFRDELGEYLKHVIVSHDTQRKLSGSLHEETGAGYIEKHGGLVYRKILHTVFLDSKGKFIENEKGINKKINSIIDNTVRDIILKHIDKYPSTKEAFSDNIIVYHKDGKTPIKRVRVLQSETALKKLQKNKFAVKNKSGNIFKWMSYGNKHHVEIIQHIETGKYDGKIIPMMEAHRRAMTGTKSAKKRNIKSEQIIKTNHGDDYNFIMALHINDLVSVNNGDKEREFYRVQKLGGGYDLTLRLHTETSTKREKSLIEDKKMLENSFGNFISKFDLKIHKINAIGILTRD

SEQ ID NO: 15622 - protein, 1030 aa, unidentified
  REGION 1..1030: note = Cas Enzyme sequence
MSKKVLGLDLGSNSLGWALLEETDGSVNSIVDIGSRIFTKAVEDKVPTPKNVKRRDMRLGRRVIQRRSRRKQRMLNYLVSLKLLPKELQGHTQPEIILNELGDPYELRVKALDTPLTPHEFGRILLHFVARRGFLSTKKQAAGDLIDDPDTIIFLNELDNESVGSKEEGAFKADIKEVHASIDASGSRTLGEYLHKLAQGQCKRNRQHEGGHLRTERKMYQDELALIWIEQEQYFSHLPTDFMSKDQGVLQIVFYQRPLKLKKDRVGTCSLEPKNYRAAMARLETQRFRYLQDVNNLQYFERHTDQWLSITHEDKQTLINYFEHNPKITITALKKQLGFDKLTKINLEAKNLKGNITACEIRSVLDEQWDHYTEEKQAALVEDLLSIKKKSALKARLISHWGIDKSIAIKLCLLEFEPGHGSLSLKAIRKLLPFLQQGLIYSKKDYATGELGALQAAGYLDVEEEQANFDKLGPPAETSNPIVNKGLNELRRVVNAIIKQYGKPDIIRIEMARDLEMNTKRYKENEARQQKNRKENEKAVAAYKKLALGKYPSHDDKIKYRLWEDQGHSCAYSNKTIMLSQVFTAQVEIDHILPFKKSLDDSYMNKVLCFVSENRAKGDRTPKDVWGGDENKWLQITQAISRWKGLDSKVKRFYQTEVDLQKRDFIASQLNDTRYIAKLALDYVQQLGCDVSVTKGYVVSQMRHQWGFNDLIGETDKKERTDHRHHAIDAVVIAATSRQMYKKAVAQIERNKLNIERPYESIKDELAEQLNQTIISHASQKKLSGGLHEETGAGFIEKHGGLVYRKNLAPDFTVKNANSIVDETVRELVLAHLLKHDNEPKKAFADGFIVYHKDDKTPIKRVRVLQSKTTKEKLEQSKFGIRDRSGKIFKYMAYGNMHHVEVVQHNETGKYKGAFVTMMEASHRAKGIRSKLNPEGEAQAIVKRDHGSEWKFVMALHINDIVSIDNGEGQLFYRVQKLDSANNRFYLRAHQASTLNNKEDALAVTINQENFGRHSLKVHQINAIGIFADD

SEQ ID NO: 15623 - protein, 925 aa, unidentified
  REGION 1..925: note = Cas Enzyme sequence
ELRVKALDTQLTPHEFGRILLHFVARRGFLSTKKQVAGDLIDDPDTIIFLNELDNDSTGSKEEGAFKADIAEVRKSIITAGARTLGEYLHQLVKGECKRNRKHEGEHLRTERKMYQDELALIWLKQEQFFKHLPLNFMSKDQGVLQIIFYQRPLKLKKDRVGICSLEPKKYRVAMARLEAQQFRYLQDVNNLQYDERHTNQSLSINAEGKKALIHYFENNPKITKTELKKQLGLDQLTKINLEAKNLKGNITACEIRSVIGDQWDHYEDEKQVALVEDLLSIKKKSALKTRLISHWGMTKDKAIKLCLLEFEPGHGRLSLKAIRKLLPFLQQGLIYSRNDHATGELGALQAAGYLDAKKKQQDLDKLGAPVETSNPIVNKGLHELRRVVNAIIKQYGKPDIIRIEMARDLEMNTTRYKENEAQQLKNRKENEKAVDTYKKLGLGKYPSHDDKIKYRLWEDQGHSCAYSNKTIMLSQVFTAQVEIDHILPMKKSLDDSYMNKALCFKSENEFKDDRTPKDAWGGAEEKWLQITQAISRWKGLDSKVRRFYQTEEDLQKRDFISSQLNDTRYIAKLALDYVQQLGCDVSVTKGYVVSQMRHQWGFNDLIGETNQKERADHRHHAIDAVVIAATSRQMYKKAVSQIKRNKFTVKRPYEGIKDELAEQLKQTIVSHASQKKLSGELHEETGTGYIQKHGGLVYRKLLEPKFTVKHAKKIVDETVKELVLAHLQKHGDDPQRAFAEGFIVYHKDNKTPIRRVRVLQSKTTKEKLEQSKLGIRDKSGKVFKFMTYGNIHHIEVVQHNKTGDYKGIFVNMMEASHRAKGIQSNLNPRGERQAIIKRDHGHEWQFLMALHRRDIVSIDSGEGQKFYCVEKLSPSRNEFILRAHQASTQNNKEEELSVRVNKESFTRHSIKVHQINAIGIIADD

SEQ ID NO: 15624 - protein, 1024 aa, unidentified
  REGION 1..1024: note = Cas Enzyme sequence
MSKKVLGLDLGSNSLGWALLEETDGKANSIIDIGSRIFTKAVEEKVPTPKNVKRRDSRLGRRVIQRRSRRKQRMLNYLVSIDLLPRELQGHTQPEIILNELGDPYELRAKGLDTQLTAHEFGRILLHFVARRGFLSTKKQVAGDLIDDPDTIVFLNELDDTPTEDKEETAFKADISEVKKAIDSAGARTLGEYLHKLVRGECKRNRSHEGGHLRTERKMYQDELALIWQQQSQYFSHLPNDFMETDQGIKQIIFYQRPLKLKKDRIGKCSLEPKNNRAPMARLEVQRFRYLQDVNNLQYFERHTDQWLSISNDDKQKLIEYFEHHPKITITELKKQFGFKINLEAKNLKGNITACDIRSVLNEQWDNYSGVSQYALVEDLLSIKKKSALKTRLIKHWGLDASKAIELCLLEFEPSHSSLSLKAINKLLPFLNQGLIYSKKDKGTGELGALQAAGYDDELKEQEVLDKLVQPIATSNPIVNKGLHELKRVVNAIIKQYGKPDVIRIEMARDLEMNTERYKENEARQAKNKKENEKAVVAYKDLKLGKYPSHNDKIKYRLWEEQNYCCAYSNNSIPLSAVFTAQVEIDHILPYKKSLDDSYMNKVLCFTAENRNKGDRTPRDAWSGDAEKWTQITQAISRWKGVDSKVKRFCQTEDDLQKRDFISSQLNDTRYIAKLALDYVKQLGCDVSVTKGFVVSQIRHQWGFNDLLGETNKKERTDHRHHAIDAVVIAATSRQLYAKAVNQIERNKLKIEMPYPHIHDELKERLEHTIVSHASQRKISGGLHEETGAGYIEKHGGLVYRKNISPDFTVKNAQSIVDETVQALVLSHLESYDNVPKKAFADDVTLYHKDGKTPIKRVRVLQSKTTRKKLEQNKFGIKDKSGKVFKYMAYGNMHHVEILKHKETGKYKGEFVTMMQASHRARGIQSKLNPEGLRQVITKIDHGDKWHFVMALHINDLVSIEGENFERIYYRVQKLESPTGLTLRLSTASTLDNKEEEIRVSISTLMNKGVTMHVVNSIGIISDD

SEQ ID NO: 15625 - protein, 1030 aa, unidentified
  REGION 1..1030: note = Cas Enzyme sequence
MSKKVLGLDLGSNSLGWALLEETDGKANSIIDIGSRIFTKAVEEKVPTPKNVKRRDSRLGRRVIQRRSRRKQRMLNYLVSIDLLPRELQGHTQPEIILNELGDPYELRAKGLDTQLTAHEFGRILLHFVARRGFLSTKKQVAGDLIDDPDTIVFLNELDDTPTEDKEETAFKADISEVKKAIDSAGARTLGEYLHKLVRGECKRNRSHEGGHLRTERKMYQDELALIWQQQSQYFSHLPNDFMETDQGIKQIIFYQRPLKLKKDRIGKCSLEPKNNRAPMARLEVQRFRYLQDVNNLQYFERHTDQWLSISNDDKQKLIEYFEHHPKITITELKKQFGLKKQFGFKINLEAKNLKGNITACDIRSVLNEQWDNYSGVSQYALVEDLLSIKKKSALKTRLIKHWGLDASKAIELCLLEFEPSHSSLSLKAINKLLPFLNQGLIYSKKDKGTGELGALQAAGYDDELKEQEVLDKLVQPIATSNPIVNKGLHELKRVVNAIIKQYGKPDVIRIEMARDLEMNTERYKENEARQAKNKKENEKAVVAYKDLKLGKYPSHNDKIKYRLWEEQNYCCAYSNNSIPLSAVFTAQVEIDHILPYKKSLDDSYMNKVLCFTAENRNKGDRTPRDAWSGDAEKWTQITQAISRWKGVDSKVKRFCQTEDDLQKRDFISSQLNDTRYIAKLALDYVKQLGCDVSVTKGFVVSQIRHQWGFNDLLGETNKKERTDHRHHAIDAVVIAATSRQLYAKAVNQIERNKLKIEMPYPHIHDELKERLEHTIVSHASQRKISGGLHEETGAGYIEKHGGLVYRKNISPDFTVKNAQSIVDETVQALVLSHLESYDNVPKKAFADDVTLYHKDGKTPIKRVRVLQSKTTRKKLEQNKFGIKDKSGKVFKYMAYGNMHHVEILKHKETGKYKGEFVTMMQASHRARGIQSKLNPEGLRQVITKIDHGDKWHFVMALHINDLVSIEGENFERIYYRVQKLESPTGLTLRLSTASTLDNKEEEIRVSISTLMNKGVTMHVVNSIGIISDD

SEQ ID NO: 15626 - protein, 1031 aa, unidentified
  REGION 1..1031: note = Cas Enzyme sequence
MVKKVLGLDLGSNSLGWALLEETDGSASGIIDIGSRIFTKAVEDLVPTPKNVKRRDMRLGRRVIQRRSRRKQRMLNYLVALKLLPSELQGDTQPEIILNELGDPYELRAKGLDSQLTAYEFGRILLHFVARRGFLSTKKQVAGDLIDDPDTIVFLSELDDKPTKDKDEGAFKADIGEVRAAINESGARTLGEYLYKLAQGQCKRNRSHEGGHLRTDRRMYQDELALIWERQRQHFEHLPDDFMAKDQGVKQIIFYQRPLKLKKDRVGKCSLEPKNNRATMARLEVQRFRYLQDINNLQYFERHTDQWLNISDKDKQALAEYFESHPKITMRPLKKLLGLDNLTKLNLEAKNLKGNVTACEIRSVLNEQWDNYSEESQYALVEDLLSIKKKSALKTRLIKHWHLDKSKAIALCLVEFEPGHSNLSLKAIHKLLPFLKQGLIYSKKGHESGELGALQAAGYDDISEELKILDKLPKPIETSNPIVNKGLHELRRVVNAIIKQYGKPDVVRIEMARDLEMNTKRYKENEARQAKNKKENEKAVDAFRDLNLGKYPSHNDKIKYRLWEEQGHCCAYSNKTIPLSTVFTAQVEIDHILPYKKSLDDSYMNKVLCFTAENSTKGDRTPKDAWGGNDEKWTQITQAISHWKGVDSKVKRFYQTETDLQERDFISSQLNDTRYIAKLALEYMKHLGCDVSVTKGFVVSQIRHQWGFNDLIGEVNKKDRTDHRHHAIDAVVIAATSRQLYKKAVNQIENNKLKIDPPYLEIRDELALQLKDTVVSHASQRKLSGELHEVTGAGYIERHGGLVYRKTLTPDLTAKKAKGIIKSIVDKTVQGIVQDHLENHEDDPKKAFADGVTIYHKDGKTPIKRVRILQSTATEETLRQNKFGVKDKSGKVFKYMTYGNMHHVEILKHQGTGKFKGEFITMMQASHRAKGVQSALNPEGYKQPIVRMFHGGEWQFVMVLHINDLVGIDREGVTVLYRVQQLESPNRLTLRLNTAATIGNKDEKIRRAISVLMSQGLVKYNINAIGIIAND

SEQ ID NO: 15627 - protein, 1033 aa, unidentified
  REGION 1..1033: note = Cas Enzyme sequence
MGKKILGLDLGTNSIGWALLEETNKKPSVIIDLGVRIFQKSVEEKTPTPKNVKRRDARLARRVIQRRARRKQRMLNYLVKLDLLPKELQGHAQPEIILNRLGNPYRLRAMALDNPLKNHELGRVILHLVQRRGFLSSRKTLLGDMVDDPDVKAVLDKLEDTGESLSERAKEETLFKKDINVLRQTIKTNGHRTLGEYLASLDHHDCKRNRSREGGHLRTDRQMYHDELDLIWEMQAKFNEILTDEVKEQIEQIIFYQRPLKLSSDSVGKCSLESSRNRARMARLECQRFRYLQDINNLKYFDYYTDTWKELNQVDREKLVKLFENKANPTFKTDIRKALGLDKGTEFNLDTDNKKLKGNITACEIRSIFLEWDGLEKVKQLSLVEDLLTIKKKSVLKKRLMNHWRFDAKTAVNLCMLEFEPGHANLSIKAITKLLSYLEHGQIYSDARVSAGYNYEIEKADIVEKLGSPPEIANPIVNKALNEVRRLVNAVIKEYGKPDAIRIEMARDLEMNTKKYKAYTKQQLANTKANKEAGEKYQDMGKANPHLMLSKYPSRADKIKYRLWKNQDERCAYSGKNISLATLFSAEIDIDHILPYSQSLDDSYMNKVVCFAGENRYKGQRTPIDTWGANEEKWNQISQAVSRWSKKLTAKKNRFFITSDELQTRDFISSQLNDTRYISKVTLDYVKQLGADVSVSKGTTTSWLRHQWDLNSLLGETNEKERADHRHHAIDALVVSCVGRQFYKNLVGLATDLEKSSSQLQMRDLHIDPPWPTLRDNLNDKLQNIIVSHASRKKLSGALHEETGAGFIEGKGTVYRVDLNSEFKITQINKIIDDEVRHIVQQHLEKYENKPKEAFADDVTVYHKDVKTPIKRVRIIQAKTSRDKLIKNKFGARNKEGHVFKWMPYGNTHHVEIIKTKKTGIYSGVFVTTMEASRRARGVGVKKQPIIKINHGDDKEFALALHINDIVSLKNGDTRKYYRVQLLEADSGRIKLRLHTAANIDNKNEEIRISIKKLMTMDLSLHAVNSIGMIRND

SEQ ID NO: 15628 - protein, 1032 aa, unidentified
  REGION 1..1032: note = Cas Enzyme sequence
GLDLGTNSIGWALLAEEQGELKSIIDLGSRIFTKAVEEKTPTPKNVKRRDARLGRRVLQRRARRKQRMLNFLVSLDLLPQTLQDHTQPEIILNRLGDPYTLRAAGLDQSLRPHELGRVLLHLVQRRGFLSNRKTLLGDLIDDPDVQSVLHEMGEDDPNTTTDKEEGQFKQDISLLRTEIQAKNCRTLGEYLSTISSPNCRRNRIRDGGHLRTDRQMYREELDLIWQQQALHHTKLTNELKEEIEEIIFYQRPLKLRADRVGKCSLESKNNRARLARLEVQQFRYLQDINNLQYLDHYKNRWVPLSSTEREKLTLLFESKATITFPQIRKTLDFDKKTEFNLEKGGNKKLKGNITITTIQSQYPDWDQLNQQQQQQLVEDLITIQKKSVLKRRLMQHWKIPAEFAIHLCMVELEPGHSNLSLKAINKLLPHLLQGNIYSDARKAAGYGYEAEELQVIDKLGLPPEIPNPIVQKGLHELRRLLNAIIAEYGKPDAIRIEMARDLEMNTKRYKSFVKQQNNNTKANDKATDEYRAVGSKNPHLQLRHYPSHNDKLKYRLWSDQEQRCAYSNQAINMTTLFTAEVEIDHILPFSESLDDSYMNKVVCFTRENRYKGQRTPIDAYGGDEEKWNQIAQSLSHWASKLKGKRNRFYMTADDVQQRDFISSQLNDTRYISKVALEYLEPLGVEITTCKGATTAQVRHWWGLNSLIGETNKKERTDHRHHAIDAVVIATIDRRFYNTITKLAKEMERSHTSINDLHLDPPWKQFRSDLEQQLQQTLIAHTPQRKLSGALHEETGVGFIEGKGCVERKNLDADMSIKRAGKIIDDSVRELVLEHLQQHGNNPKQAFAEGFQLFHKDGKTPIKRVRIIQSSTTLKKLEQSKFGVRNESGVVFKWHAYGNLHHVEIIHHRVSGKVSGQFITTMEATHRARGIGMPKQPIIQKNHGADHELLMALHINDLVSVEHDGERVFYRVQKLESGGNKIMLRLHTAALLNNKNEELRLSINKDVFEKWSLRTEQINVIGKPLISNDQTHR

SEQ ID NO: 15629 - protein, 1037 aa, unidentified
  REGION 1..1037: note = Cas Enzyme sequence
MSKKILGLDLGSNSIGWALLEEINGEAHSIINIGSRIFTKAVEEKVPTPKNVKRRDMRLGRRVLQRRARRKQRMLNYLVSLNLLSNELQRNYQPEVILNKLGDPYELRNKALDEKLTRYELGRVLLHFVARRGFLSTKKQVAGDLIDDPDTITYLNEIDDKPTKDKEEGAFKADINDVRQAINDSGARTLGEYLYKLEKGGCKRNRSHEGGHLRTDRAMYKDELDLIWQQQRQYFSNLPDDFMEDNKGVKEIIFYQRPLKLKKDRIGKCSLEPKNNRASMARLEVQRFRYLQDVNNLQYFERQTEQWLAITQVDKGKLVEYFERHSTITITTLKKLLGFDKLTKINLEAKNLKGNVTACEVRSVLSDQWDNYSNTEQFNLVEDLLSIKKKSALKARLIKHWSLSTEIAIKLCLLEFEPSHSNLSLKAINKLLPFLQQGLIYSKKDHQTGELGALQAAGYSDEIKEQEICNKLGAPLETSNPIVNKAMHELKRVVNALIKEYGKPDTIRIEMARDLEMNTKRYKENEARQNKNKKANEEAVEAYQGLNLGKYLNYDDKIKYRLWEEQNRRCAYSNEAIPLNSVFSSTVEIDHILPFKKSLDDSYMNKVLCYVVENRNKADRTPKDAWSGNMEKWLQITQAISKWKGVDSKVKRFHQTEEDLQKRDFISSQLNDTRYISKLALDYMAELVGQSNVSVTKGFVVSQIRHQWGFNDLIGEVEKKDRTDHRHHAIDAVVIAATSRSLYTKSVKQIERDKLKIEPPYPEIRNELAECLEQTIISHASHRKLSGGLHEETGAGYIEKHGGLVYRKNLAPDFTVKNANQIVDSTIKLMVLKHLEQYDNDPKKAFADNIKVMHKDGKTPIKRVRVLQSKTTLKKLEKNKVGIKDKSGNVFKYMSYGNMHHVEIIKNKETGKYKGEFITMMQASHRAKGIQSKLNPEGRKQPLVNAQHGDEWEFIMALHINDLVSIKAGNGKRKFYRIQKLDTQNNKFVLREHLASTLQNKDQEVNVSITTENLGSKEIRLHKANAIGVFTDDQTNH

SEQ ID NO: 15630 - protein, 997 aa, unidentified
  REGION 1..997: note = Cas Enzyme sequence
SIIDIGSRIFTKAVEEKVPTPKNQKRRDMRLGRRVVQRRARRKQRMLNYLVSLDLLSNELQRNFQPELILNSLGDPYYLRAKALDEQLTRHEFGRILLHFAARRGFLSTKKQVAGDLIDDPDTLSYLNQLDDKPSLDKEEGAFKADISELRNSIETSGSRTLGEYLYKLEHGICKRNRSHDGGHLRTDRAMYKDELNLIWEKQKQFFPDLPDDFMTDNKGIKQIIFYQRPLKLKKDRVGKCSLELEKNRAPMARIEVQRYRYLQDINNLQYFERHSEQWLSISKSDKQKLVEYFEKNLKITVAALKKELGLDKLTKINLETKNLKGNITACEIRGVLGERWDHYSDQDQHALVEDLLTIKKKSALKTRLLNHWTLSASEAVKLCLLEFEPGHSNHSLKAINKLLPYLEQGYLYSEARVKAGYDYEIVKIEPHDTLCAPDTTSNPIVNKGMYELKRVVNAVIKQYGKPNAIRIEMARDLEMNTKRYKENEKRQGQNKKANEVAVDAYKGLKLGRYPSRDDKIKYRLWEEQSHRCAYSNKTIPLNAVFTAEVEIDHILPFKKSLDDSYMNKVLCYTAENRIKGDRTPIDAWRGNAEKWNQMTQAIGKWKGLESKVNRFYQTEEDLQKRDFISSQLNDTRYIAKLAQEYVKQLGCDVSVTKGFVVSQIRHQWGLNDLLGETNKKERTDHRHHAIDAVVIAATSRGLYKKAVSQIQRNKLNIPVPYSNLREELQERLKHTIVSHATQRKLSGALHEETGAGYIERHGGLVYRKNLSPDFTVKNAASIVDSVVQDIVLSHLEKHENDPKKAFADGKTVLHKDGKTPIKRVRVLQSKTTLKKLEQNKVGIKDKAGNVFKYMSYGNMHHVEILQNKQTGKYKGEFVTMMQVSHRAKGIQSKLNPEGRKQPLVQTTHGDDWQFVMALHINDSVSVLANSGERIFYRVQKFMKEQGYLVLRLCTTSVLSDKSEEVQLPIHKLMTDQMLKLHKVNAIGVISDDKANN

SEQ ID NO: 15631 - protein, 1031 aa, unidentified
  REGION 1..1031: note = Cas Enzyme sequence
MSKKILGLDIGSNSIGWALLESNENAPSKIIDLGSRIFTKAVEDKTPTPKNVKRRDSRLARRVIQRRARRKSRMLNYLVKLKLLPQELAGHTQPEIILNELGDPYQLRKKSLDSPLKPHELGRIFLHLVQRRGFLSNRKTLLGDMADDPDVLDVLESLEGDEDNSTDRAKEETAFKKDISELRKYIEDTKSRTLGEYLAGLDQHTSKRNRTHDGGHLRTDRKMYFDELNKIWEVQESFHDQLTSEVKEQIDQIIFYQRPLKLRSDRIGKCSLEPTRKRARMGRLEFQKSRYLQDINNLTYFDPYQEKHTPLTSDQKEILISYFEEKATPTFAQARKLLGFGRDKTYSFNLETENKKLKGNVTGTKIRSIFPQWDDLSEDKQYELVEDLLTINKKSVLKSRLINHWKLPIATTVDLCLLEFEPGHGNLSVKAIRKLLPFLETGSIYSDAREQAGYGYEKENIIETDTLGKPPETSNPIVNKGLQEVRRVVNAVIKEYGKPDIIRVEMARDLEMNTKRYKKQQQQQNKNTKANTEAEQEFEKTGKANPHLKLRSYPSRQDKLKYRLWKDQDCRCAYSGKGIGISTLFSAEIEIDHILPYSQSLDDSYMNKVVCYAAENQRKGQATPKDAFGDNEEKWNQITQAVSKWGPSLSSKTNRFYQRASDVQVRDFISSQLNDTRYITTVALGYLETLGSDITTCKGQITAWLRHQWGLNSLIGTSDKKERIDHRHHAIDAVVVANVDRRFYNTLVSVAKQHERKHPELQTKDLHIDPPWEDFKKDVDDLLNEVVISHAAQNKLNGALHEETGVGFINGRGTVTRKLLAPDFTQVSKIYDESVRKLVQLHLDKHENDPKQAFAEGFRLVHKDGKTPIKRVRILKSKTTLDKLEKSKFGVRNKEGEVFKWLAYGNYHHVEIIKNNKTEKYSGIFVTMMEANCRAKGIGIAKQPIVKTEHGDGYAFVMSLAINDLVQINGSESKYYRVQKMIETGSLLLRAHTASTIDSKEESLSKAIPSLMTEHNMIKIHVNSIGKIMKC

SEQ ID NO: 15632 - protein, 1041 aa, unidentified
  REGION 1..1041: note = Cas Enzyme sequence
MVKHILGLDLGTNSIGWVLLAMIDDELNNIVDMGCRIFSRSVEDKTPTPKNAKRRKSRLLRRVIQRRARRKQRLLNYLCKIGMLPRELVNHTQPEILLNDLGDPYALRAKALVSPLTPYELGRVWLHFVQRRGFLSSRKSLLGDMIDDPDVLAILGELDVEDGISTERAKEETAFKKDISLLRQAILDAGKRTLGEYLASLEPHQCKRNRLHSGGHLRTDRQMYREELDLIWNTQVGFHPTLLTPEIKAAIEEIIFYQRPLKLRPDRIGKCSLEPKRNRCRIARLEYQIFRYLQDINNLRYYDPDYEKELELSPEDKSKLITLFDQNATVSFAQIRKTLGLDKARVFNLEQGGKKLKGNITACEIRAVLDAWDTFSREKQLQLVEDLLTIKKKSVLKNRLVNHWQLAPDMAVKLCLLEFEPGHGNHSVKAINRLLPYLRNGERYDQARVNAGYGYAPVVQQKIKRLGPPPALPNPIVSRTLYELRRLINAIISQHGTLSGIRIEMARDLEQNTKRYQEKEKQRKNNEKLNDEAVEKYRELAQKNPHLMLSKYPSRDDKIKYRLWKDQHERCAYSGQQIPASILFGPEIDVDHIIPISESLDDSYMNKVVCYAAKNRAKGQRTPIEAFSGDEWDQIIQSIHTWDKRLKGKRDRFFLRHEDVLKRDFFNSQLNDTRYICREAKDYIANICDDVIVSKGITTAWLRHQWNLNSLVSETDQKQRTDHRHHTIDAAVIACVDRKLYQSMVNLAKTLERSRPEVTLRDIPIPPPWPTWREDLRVKIDNLVISHSSQRKLSGELHEETGAGFREGVGTIYRNKLSDFCSDIKSKEKAAKVLPAIIDPVVREIVSKHLEQHDYNPKEAFADGITVRHKDGKTPIKRVRVIQSKSIKTEKKLALNKFGIKDRQGKIFKWYSYGNMHHIEILRDTETNTYSGELVTMLEASHRIRGIHGAKRPVVNTNHDGKELAMVIYKRDMVTLNQSGERKYFVVTKLGQMGGSPRPTLVPHNQAISEKNATISDSIDALMTKYQMELHRVNIIGRQLE

SEQ ID NO: 15633 - protein, 1010 aa, unidentified
  REGION 1..1010: note = Cas Enzyme sequence
MAIRLGLDLGPNSIGWALTDTDSSSVVAAGVRVFPEGVDRDTKGGELSKNETRRLARGMRRQTNRRAKRKRRLRKLLVKVGLLPPCAAMPAHHPERIAWENQACQSADPYALRRAALDRKLDPHEIGRALLHLCQRRGFLSSRKADKARSKKEASEMLQAISHLEAEISSAGSRTLGEYLANVGTASPLARVRGRHTRREMYQRELEAIWEAQRRHHPDLLTDDLKAKVRHIIFYQRPIRIPKSLVGTCELEPKRRRCPRADRRAQRFRILQDVNNLLLIDEHGEERPLTQEERSRLLEYLSNAARRSFKDIRKHLGFTEAVVFNLERGGRKYLLGMPTDKAMSHKDCFDKAWFSMDEERKNQIVRCLLDEEDPVILQKAVSEWGLSPQQARNVLNAELPAGYANLSREAIAKLLPHMERGLPLMTGDDRPCALTEAGYLRPDQRPVERLERVAQPPDLPNPLVRQALHEVHKVVNAIIREYGCPEQIHIELAREVKGSAEQRKVRTKAMREQEQRRDQAAEEIRKAGGMPSRDAINRYLLWREQEGICIYTGRAISTAQLLAGEVDIDHILRKPRSLDDSMMNKVVCFRQANAEKGNRTPYEWLAQTDPQRYEQVCQRARKLPYGKYRKFLQKEVKLDDFIHRQLNDTAYISRKVREYLQCLVPDPHRDILCTKGQLTAELRHGWGLDTILRELPDSPAWKEDHGDVRPGQKDRSDHRHHAIDAIVIALTDRSRLQQLAREQVCPPPLEHFRQEVKNLISEMHVSHRVQRKVAGPLHEETIYGKTDKPGEFVYRKPLEALTPSEAQDIRDPVVREKVLERLRALGVRSGRKKRGAGANESTIPAEAWREPLWMNEEKRILILKVRLIKKEGSILDIRQGAAWVKPGSTHHVCLFEMPDGKRDAVFVTMLEAARRAANGEPVIRRQHPHQPNARSVMSLSKGELVLANCEDGQRILQYNTGASTTKQLRFTDPKDARPSRDKATFSFSPNKLEARKITIDPLGRVRWAND

SEQ ID NO: 15634 - protein, 1423 aa, unidentified
  REGION 1..1423: note = Cas Enzyme sequence
MPAYLGLDIGSNSVGSAWVDTDGQDVHLAASVFPAGVDEQEDKRGAPKNQARRQTRSQRRTISRRACRKRKLARFLIERHLLPADPAELQKLFDLNPWHLRRKALSEPLSRFEFGRVVMHLAQRRGAVGVITDPDDPDEGKVKEGMDRLAKELEQAGPQTTVGQFIADRMDQSRQPIQRTPDKECSRGTRRRRKRQAKRWAERGEKPPEPHYLAPIRNRQYRMPEDQYLFAGRESIREDFHRIVEVQRSFQHSELSAILTDELVRQLDDPTQTDTWRHQGLLFGQRRTYWDTGTLGRCVLEPTDRCVPIADRHASYFRVIETVNNIRIQKRGHDERPLTAAEREQVIRLLRGPLFKKRKGNLEPKSSASVTDVKEALGIKARDKGVRLNIEADEERKPNTDWFHCEIVHGAIGLDIWSRWEEAERREADLPKPQRSPEAQRPEAVNRAILKFDPDEPADEKRLHELATLRCGLDSAAAERLIAAWKQRPKLEERLNLSRRAILNLLPDMEQFDDQNKRWPTQQAARKAYAKVLQERFEQTGNQADRIAAQRYDTAAPGLTARARYYMCLEKHQIKQNGEVVRDGEGRPLALPPPAPKLSNPVVRKAIHEVRRHILAYLRKFRRTPDRVVIEMARTTKQSRVVRDEQLALIRGREAEKKKIIAEHSLSGKSLNQQREAVARVLLSKQQREICPYCGKAGLTPRLAAEGEGLQLDHIIPKSRGGEDGLSNRLLVHAHCNQGKLKKTPKEWLGDRFESDLVPRLEDFKKAFRTVQAAKSRPKKPNAQKRKRKPPLGPDGYFTLREYARKWQNFTRTVRPEDEFRNSQLTDTAYAARQVAAYLADALFDGRGLPERGDGQAKQRIFFTVGKFTLMLRKDWQLFETLKPPRRDGRHGELTAEDESKLAEKNRGDHREHAIDAVAIALTATDIKQRLASEAAEAAEFYDEHRHWPQSKDKEHCRKCLDYRAKNGRWPGKGHIPIDPEWGTVPRFRAQVLRMVYPRFDSSEHASGRRDQPGGPDLIIVSHRPVKRRLVGHLHKQTLYGPVFDQNGNRIENRTSIRQPIYESPQSHLTPKHVRLPCPETREQAVKRITDELRKDGMKARDAKQRALEIVAGPTFKLRAVDPPPGKSGIVRDLALRMVLRKSLEDRGLKPDDFAPKELKAVLDRDGPLCQPSGVPIKSVVLLWANNDPVVFYRRNRKAPDGQTEEDEDPRRREREVRIYDSQNNHHVEIRENARGEWTGKVIPAHQAASRLRARLRALGALEKPFRHLRRKLPKRLGLGLSEEARRELRSNKSRANLAEWKRKMRDLKPERARVIAEHPIVDRSGNDQGRFLLSLAEGEMIYARRKDRPDEPAEYYVVCKLDKSGNSSRIHFAPHWDARKASEQDRWDVTPGDLKDCGPEPGKPPQKVRVGPLGNVVVLQND

SEQ ID NO: 15635 - protein, 1126 aa, unidentified
  REGION 1..1126: note = Cas Enzyme sequence
MRRTHQRRSQRKRELVAELIKVKVGLFPSDLTERAKLEKTLEDTKDGQHRLGLYALRRRALNEAVSPHEFGRILIHLNQRRGFKSNRKTGQLFVEVKKPKKKTEEAEQSGEEQKQKQEKKMKLAIRRLQESIEEYGSRSLGEHLHRIGIGEVSLPQTVVDSPHDASRIRGRYLLRAMLEQEFDELWKKQQKHIPQLQDESLKARIRHIIFFQRPLRPSNHLIGQCECIPRLRRCLRADWYAQQFRILKEVNNLRIHNPDGSVQELVPEQRKRLVELLGTRERISFDEMRKMFGPYERQEFNLELGPRKKGGGRKGSSRKNDDGGASQVVRLRKYLKGNTIEAALHEAFGEAWQGVSEAQKAERRKTVSEAEDPDEVIRTAMGQWGRSAEEGRVLASAELPDGYMAYSLDAMKSMIVEFEKGLDLPEGLKEYEARERCGYNRADDWPAQSLLPLPRTRDGKPLVKNPVVSQALHEVRKVVNAIIREYGRPNRIIIEMSRELNTPLAQRMELAQAQADNRDDRERVKGILKLEFGVAQPTGTDVLAYRLWKQQNWMSPYPGQEVAESPYSGGHISQEHMRAFFNGGGVLEIDHILAYSRTLDDSQNNKCLCFAEENREPQKGERTPREWLEGTSAYEAMLQRVSRMKETGMPLAKRRKFSQKEVKLDDFVARQMNDTRYITREVRKYLQCLYAGDQSERDKRVWCVSYQAVVALRWRWGLDSILSLAGSESKNRLDLRHHAIDAIVVALVDDRRLHILANVGRNPDRRSRKLDEPWMGFREDVRKAVMQIRVSHRVERRVRGALHEETIYAETDSSNQFAYRKELKKITLAEVHRIRDEDVKRLIMQRLKEHGITLEKKKRGKLQDDEDEQSSKKPPASVWQKPLYMIRKPGRTSKRAAIIKKVRLTKPDESIRAIRTTVPLMSLTTGMVSRIVDEATKRVLVERLRERGIEPGSGDRAIPVEVWRPPLRIVQGDASKRLRRVDVSVTEEPGALVNGRRAFVKPGKNHHLCLFEIAGTKKRVCDVVSMLQAVERLERGQSVMQRTHPDYPNAKFVMSLSRGEMVLLCNKGRKVLCRYETAPSTTYQMVFREHCAAAVGKNGKITKRPNRFEGCKVTVDPLGRIRWAND

SEQ ID NO: 15636 - protein, 1074 aa, unidentified
  REGION 1..1074: note = Cas Enzyme sequence
MQKKYILGLDLGETSVGWAIVGVDDDNNPRSLIDAGARIFPPGSEIDDKTGGVTSRSIERRAHRSARRVKSRRRRRKQKLQNIFIRNGMWDDSGKIAQSDPYELRARALDEELQPSKFGRALYQIAQRRGFKSNRKSGQAKEDGKVKSSIGELRRKMASCEARTLGEYLHLQTLPDPDFPVDKLAFGMERLRNQYTGRDMYEEEFELIWKKQAEIKPDLYSPELKESVHEAIFFQRTYELTEERRATLPSRANAHRAPQLGECPLIPGEKRCSIGKWVAQRFRLLKEVNNLKVADENHRFDPLTPDQREIILHELSRKKELTFDQMRKLFGWGEDYVFNLEQGKRKKLKGNAIEYVLIKAFKEKQWNALDEDIKTEIRHALVEEEDEDIFRAKAKKWGLDEKSLEDLLAFEPPEGHLSYSEKALDIIVPYMEMGMPEFGSPNGDQIGAVDQALQDGKLIRKESDEEQEYLPMPDQEEIRNPIVQRTLSETRKVVNALIREYGKPARIHVELAREMKNPGKRREEMTKKNRENEARNDDARKWFEDHDFYNPKRNDLIKYKLWKEQEYKCAYTGKSITQEMLLSSHDQVEIDHILPISRTLDDSYMNKVLCLTSANRDKGNNTPYEWKGGPDNHEFDAMMVHLKNMPKMPYPKKNRFSRKEIDTGKCIERQLNDTKYVSKLAAKFLTLLYPPDMRVGQKAVFTVVGQVTAKLRHEWGLNKVLSADGKKNRADHRHHAIDAAVVACTNRKHLQALARSMRREGERVGPPLPDPWARFREDVQYVLKEREKIWDIDGQEIKTHGVLISHRVNRKILGGFHEETNYGPTNEKGKFVYRMPVERLTGASVEKIRDPKIRDIVRNHFIENGFDPERNRLKTPPKAVFNNGYPLLPISEKKRRKEPHLPEGVPIKKVRLLKTLSNPFEIKGEDGKTQRAAILGNNHHVEIVEFTKENGKKELRASVVPVLEAAKRARTDGKSMVRRDHGDSARFIMSLSRGESILLKNNDSYSFCYMQKLSGVYEFSSQMDLLFRSHNDARPASEGNKEPFARVQSVRAWAKHHPIKISISPVGKLTKAND

SEQ ID NO: 15637 - protein, 1091 aa, unidentified
  REGION 1..1091: note = Cas Enzyme sequence
MLRGAVPANFLSLLRKDFRARIGYTSINLTSLIPLVNRILPKMSDSKIVLGLDIGSNSIGWALARDGSAEVISPLMMGVRVFPEGVDRDQTGGEVSRNEARRIARGMRRQTVRRARRKKRIRIALIHAGLFPADPDLQKKLLESTDPYTLRERALREPLTPHEFGRVLIHLNQRRGFLSNRKSDGGKKETSETLEKISALASEMGDQTLGQFLSGIHAEPNERLRGRHTRRDMFLTEFERIWEFQKQYHPDLLTDTLKYGNHPAQKYPVEPIGHSKETTLLDEFGIHGLIFFQRPIYWPASVIGRCELELGEKRAPRADRRFQYFRILNEVNNIRIIGPRGDQRLLTDIQRSKLIQMLLTSEDCKFEKIRKELSILEDEMFNLERGDRKKLDGHKTDHHLSKKNLYHKDWAKLPEALKNSIVQSLIHDEEEAILARATAEWGCSPERAEALSRTFLPEGYASFSILAMEKLIPFLEKGLRLMANDSTDSALHAAGYIRADQKVVNPRSSLPDIPESITNPLVRQALREVRKVIHGVIREHGMPDAIHIELAREVHGGAEQRAKTTKKMRENENRRDSARESIKALGYKGNREDVTRYQLWRDQKEICFYSGRPISTVQLFGGEVDIDHILPYPRSLDDSQSNKVVCFRDQNQDKADRTPYEWLADSNPKKYDSILQRTVNLPPHARMAKLERVARKQLELSEFINRQLTDTAYITKLVHGYIQQLGIDVVCVKGQHTAELRHLWGINELLRDDGLNLKNREDHRHHAVDALVIAMTNRRTLQGLSRYWKSRSEFARDNHRRSTLAPPSDSFRDDVQALVDQIVVSHKPRRRITGALHEETLYGPTDKPEKGKPGPRGHAKNWKEEPGTFVLRKGLTSLTLAEVAKIRDEQVRLLVIKRLREHGIDPDSKSKIPPTVWAQPLLMVGKKGLEKSPNAPVIKTVRILKNDQTIRPIRGGSAWVKPGNTHHICLFEIPGKKGKEPTRDMVGVPMIDAIARAQAGESVISRTHPTNPDARFLFSLSAGEMVEGTIGGMDSVFVYKTSASTSKQIWFATHLDARKSAQQKTYSAMPNTLKVEKILVDPLGQIRRASD

SEQ ID NO: 15638 - protein, 973 aa, unidentified
  REGION 1..973: note = Cas Enzyme sequence
RGFQSNRLTANPKEEKGLLAEISKLQDSIDAASARTLGEYLYMQTQATNGVLPVRLRARMAKMDLYEDAPRRTRRSMYEQEFDTIIKKQLHFWDSKLPSSHNRDAMERALSRAREAIFFQHGFAVTPERKAKAPSRANLHRAPGVHPCPYEPGEVGCPRSEWIAQRFRIVKDVQNLRISEAYEPERPLSDAERRLVVDKLSLSKKVTFSSLTKALTKQLELREPIEFNLERGGRSYLLGNETEATLGKAFGKSVWAKKPEADRGTIRTAFLSVTDSDALRKTLIDAGLSDPTRIDELLDFQPKDDGYLSFSKVAITKLLPLMEDEGLTEHEAIERLYPETHASDGLKVLPSLIAMQSDLEIRPKIPPRIQNQLTNLTNPIIRRSLTEVRKVVNAILRAHGKPEEIVIELAREMKQNKEARDQYSRDNHKRSLLRDQAREALRPLLGGTNPRKADVDRWMLWQEQRMQCPYCGKSIGQTAVCSAETEVDHILPRWQSLDDSLNNKVLCCANCNAAKGDRHPVAWLGKDSERFSTVLKRVRLCAKTASNPGGMSNAKIGRFEIEELDADDFVDSQLNDTRYISRLVSSYVSLLYPSEERVGQRRVRTSRGSLTAMLRRQWGLNDILPPLVQAHGEVIPGFEDHEGWTEKLRIDHRHHAVDALVIALSTRGHLKRLQDNWRRGQALNGQGNAFPEPWPSLRVDAQQALEQVNVSHRPMRRLRGALHEETYYGKLPRHDGTYVTRKRLSDLSPKMIGQIRDLGIRRIVEDRLKSMGWAEGKELPKNWHEKELVVPAGYRRRMRGGSTSPTPIRRVRITTNLGGAIALGDREHRFAKPGGNHCFQIAFPEECDGPKVRVLSRFRASQSFTNTQEQDSCSVQLTLHRKDSVLVLVPGLKTPVLAIVQKFSGPDSFDTQNLDLTLRHACDARKATIGNGSPLLRIKSIGKLFGTEMQLATVDPIGRVQPGPKLSQQAKND

SEQ ID NO: 15639 - protein, 977 aa, unidentified
  REGION 1..977: note = Cas Enzyme sequence
MAQRRGFQSNRLTANPKEEKGLLAEISKLQDSIDAASARTLGEYLYMQTQATNGVLPVRLRARMAKMDLYEDAPRRTRRSMYEQEFDTIIKKQLHFWDSKLPSSHNRDAMERALSRAREAIFFQHGFAVTPERKAKAPSRANLHRAPGVHPCPYEPGEVGCPRSEWIAQRFRIVKDVQNLRISEAYEPERPLSDAERRLVVDKLSLSKKVTFSSLTKALTKQLELREPIEFNLERGGRSYLLGNETEATLGKAFGKSVWAKKPEADRGTIRTAFLSVTDSDALRKTLIDAGLSDPTRIDELLDFQPKDDGYLSFSKVAITKLLPLMEDEGLTEHEAIERLYPETHASDGLKVLPSLIAMQSDLEIRPKIPPRIQNQLTNLTNPIIRRSLTEVRKVVNAILRAHGKPEEIVIELAREMKQNKEARDQYSRDNHKRSLLRDQAREALRPLLGGTNPRKADVDRWMLWQEQRMQCPYCGKSIGQTAVCSAETEVDHILPRWQSLDDSLNNKVLCCANCNAAKGDRHPVAWLGKDSERFSTVLKRVRLCAKTASNPGGMSNAKIGRFEIEELDADDFVDSQLNDTRYISRLVSSYVSLLYPSEERVGQRRVRTSRGSLTAMLRRQWGLNDILPPLVQAHGEVIPGFEDHEGWTEKLRIDHRHHAVDALVIALSTRGHLKRLQDNWRRGQALNGQGNAFPEPWPSLRVDAQQALEQVNVSHRPMRRLRGALHEETYYGKLPRHDGTYVTRKRLSDLSPKMIGQIRDLGIRRIVEDRLKSMGWAEGKELPKNWHEKELVVPAGYRRRMRGGSTSPTPIRRVRITTNLGGAIALGDREHRFAKPGGNHCFQIAFPEECDGPKVRVLSRFRASQSFTNTQEQDSCSVQLTLHRKDSVLVLVPGLKTPVLAIVQKFSGPDSFDTQNLDLTLRHACDARKATIGNGSPLLRIKSIGKLFGTEMQLATVDPIGRVQPGPKLSQQAKND

SEQ ID NO: 15640 - protein, 1110 aa, unidentified
  REGION 1..1110: note = Cas Enzyme sequence
MGYVLGLDLGPSSIGWAAVNIDDDGNYKGLAQLPDGPNLIPAIGARIFPAGVERYGQGQREQTRNKTRREKRGTRRTLRRRKARRTKLIALLRANNILPQDDAKLQKLQQQTDPYELRAKAIKEDEQLSLMELGRIFLHLCKKRGFKSNRKAPPKKEEKGEINEAKTKFKEELGNKTPGQFWNGQIPAPKQSGPFKAIRNKGGKFQSLAIREQYKEEFNKIWENQKKIYQKNGNGSFFSVEMKKQIESFLFDQISYKQLPSKMRKMWGRCSLMPKEFRCSLANRKAQQFRFLQKVNDIRVIKRSITRGLNEEERKKIINLLSCKNEVKTKEIRTVLKLLDDERLNFEFDDDNALTGNEIDSQLCKLVGKDVWLNLSEETRDKIWQEILKYIEDEKGKITEKKTADEIYKICGIKIDDLDKFSEIELPDGNVKFCEKVLNEILPKMSKEGLSLSDAIKAAKFTQKWDELSSLPVPDKKAGFYITNPNVATVLYQVHRLVNRLIAEIGKPEKIVVEFTRDLKASKEQRQKILKQQSERRRMKALIAEDVQKSPEWKWGGKIPQWAIEKYMLWVEQNTLSPYSGDQISKRQLFGEDTQIDHILPYSMSLDNSLNNKVVCFTSENQEKGQNTVFDWLGHDEKKWEKVQQAIDHWKPQRRTRGSKKTARNSANSKLINERKWEKFFITGDQIDEIYEPERYLNEAGYIANETREYLERLYDSNEAKKRVKTTKGGVTGELRKWWDLNRILGVAPKIDEPEENTDKESQPTKKNREDLRHHIIDAVVIASTCPKLVKKVTSELQKAYPRKKRKEIYIERPWKDFEGELAAAVESVKISHRTQRKVCGELHAATHYWKETNGKYASKYITRKFLTDLSKAEVGQICDDAIKKLVEDRIKEKGDIKGAFDNPIYLPNKEGSPVPVRKVRIWTKHTDENMIPIRGKEGEPQTVWVEKPENHHIEIFQIKENGTKRYICKIWNIWEISQRIEEYKKQKIKDKDPIVLRKHPNHPDAEFVMWLSKADTVLIENNDKKEVLARITGIGEGDERDESVDLKLWELRVNCKSTDLPTKETKDGYRLRNINDFMVMKPRKVTVDFLGRIRWAERKMGWEKCFGND

SEQ ID NO: 15641 - protein, 1002 aa, unidentified
  REGION 1..1002: note = Cas Enzyme sequence
MQYVLGLDLGPNSIGWAMVEHEGDQPTGLIDAGVRVFPEGVDRKPTGSEESKNTGRRMARALRRTHDRRRRRKQLLKGLLTGATLLPPDGLHATLLATSPYALRARGLSEKLTHHELGRALYHLAQRRGFKSNLKTDSDEDSGTVKPAISQLEADIAAAGCKTLGQYLNTLDPHQQRIRGRHTGRDMYEREFDALWNAQQAHHPDLLTEPLRLRIHHAIFDQRPLKIQRHLVGVCTLEERIGNRKKRAHKGTWQAQQFRMLETLARVKVTDTQGAERRLSEDERAALIDHLSIRKEMTWDAARKKLSLSEGSRFNLELGGLKKLPGNTTAAALKTALGAKEYAALSERERDDLIHDLLFVEDPEVRDRHLTERFGFDAETVARLKKVRLQRTGRLHLSQRAVSRLMPHLIAGKRYDEAVSEAGYDAGGEEGGGIHTLLPEPPELRNPIVQRALHEVRKVVNGLVRAHGKPAKIRVEMARDLKSSARQREEMRIRQRGNEKANAIARDELIAAGIPEPSRSQVIKYRLWEECNHQCPYTGKYIASIQALLFSGDWDIEHILPADRSLDDSIANKTLCYAEENRKHKRDKTPWEAYGDQPETYAQILSRVRKFRWPGNKKLHKFTARELKADEFIARQLVDTRYIATEVKDFMAALVGKERVEVGRGQLTAAIRRMWGLNGLLGDTAEKNRADHRHHAVDAVVTALTTRGAMMAASRLNQGFRPQRGAEKHFKDEPWPNFRNDVDAQLRGMVISHRVLRRARGALHEETNYGVLQRTDSKGVPLYAVRKPVAALTAKELERIGDPAIRKLVANHLRAHGVVDPKKQADAFRKALAHPLFMPTRDGRQIPVKRVRIHKPSSGMISLGGHRRTPYRAVEPGGNHHMVIFEFTDAKGNRKRDAEVVSMFEAARRARQGEPVIRRDQGPGRRFVMSLSTNEMVQVAGEKGVEYYRVQYIDGSNKVICLRRHTAANLENNADRLLPRPNTLKGIKVMVDPLGRVTPAGD

SEQ ID NO: 15642 - protein, 1051 aa, unidentified
  REGION 1..1051: note = Cas Enzyme sequence
MSNILFADSNPLELTMSVSPSAAKPLVFGFDLGTNSIGWAVLEEDHTGQAQALCDMGVRIFPKAVEGTPPTPKNHKRRQMRLARRVLERRARRRRRLQNYLILLGLLPDGVYDVRERERVLNALGDPYTLRAQALEQALNAHQLGRVITHLGMRRGFQSNRKTLLSDMLDDPDVQDMLAELEQQDPQGHAASERKRIKEEGQFKQAIAALQADIHQANCRTLGEYLAGLSSAQRKRGQRIGREMIRNELRAILAAQRPHHAALDDAVCEEIEQIIFHQRPLRWDRASIGVCSLEKHRPRAAIARLEYQEFRLLQDINHLRYDHPCSNPDTGEILGLNLALTEHDRARLLEKLASQQDMSWPAVKKLLGLDKTIHFNLEAGSKKGLPGNRTASKLANILGTNAWRALGASGQAELVEDLLKFEKKSALKKRLMTHWAWPARTAIALATLELEPGHANLSLKAIRRLLPFMRQGMRYDQAREAAGYGYSRAPSDGLERLPRPDDLRNPVVNRALHEFRRVCNALLAEYGRPHAIRIELPRELAMGGKRKAEYEKQQKRNQKANEDANTQYQAIRQANPQLGLAERVGRLEQLKYRLWRDQNERCLYSDKPISMTELFSAEVEVDHILPYSRTVDDSYMNKALVMASENRFKGNRTPYEAYSGQPERWERMVQCARQQPPAKRERLLRQELSGVDDFINNQLTDTAYLSRQVLAYVQLLGSAVDVSVSKGVLTAWLRRRWGLNPLLGGGEKNRADHRHHAVDAAVIACVNRSLYQKLVKLMHEPGTRLERIALDAPFAHYRDTLAAHLDSLCISHASLRKLSGALHEETVYAVQRDPQGELRVVYRKPLDASLKLDKLVDAGLRHQLQTHLARFNHDAKQAFAAENLPVLHPGHGPVRRVRVVAANSFNPRSFLSLPDRQGQLRKHLPFGSNHHVEILRDRVSGKVESVFVTMWEAAQRAHQHQQALVQTKHGADKVFLMALHINDLVLIQQGERQVIYRVQKLDPGGKRLMLRHHCAATLDNKQEELLISLSRLVDECAGKPLYLNVLGKPLP

SEQ ID NO: 15643 - protein, 1033 aa, unidentified
  REGION 1..1033: note = Cas Enzyme sequence
MLDYTLGLDLGAASVGWAVVKEPTTDQDNDSVLHLGVHRFEAGVADPGKMGYGKEESSSKPRRDARQMRRQLWRRKRRRRLLLKRLQEHRLLPSGDISRPEAIHGFLRSLDQTILDRRYPEATHEQQLKLPYLLRAKAVSERIEIDELGRVLYHLAHRRGFLSNRKTDKDEDKSETQFKQDMAELAQLVQKHDPPYLGAYLASLNPDEQRLRGKRTSRQMYMDEFDAIWDEQAKHHPELLTKAVNKVIHRTIFYQRPLRSQRHLRGKCSLTGNPRAPIALRLVQRFRAIQKLNDLQIVFSNGTKRGLEPDERDKVLELQMTKGDVTFHSLKAKKVLGLQKDATFNLAEIDAKLIGHRTDAKIRKVIGKRFDELSEDQRDAIVQDLRSFRDPGPLAQRLEKAYSLSPEIASELSRVKLGKDRAAHSGEAIRNLMPLMEQGTPYATARKAKYPESLAGNTKTLDLLPPVETWLKDHERAIAIRNPAVMRGLTEVRKVVNAIIRRYGKPKHIRIELARDLKNSRKRRAEISKQNMERRGQREKAADLLAKQFGIEHPSHRDREKVLLHWECGGFCPYTGKPIEMSDLFGPNPSFQVEHIWPLSASMDDSFMNKTLCHVDENARKGGRSPVDCYDQKTLDLIKDRIGNFNCDWKVREAKRRRFTEPIPEDFCNRHLNDTRYLARESANYLDCLFEADQSDGSNPQRVFVVTGGLTNMMRGLWGLNTLAGGPANEKERIDHHHHAIDALVVALTKQSHTQKLMCAASRAEQQHLQRNFLDVAHPWADFYVQAKAAVDKIIVSYRADRKLRGKLHQDTLYSEIIHGTRRIRRELHTLKQSEIDKIIDLRIAHAVKNKLKQLGQLDPAKAFADPANLPTLTDKLGRTTTIRKARVRVSAKPTEIGKGASKRQVNLGSNHHTVISQDKKGRWCETTVSLIEAMRRKEDGEPVIQTPEGHTFLYSLAKNEYVEIPNGDGMGRIMRVESISQGFVEFGEHNDARTQAERGSDRFYLRSGKKWTEVKPRKVTVTHLGEVKDAGG

SEQ ID NO: 15644 - protein, 1091 aa, unidentified
  REGION 1..1091: note = Cas Enzyme sequence
MNRDGPAILCSPQGEVTMKQQGEVERILGLDIGVASVGWSLIETTGGAPSRLLAAGSRIFPPGVEGNLEQFKLGRDEPKNQKRRMARQMRRQLWRRRRRLLKLQRALVRHGLLPSLERYDAEEIDRAFKALDASLMKRDPLMKDRVGAQTFHYRLRARAAEGRVDPHELGRALYHLAQHRGFLSNRKAKKADDEELGAVKQGIADLAQAMVESGHKTLGAYFASIDPEVARIRGRWLGRNELILPEFEAIRAEQSKHHPTLDAEAWDEIKDAIFRQRPLRDQSHLIGRCSLEEGERRCPTAYPEAQEFRILQAVNHLRLVELDEDGNQGPERGLSEAERTALVAKLMVESHLTFTAAKKLLGLKPRSTRFTIERGGEKELIGNRTYARITVEIGEAWALMPAEDQRSLVDDILEYESETALEQRLVRRWGLPRETARQLAATSLEGSRLSFSLKAIRRMLPALREGLSVQEAKIGAYPAHAGAEEPWDLLPPLRPDRVWREHCSGGRPYTGVEVRNPAVERSLSEVRKIVNGVIRRWGKPDQVRIELARDLKKPRKERTKESGRMREQGDRRKRALARMREESFGHLADQNRRADIEKVLLWEECGGVCPYTGRAISFEDLFGPTPKFEVEHIIPYSLSLEDGFGNKTLCEIAENRSRKRRMSPFDAYHGTPQWEAIVTRVRHFRGLSAARKLKLFLSATNGSEVFGDFTERQLNDTRYASRLAGDYIGLLYGGRKDATSRQRVQVSAGGATAIVRRKLGIEGILGGGEKNRKDHRHHAVDAIAIALTGPREVQQIARASEAALLRGEAAHRLKIDAPWPTFMDDTRAVVEAMVVSHRVDRRLSGPMHQETNYSRPIRDIRGKVADFEARHVRRTIDSLGEKDVESIVDPRVRDAVKRKLRSLDQKDPKVAFKGGQNLPTVRHGDGREIPIRRVRIKVQKGLAVVGKDSAARYVAPGSNHHMAVVEVFGPSGLTISREFHIVTMLEAYQRRARREAVVQKEWGAGRRLAFTLRSGDCVMLRVGQEAVPCVVASVSSRQVEFKTHPDARPATEIRQAGKEGGRLPLTMGQLERALLSKIEVSALGDVGPSND

SEQ ID NO: 15645 - protein, 1070 aa, unidentified
  REGION 1..1070: note = Cas Enzyme sequence
MSTSGAVERILGLDIGVASIGWCLLESQDGVASRILGVGSRVFPPGVDGDFTKGRDEPKNQKRRQARQMRRQLWRRRRRLLKLLRVLVNEGLLPAPGAYDAESIDIALKKLDASLAEHDAMMRDRRGAQVFHYRLRARAATERVDPFELGRALYHLAQHRGFLSNRKAKKKDGEEDGEVKRSIGELAAKIQESGLPTLGAYFASLDPEQERIRKRWLGRNEFIIPEFEAIRGEQAKHHPGISAAAWEAIRDAIFRQRPLRDQSHLIGKCSIERSERRCPVAYPEAQRFRILAAVNHLRVMEMDGEIQRTARPLTTDERSRLLDALWRESHLTITKAKKLLGLKAKEAKFSIELGGEKDLIGNRTEANMRVCLGDRWDAFADDAKRRLIDDILEYEVEEKLRLRAIKHWNLTPEEAASVASLHLEGARLNLSLRAIRNMLPHLEAGLSVAEAKVRAYPNQAGADAPWDLLPPIRPDRVWIEHCSGGREFNGIEIRNPAVERSLSELRKVVNGVVRKWGKPTEIRIELARDLKKPRQERKEESKRMREQGDRRQGALARMVREGFPHLADQNRRSDVEKVLLWEECNGICPYTGKSISFEDLFGQNPRFEVEHIIPYSLCLEDGFGNKTLCEVNENRNSKGRMSPFDAYHGTAKWEAMIARVKLFKSRSAAKKLRLFQSETNGREVFGDFVDRQLNDTRYASRLACEYVGLLFGGQIDAASKRRVLVSAGGATAIVRRKLGIEGVLGGGEKNRKDHRHHAVDAIAIALTGPKEVRAIAKASEAAVARGEASHRLKLDAPWESFSTDVQRAIEGVIVSHRVDHRLSGPMHQETNYSRPIRNIRREVADRELRHLRCRLEELGPKDVDAIADPRVRDTVKQQLRLLDESDPKIAFKGGENLPTMRHGDGRDVPIRKVRIKVRKTLDTVGTGGAVRYVAPGSNHHMAVVDVLGPSGKVLTRELFVVTLLEAFRRKSRGEPIVQRDWGPTRRLAFTLRSGDMVEMDLDGEILPCVIGSVSDGLVEMKLHADARPATEIRKAGREGGRLQFTTRGVLQRLRRKVAVDQLGRLVDAHD

SEQ ID NO: 15646 - protein, 1063 aa, unidentified
  REGION 1..1063: note = Cas Enzyme sequence
MSGFETSNFVLGLDLGPNSIGWAMLEHAPDNPDDITGFYNTDYANHPPVGVRVFEAGLANFDSMKEKSLCQDRRTARAARRTIGRRNARRKEMRQYLRKIKLLPETKETKILFETDPYQLRSEALDRKLLPFELGRVLYHLCQRRGFKSNRKGGKENEDSKMLAAIGELAKSITETGARTLGEYLYKLNEANEKHIRIRNRHTRRDMYEFEFNAIVEKQRELNPDILTDEDVEKLHRFIFFQHSFELTDERREKAPSRANLHRAPSVKECPLEKNETCGQKGEWISHRFRILKEVNNLKISELYGKDRDLTEGERDAVISRLSESATVKFDQLRKMLAKMGVDPEATFNLERGDRKALNGNIVDAKLASAFGKAKWAKFDESVKIACRESLLHSENPADFIGLMIENGMKDEKAEKLSKWNPADGYVGYSLKAMEKLVPHLEIGLDEHYAIEEAYPDRVSADAFLNLPTLSDRGLPQELRNITNPVVSKALVEVRKVINALVREHGIPTKIVVELAREMKAGSEARKRMSKNMREQEERRTEARERVEEYGGNRYSRSDVNRWLLWSEQNGECVYTGKPIPPSELFYGAEWDVDHILPHWQSLDDSYMNKVLVSRNANHDKGDRTPTQWLGKGSQKQREMIKRAYFMLKHGFPMPKIDKLKQEEVEADGFAQRQLNDTRYISKSVAQYLNLLYPQELRVGQKAVQTCTGGLTSELRRQWGLNGITDDMLDKDGNVVMAAETNLRGEPVKSRANHKHHAVDAVVVALSTRKILKKYQDYCKIRYEDQRPDFPVPWDGLREDAALYINTMFVSHRVMKKLSGALHKETFYGAVKDENGEVVPDRYVTRKNLDALSGKDVDNIRDNEIKSLIQEKLYDKGWTGQTKLPKDWSQDGLFRKNGTPIRKVRVEVTMSNTATLGDKQHRHAALGNNNHVEIFKDVDGKLLASVVPTMIAASRVRHDKASAVKKDHDPGTEFVMSLSRKESVMITNPTTKERVLCVVQKLSGAFEASSSMYIVLRDSQDSRKASDADKSPLARIRSASAWSGWDVLKQQVDPLGRIFPAND

SEQ ID NO: 15647 - protein, 1104 aa, unidentified
  REGION 1..1104: note = Cas Enzyme sequence
MATTLGLDLGPNSIGWALLDETHILGTGVRIFPEGMDKFDTGRDESRNEQRQIARGMRRQTKRRNQRKRLLREALIQAKLWPTDPKTQNELYELDPYELRSKAASEKVSAFELGRICLHLGQRRGFLSNRKKDREDSEVKGMLAEINKLEADIEKASCKTLGQLLYLKCINFDHAKRVEEDHIRNRHTQRSMLATEFEVIWEEQAKHHPALLTKTLRYGVSGEPAKYPIKPRHKAKGQTLLEAFGVHGMIFFQRPMYWPASMVGLCELEPKQKRCPRSHRMAQRFRLLTEINNLQLTDNTQSPPTPRRLTDSERAYVLDQLQTKKDATFIQIANWIAKLPDSPPAESIQFNLQKGKRAGMKGMVTDAMLASKKVLGESWHKRDEEQKTAIVELLLSIEHDEEQTVTILVEQYDFTTEQANAAVSVNFPDGYLHLSKLALSILLPHMEKGLVYQALDESNSALNAAGYLRRDQLKKRLFDKLPRQDAFNCPLGDIPNPVVKRTLTELRRVVNCIIKEYNMPDDIHLEMARSVSMGTQARKEFSKVRSEREKMRNDAANEIRKLGFKVSREAINRYLIWDQQNHECMYTGNKISQTQLFNGEVDVDHILPRSRSLDDSQSNKVVCFRSANADKGQRTVYEWLAASDPKRFDEISTRALAFVKNHGFPYGKFKKLIQKNVDVDSFIARQLTDTGYIAKATRQYLACLFEDDKHILGLKGQHTATLRHQWGLNNILRHDDINQKSRDDHRHHAIDAILVAVTNRSRLQQLSKGYQEVEQIDYTTGEVQYRQAHKGPALDEPWENFRSDVESAVNEINVSHRVNRKISGQLHKDNPFAPVKDREGKTIANTYVKRKLVETLTTTEIEAIRDETIRTIVKNALKVSGLDIDSPKKPDKKKMQEVLSQVTMPSGVPIKKVRVLTKDQTIQPIRTKRSEKANDPTQIAYVKPGSTHHLCIFEWEEKGKTKRDAIFTSRIQAMDILKQQQQFVTEKVSQLDQKPKSASAKKVIHSQFYKQASEKFPLIERQHPTRKHAKFVMSLSNGEAVLANWKGQQKLLVLRTSISTNKNVIFIEHTDARREYSKHKTSTNLLSARKVTVDPLGRIRWAND

SEQ ID NO: 15648 - protein, 1119 aa, unidentified
  REGION 1..1119: note = Cas Enzyme sequence
MATTLGLDLGPNSIGWALLDESHIIATGVRVFPEGVDAFDTGKESSRNEQRRIARGMRRQTQRRNQRRKQLQQALIEAGLWPADHQKQSELYAINPYELRAKAIDEKLEPHEIGRVLLHLNQRRGFLSNRKKDRKDSEVKGMLAQISELQKKIKNAGCITLGQYLYQQYQSFDHANQVMDQTDRIRNRHTQRSMLEDEFHVIWNKQAQHHPALLTDQLKFGEHGQDNYPVKKRTKNKDQTLLHAFGIHGMIFFQRTMFWPKSVIGLCELEPREKRCPRADRLYERFRLLSEINNLRLIDDTVTPPVERKLTEAERSYLLDQLLTKEKASFEQLAKWVSKVTHELPPENIRFNLQTGKRAGIKGMVTDVNMAKAVGKTWHKRSDDEKNAIVQLLLEVEHNEQDAIDTLINQYGFTTEQADEALCVDFADGYGHLSRKALRKLLPFMEQGMIYQGLDESNSAINAAGYLRYDQLQRRLFDKLPREGEYGCPLGDIPNPVVKRTLSELRKVVNCIIREYDKPDHVHLEMTRGVRMGTQARKEFNRNRAEREKQRDAAADAIARIRDEYKIPVKINRDSIIRYLIWEEQNHECVYTGKPISQRQLFTGVVDVDHILPRSRSLDDSQSNKVLCFREANHQKGQRTVYEWLDAADPARFEEISLRALSMVKNHGMHYGKYKKLMQKHVDVDNFIARQLTDTGYITRMTREYLACLFEQDKQILGLKGQHTATLRHQWGLDNILRQDDVQQKTREDHRHHAIDAIVVAVTNRSRLQQLSKGYQEVEKIDYETGEVQYHQAHTGPNLPEPWDNFREDIVQQVNDIKVSHRVNRKISGSLHNDTVYAPVKNSDGHIEPNTYVVRKSVANLSPNEIEKIRDHAIRKIVINALANAGIEFGRGKKVDTKKMQTVLSDLRMPNKKQPDQPGVPIRKVRLLVQEQTIQPIRQKRAERADDPTQIAHVKPGNTHHLCLFEWEEDGKTKRESVFVTMLQAINRIKEQRAYVAQKIAQCKALPKSRHERKKCYSQFFKEAADAHPLIDRKHPTQTNAKFIMSLSNGECVLCNHNDEEKLLVLKTSQSTQGGKFKFAEHTDARRSSDVKPFFYNTNTLNARKVTVDPLGRIRWAND

SEQ ID NO: 15649 - protein, 1041 aa, unidentified
  REGION 1..1041: note = Cas Enzyme sequence
MRTLGLDIGTTSIGWTVLDDSGKTGTIIASGVRIFPEGVDRDQQGGEQSKTQTRRESRGARRQIARRARRKRFLIRYLQSVGLLPTDETELEEVIGMNPYPLRARALDEQLSAYEIGRVLIHLNQRRGFLSNRKTDKAKPSETKGMLAEISALAGRIDGTGCQTLGEYLHKIGTGEIESSEDEPKGIRNRHTRRDMYEHEFETIFDRQQAHHPELLSDDVHDRIHRRIFFQRKMYWPKSVVGRCDLERRLKRCPVADRAAQRFRIVQEVNNLKIVDRSTGEERRLIPEERTITINYLSTAKTRSFDQIRKKLKFTEEVRFNFEKDDGGGRDKLQGHFTDATLSGKNVLGKGYWDIDDRIKDRIVKILIEEDREDVAISALINECGLDHEQAECASGAHLPDSYANHSKYVIKKLLPYLEEGKFYMGNDESDSALHAAGYLRPDEQVIDQQSLLPPSPDLPNPIVRQALVEVRKTVNAIIREHCKDRADNDERPFDRIHVELARETKNSFEKRKEIRFENAKRRKIREHAGDEIANAGDRVTRSKINKYLLWDEQNRTCVYSGKSISFKQMLSDATDVDHILPRWRSLDDSMGNKAVVFRNENAAKGDKTPYEWLADSDPEKYDEVCFRAWKLGNHKYRRFKQQELELDQFVARQLVDTQYISRCVTQYLKCLGAKMVMPRGSMTAELRRRWELNNILSDDGEKTRADHRHHAVDAITIALITQARIQRFAKSRGDGQLCPWPDLRQQAEQSVMDIKISHRVLRRLSGALHEDTFYGPTQKYKGTDPEHCIPPGSIGHGINRMHAKDWTEDSGTFVRRKVIAEVKNAKHLAKVRDKGIHEILANHLRGIDVDPFGKAAYPKGCFEGDNAPTMPSGVPIKRVRLLENKSTLRQVSDRRDFHYTQPGNNHHITYRENMDKKGNPTWIGEVTTMWDAAVRGRTKVNGKSLPLVDQSDTEAGNFVMSLSIGELFEIDDPKGELGRILCVVRKIDQTGRLHYKLHIDARTSGELSPLNLYVSPKQMHENKTRKVTVTPVGQIRWAND

SEQ ID NO: 15650 - protein, 1061 aa, unidentified
  REGION 1..1061: note = Cas Enzyme sequence
MQETPKTAYALGLDIGVASIGWALLDLDKSGKPAAVRRAGVHLFDAGIDPGKSDPETALLQGREQSKATPRRDARAMRRQTWRRARRKRKLLRALMAAGLLSEAPVRTPEQVDAYLKQLDRDLAARNPAGSHGDAQTHPYRLRAAAAVRPVERDELGRALYHLAQRRGFLSNRNSPERADEDKSAMRQSISELAEAVTAHDPPTLGAYLASLDPDDERIRGRWTARGMYRDEFERIWAVQAPALGLTEQQRAAIHDAIFFQRPLKDQSHLVGRCSLIEGHKRCPIGERVAQRFRVFQQVNHLRVVLDDAIERPLTKDERDAIAARLLTEGDLTIPKARKAAGLPKSATLSIERGGEKRLVGHRTDAKLRPVFGADRWDGLSEFEKYAVVHALRSFRDRDALRRHGVRRWGLQGEAADAFADTTLEEDHAAHCREALEKLVVRMERDGLSYSEARKDEFPESFTSSDPVDELPPLEDWEKDLRNPSVSRALTELRKVVNAIVRRWGKPERVHLELARDLKSGRSRREQQSRRMRNREKDRERAAAAIASKLGIHGPKRWMIEKWLLAEECGWVCPYTGRHFGAADLLGTNSQFDVEHIWPMSQSLDNSYLNKTICYHEENRSRKKGRSPVSAYSAEELAPMLERVRAFKADPFMKREKLRRFTDPVEDGFSNRHLQETRYIGRMACDYIGLLYGGRAEDVGEVTRRQRIMTPSGGLTAWLRRGWGLDAVLSDDDGKNRDDHRHHAIDAIVVACADQAAIQRLSDAARRMESVQKERPFDSVEHPWDGFVESVAAAIEPIVVSRRVSKKVRGGLHKDTIYSKPHHSKARGEHHRTRTELSALTAADLDKGRIIDKRAEAAIRAKLDELGEPNPAKAFKDPANLPTVRGRDGKPVKLRRVRVVESVKPTTIGRGMSERRVKSESNYHTVVYELPGDRGGGKWAHAVVSLLDAAAIAKPGAPGRENGAAVPILPTLPPDARVLFTLANGECLEMEDPKQPGVRDVFRVLAISNGEIKVIRTHDARSSAISGKDRIRITGKGDNLRKLGARKVRVTLLGEVVDAGG

SEQ ID NO: 15651 - protein, 1136 aa, unidentified
  REGION 1..1136: note = Cas Enzyme sequence
MSHIVLGLDLGPNSIGWALVDEPNEKVLASGVRIFPEGVDNFDRGKEESRNEARRIARGMRRQTLRRARRKRLLREALIQAGLFPSDPDAQAAFYQDPNNDPYKLRAEALSEKLTPHQIGRVLLHLNQRRGFKSNKKEQAKADAKAKKKKKTTTKKSKPDDQKKTEDILIEMGELDKAITASHARTLGEYLCGKLAEMDHAVRIEDDHVRGRHTLRDMLTSEFDAIWRAQAQHHDALTEKLAYGELGRGKTISRPIPKSDKRRAGKSDLKSFGLFGLIFFHRTLKPVPKSIIGTCEFETKEGQRERFEREFGSNRENWPPYDLKRCPRGDRRAQRFRLLQEVNNLRLIDDTQTPPTERLLSKSERALVLDKLMRTKEAKFDQLRKWIGVLPESPAPEQIRFNLEEGNRKGLQGMVTDALLVDTKKFGKEWHELPEENKDAIVRALLNSVDDDETHKKLVEEFEITPHQADGVLSVDFSTGPTAGYVNVSRTAINRLLPHLEDGMRLMGNDKTDSAIHAAGYMRRDELQRRIFDKLPDPQRVWDAPIGDIPNPVVKRALVELRKVVNAIIREYGRPDAVHVEMARELRQGRKQREEYNRRTHEIEAKRNEAKQDLDKRGQPYGSRGINILRVLLWKQQNYECAYCDKKISQNQLYNGGEVEVDHILPGNRSLDDSQMNKVVCHRRCNATKSNRTPYEWLATSAPERYESICQNVYSWVKKYGFPYKKYKRFIQKELKLDDFVARQLNATSYIAKLTVEYLKCLFTKTNEHAVLGIKGQLTAELRRQWGLGSVLSNLPDSPAWKEQCHLPPGKKNRADHRHHAIDAIIVALTNRSRLEMLARGIGEVEHVDKETGEVTHRSAYLSKRIDPPYKGFRDEVVERINAIHVSHRVQRKARGALHDKTLYGPTHNSSGDPIPGEYVVRKPIELLSPNEIGSIRDKMIKALVIDRLKQHGIESGRGKDKIPKEVWQKPLAMPSGVPIKKVRIIKRDQTIQPIRKDGPDKTYVRPGATHHLSIFEYTDSSGKTKRDAVFTTMLEAINRLKNKQPIITRKHPSIPDARFVMSLSMNETVMIKHKGRESLYRFVSAASTSKQMKFRHHTVAGKSTDKHGKISKSPNTLTGRKVTVDPLGRIRWAND

SEQ ID NO: 15652 - protein, 1288 aa, unidentified
  REGION 1..1288: note = Cas Enzyme sequence
MISLGLDIGSNSVGSAWADTDKREVHLAVSVFPAGVDEQESKRGAPKNQARREKRSQRRSLARRSARKRRVRQVLTQAGLLPQDVEELQRLFDTNPWELRRAGLTRTLTPHEFGRVLVHLNQRRGALGIETNPEDPEEGKVKEGIDRLNAEMLARKAETVGQLFADLMDERRAAGKCASNTAVSRRVQQIRRKREGRGEATEFQFHGPVRNRQYRMDERQQLYADRRRVREEFLLLWERQKSFGGPLAELLTDDLKRQLDDPTGNDVWRHQGALFGQRRTFWDTGALGRCVLEPTERCVPLADRHASYFRVVETVNNIRIIQGGHSPRPLTVEERERVMRVLRGPLFRKSKGKLIPKSTASVTDIKQALGINPRDKLVRLNIEADEEREINTDWFHREIVHGAFTEERWNELDERQKESVNRAVLRFDPDDEQDQKTLREKAGRWWGLEAEAVERFIEAWKTRPKLEKRLNLSRKAILNLLPYMERFDEEHQRWPTQQEARKAYARTLREKYEQTGVEADRIAADRYDTGALGLTARDRYFMKLDKHRIAEGVPELPPAPMLSNPVVRKAIHEVRRHLMAYLRKFHKTPDQIVIELARITKQSERQRNAALARNRNREKIRKAIIAGTENEPGVLVCAFGAEGARRLSLNQQRAAVDRVILAIQQRETCPYCGRNGLTPVVAAKGDDLEVDHIVPYSRCGDDSLNNKVLVHRTCNRGKANLTPREWWGTEFETRIQVAEKLFNGVKPAKGDYFEERDYKRKWENFTREVREADEWKNSQLTDTAYAARQVAAYLADALFNGRGLPERGDGGNEQKIFFTMGRFTAMLRRDWQLFETLKPPQREGRHGELTADEEARIAEKDRGDHRQHAIDAAVIALTDPKIKHHLANWAAYAAEYKEKRGEWPRREPIEPPWGDVPSFRREILSQVYARFDSSEFESGRQDEAGASDLLVVSHRPVKRRLVGAFHEETAYGPVISPLPPHRREKPETLFTNRIQVAGLTPNHLRVPEGWDELSARLEDPALTEGEKKAVRRQLAALTDPPPGKSGIVRDRALRDWIRKCLRANGLNPDGFSKAQMRDFAASGKLVMRSGVPIKSVILLRTNTDPVIISRKRWDPAANRMIVDEDPRSARVYIGGNNHHIEIRERQVTRQGATVTEWTGRVVTTFEAARRVRLEGRPAVDRSDNEDGRFVMSLAEGEMVFMRHPKTGTPGYFVVFKLDKPNTIHFIHHWDARPSMPRKDENGNEIPGSAREDIAVVASKLRFLGVEDGQPPYKVRVAPLRRPKPVMGD

SEQ ID NO: 15653 - protein, 1288 aa, unidentified
  REGION 1..1288: note = Cas Enzyme sequence
MISLGLDIGSNSVGSAWADTDKREVHLAVSVFPAGVDEQESKRGAPKNQARREKRSQRRSLARRSARKRRVRQVLTQAGLLPQDVEELQRLFDTNPWELRRAGLTRTLTPHEFGRVLVHLNQRRGALGIETNPEDPEEGKVKEGIDRLNAEMLARKAETVGQLFADLMDERRAAGKCASNTAVSRRVQQIRRKREGRGEATEFQFHGPVRNRQYRMDERQQLYADRRRVREEFLLLWERQKSFGGPLAELLTDDLKRQLDDPTGNDVWRHQGALFGQRRTFWDTGALGRCVLEPTERCVPLADRHASYFRVVETVNNIRIIQGGHSPRPLTVEERERVMRVLRGPLFRKSKGKLIPKSTASVTDIKQALGINPRDKLVRLNIEADEEREINTDWFHREIVHGAFTEERWNQLDERQKESVNRAVLRFDPDDEQDQKTLREKAGRWWGLEAEAVERFIEAWKTRPKLEKRLNLSRKAILNLLPYMERFDEEHQRWPTQQEARKAYARTLREKYEQTGVEADRIAADRYDTGALGLTARDRYFMKLDKHRIAEGVPELPPAPMLSNPVVRKAIHEVRRHLMAYLRKFHKTPDQIVIELARITKQSERQRNTALARNRNREKIRKAIIAGTENEPGVLVCAFGAEGARRLSLNQQRAAVDRVILAIQQRETCPYCGRNGLTPVVAAKGDDLEVDHIVPYSRCGDDSLNNKVLVHRTCNRGKANLTPREWWGTEFETRIQVAEKLFNGVKPAKGDYFEERDYKRKWENFTREVREADEWKNSQLTDTAYAARQVAAYLADALFNGRGLPERGDGGNEQKIFFTMGRFTAMLRRDWQLFETLKPPQREGRHGELTADEEARIAEKDRGDHRQHAIDAAVIALTDPKIKHHLANWAAYAAEYKEKRGEWPRREPIEPPWGDVPSFRREILSQVYARFDSSEFESGRQDEAGASDLLVVSHRPVKRRLVGAFHEETAYGPVISPLPPHRREKPETLFTNRIQVAGLTPNHLRVPEGWDELSARLEDPALTEGEKKAVRRQLAALTDPPPGKSGIVRDRALRDWIRKCLRANGLNPDGFSKAQMRDFAASGKLVMRSGVPIKSVILLRTNTDPVIISRKRWDPAANRMIVDEDPRSARVYIGGNNHHIEIRERQVTRQGATVTEWTGRVVTTFEAARRVRLEGRPAVDRSDNEDGRFVMSLAEGEMVFMRHPKTGTPGYFVVFKLDKPNTIHFIHHWDARPSMPRKDENGNEIPGSAREDIAVVASKLRFLGVEDGQPPYKVRVAPLRRPKPVMGD

SEQ ID NO: 15654 - protein, 1169 aa, unidentified
  REGION 1..1169: note = Cas Enzyme sequence
MLFQANPWYLRREALSRPLTPHEFGRIVVHLSQRRGAVGITTDPDDPNEGKVKDGMDRLDKLMRDRGPDTTIGQLMADLIDERRQEHDGITWNEPIRNRQYRIPEDQQLFAGRELIRREFHRIVEIQRSFKDSQLGPMLTDDVIRSLDDPTQTDTWRHQGLLFGQRRTYWDTGTLGRCVLEPTERCAPIADRHASYFRVVETVNSILIERQGQPKRPLTPEERDKVVRLLRGPLFKKSRGRPEPKSTASVTDIKEALGIKPRDKTVKLNIEADEDREINTDWFHREIVHGAFTEAKWELLAEDQRESVNRAVLKFDPDQADDAARLRAGAERWWAMDAASADRLVEAWKRRPRLEKRLNLSRRAILNLLPIMNRFDSVNNRWPTQQEARKLYARTLNDQHARRRYETGAPGLSAADRYYMRLGKHQIVAGVPELPPAPTLSNPVVRKAIHEVRRHLVAYLRRFGRKPDRVVIEMARVTKQSERQRNEALARNRHRDKIRKAIIKEILPAAFGEEEAARLSLSQQRAAVDRVVLARQQRNVCPYCGQGGLTDLLAARGDDLEIDHIVPYSRCGDNGLNNKVLVHRACNRGKTNQTPREWWGSAFDERIRFAEKVFKDIKPEKSDYFNKRDSDRKWENFTREVREGEEWKNSQLTDTAYAARQVAAYLADALYDGRGLPERGDGEGAQKVFFTMGRFTAMLRKDWQLFETLKPPQRDSKHGELTAEEELRLAEKNRGDHRQHAIDAVTIALTDPTIKNTLASWAAQAAEYYEQHRQWPRRKPTDPPWGDVPSFRKQILSRVYESFDSSELASGKRDERGAASVLIVSHRPVKRRLVGALHEDTHYGPVVGPLPSHRTERIDTLFTNRISVDRLSPNHLRVPEGWDELSVRLDEAGVADARKRDLRKQLSAMKDPSPEKSGIVRDRALRDRIRKCLRANGLDPDGFTANQIKQLVREGKLTMASGVPIKSVVLLRTNSDPVIIPRKQCDPASGKTVPHMDPDNPGAPHPRTRRVYIGGNNHHVEIRERIRQRGGQAVAEWIGEVVTTMDAARRLHPPRNPDGTRPEPRPAVDRSDNHDGVFVMSLAEGETIYARRKDRPEEPASYFVVCKLDKAGNSCRIHFAPHWDARKASEQDRWAVTPGDLRLCGPEPDRPPYKVQVGPLGDVKRLEKD

SEQ ID NO: 15655 - protein, 1100 aa, unidentified
  REGION 1..1100: note = Cas Enzyme sequence
MSHTTLGLDLGPNSIGWALIDQDRDCVINCGVRVFPEGVDAFDTKKEKPRNEARRAARGMRRQNRRRGARKRGLRSELIRVGLWPEEPAEQEALLRRDPLALRVRALEEPLTAHEIGRALLHLNQRRGFLSNRKKERKTPEVKGMLAEINTLAADIQQTGCRSTLGEYLYRKAASLNHCHRTENDHVRRRHTLRQMLVDEFDQIWTCQQRHHPDLLSDKLRFGVKGPQKQPHKPVRRGQSHTLVDAFGLEGFLFFQRTMYWPRSVVGKCELEPKEKRCPRADRRAQRFRILQELNNLRYIDPITYEEQSLDDDQRNLVLEKLSTRKEMTFEAMKKALGFMETVQFNLESGKRTKILGMVSDYALANKNAMGPAWHKLPENVKNAVVELLAVSTDDDETFERLVHVQGLTPEQADGALSADLPAGYVKLSLKAIEKLLIHLERKLPLMGNDESDSAMHAAGYMRRDQLQRRVFDQLPDLARVGDARVGDIPSPVVKRAIVELRKVVNAIIREYGKPDAIHVEMARDLRQGPKARSEYSHRIREIEVKRSRAADEIRALRDQGVNVRLNRDTIQQYLFWQEQDHSCMYCQGKISQAQLFGGEVDVDHILPYSRSLDDSQMNKVVCHRHCNADKTNQTPHEWLAPRDPARFERVCQHALSLVRGGLLPYKKYRRIIQKELKLDDFIARQLTSTAYIARATVEYLKCLFAQDHSVLGLKGELTAELRHQWGIDNLLSTLPDSPAWQAQNELRPGEKNRADHRHHAIDAIVIALTDRSRLQQLSRIRKAGGTLRTGEVLPFPWETFRDDVVDKVSRINVSHRAERKVAGALHEETAYGPTRDADVFVVRKPLDALSPNEVPLIRDAVIRSIIEERLKNHGIEVGRATKKVDARRWRAAMANVTMPSGVPIRKVRVLRKEKTIQPIRGGSVHEAYVKPGSTHHLALFEWEEGGERKRSVDFVTMLRATDRVKTQRQEFRRLVTQYQEAEQEKIRKRSSQYRERQRQAERVAPLIDRNPPSNHATIPESAKFLYSLSRGEMVWANWKGQHKLLVFKTAASTQGQIYFAEHTDARRSAEQTQFVARANKLDARKVTVDPLGRIRWAND

SEQ ID NO: 15656 - protein, 1054 aa, unidentified
  REGION 1..1054: note = Cas Enzyme sequence
MANLTLGLDLGPTSLGWALLDEEGGRIVAAGVRVFPEGVDRDSNGAEVSKMQQRRLARAMRRQIARRARRKRRLRRALVDAGLLPEVALLPRTDPQRSAWEDSAFHAADPYELRARALTTRLEPYELGRVFLHLAQRRGFKSNRKADRAQRKERSQILEEISTLARDLNGRTLGQYLAKLRGTDPKCYHKERLRGRYTQRDMYEHEFDRIWAAQAPHHPTLLTDERRKELKDVIFFQRNLRPPSPALVGRCELEPRLPRCPRADRRAQKFRLYQEVNNLRLIDSTAGVERALTPDERQRALDLLRRKKDCEFKELAKLLFPEHPDNIRFNLQRGDREKLKGLPIDAELAKKKFIGKAWHSLPEEVKDRIVASIVHPATPPKKGPDRKEDQNPTPSNGKEDHDPPQKVDPEVEHLKHVLEKAGLDPDLAPRLLDELPLESGYASYSVHAIKRLLPHLEAGLPLTSRDPQTPCALRAAGYLMPWEHVAQRRPMLPEPPQVTNPLVRQALHEVRKVVNAVLRELVYRAGHTLARIHIELAREVRGTARERAQRAREMREREELRNQAAERVREQGVRPTRDAIDRYLLWEEQGRVCIYSGRPISLAQLFGGEVDVDHILPYSRSLDNSLMNRVLAFRAENAAKGDRTPHEWLAATDPQKWEQVQQRARHLPYPKYRRFLQRDVSLDDFFARQFVDTAYIATQVHQYVRCLGADVVCSKGQHTAELRWQWGLDTILAELPDSPANDAAADLPLGEKNRADHRHHAIDAIVIALNGRKRLQQLAALRRAGGTAATGEILPEPWPNFRAAVRAAVESINVSHRPRRRVSGRLHEETLYGPTQTPGEFVVRKPLTELSLSEVERIRDPAIRRLVTARLQEFGLDPGRAKGGKISPAVWARPLCMPSGVPIRRVRVIKKDQTITPIRGGTAWVKPGNVHHVEIFEFHQGSRTFRRGRFVSLLEATQRLRARQPIVQRTWPEHPDARFVMSLCTGDMVLARWDGSERLVLVSTLVSTQERIHIVDARDARPSSKRCDVGKTPNSLQAIKVTVDPIGRIRRAGD

SEQ ID NO: 15657 - protein, 1039 aa, unidentified
  REGION 1..1039: note = Cas Enzyme sequence
MSNLVLGLDLGPNSIGWSLVDESNHKIVGSGVRIFPEGVDNFDTGKGKEESRNETRRVARSMRRQIARRAQRKWRLRKALIDVGLFPSNPDEQATLYRDEDPYQLRAKAISEKITPYQFGRVLLHLNQRRGFKSNRKTDTKDKEVKGLLAEISVLEGQIKDSGNKTLGQYLAQLRSEDPHARIRTKHTRRDMYEVEFNAIWEAQARHHPDLLTDTLRYGARGKQAFPIKPEKLHGKTDWLTAYGLYGILFFQRKMYWPKSMIGLCELEKKELRCPRAHRQAQRFRLLSEVNNLRIIDSSSNTERCLSDEERTLLLDKLSQEKEMTFKKIKEALGFLESIKFNLEKGKRPKLLGAPVDALLAGQNVCGPKWYERPEDEKNQIVQLLLDNDRDEDALMDQAITLWELTPQQAEALLDVDFPSGHLHLSLKAINKLLPHMERGLIYMADDAPENSALAAAGYLRPDQLRERIYDKLPMPDRMNDAKLSNLPNPVVRRSLTEVRKVVNAIVREYGKPDAVHIEMARSMRMGKQKRDEYNKNMRKREATRDMAADKIRQHGIQVTREAINRYLMWDQQNHECVYTGKAISVAQLFGGEIDVDHILPYSRSLDDSQMNKVVCFRHANADKTNRTPYEWLAESDPNRYDQLCQRAENLPYPKYRRFLQKELDLDQFISRQLVDTAYISKLTAEYLRCLFDNDHDVLGLKGQYTSELRYQWGLHEILRDDGLDLKNRDDHRHHAVDAIVIALTDRSRLQQLTKIKKSGGVLKTGEALPYPWESFHNDVKNTVNAINVSHRVERKVHGALHEETLYGPIHDNDGKAISGEYVVRKPLESLTASEIDRIRDATIKRLVVQRLEQHGVQHGRGGDKIPKEVWQEPLMMPSGVPVKKVRIIKRDQTIQPIRQGQPGQAYVKPGATHHLSIFEYTDSSGKTKRDAVFTTMLEAINRVQKKQPIVTREHPHTPGAKFIMSFSRGEMVLIEDQGKSKLYRYETAASTSQQMWFRHHVVAGRSNDKRGILSKKPGTFTGRKVTVDPLGRIRWAND

SEQ ID NO: 15658 - protein, 1014 aa, unidentified
  REGION 1..1014: note = Cas Enzyme sequence
VSSRTLGLDLGSNSIGWALVDEARTSIVAAGVRVLPEGVDRDQQGGEKSKSQTRRDARGARRQTARRARRKRKLRELLATYGLLPSNADDLERVLVANPYQLRFRALDETIQPHEIGRVLLHLNQRRGFLSNRKTDRSRERETKGMLAEMSDLANAIERTGSRTLGEYLARTDADFEHASSSDSDRIRRRHTRRDMYEHEFETIWAVQSGFQPSLLTDELRQQVRRIIFFQRDIYWPRSVVGHCELEPGKRRCPRAHRAAQRFRILQEVNNLRLLDPRTRDERSLTPKERTALIDYLCKAKQRTFDQIRKKLGLAEDVRFNLERGERGKLKGHETDAALGSRGGLGTRWNELPAETRDAIVDVLVNEEREDRAVRRLVEDCDLGQEEGERALGVNLPDGHMNFSREAITRLLPHLERGLLLMADDASNSALHAAGYLRPDERVVAQRDFLPPGPDLPNPIVRQALVEVRKVVNAVIREYGKPDRIHIELARDAKKSFEQRREIRIANAKRRKEREGYAAAIEKLRAKPTRAAVNRYMFWREQDQDCVYCGQKIGLAQLFTDGEVDVDHILPRWRSLDNSLPNQVVCHRKCNAAKGDRTPREWLEELDAERYERVLRVVEKLPYNKRRRFQQKDIVLDYFVERQLRDTAYISRRVTQFLRCLGMPIVCSRGQMTADLRHWWGLDTILDPEGRGEKNRADHRHHTVDAVVIALIDHKRLHALANARGKDVRLPWPALRDDVARAIADINVSHRALRRLSGGLHEDTFYGPTLKPWNTGSDSYRPWAGEWTEGEGAFVRRKPVTEIKNRKHLDKVRDGAIRQILRNHLLAQGIDPDQPGRFPGIAFKGEKTPRMPSGVPIKKVRMIEESETFRPVSERRYFQYVKPGNNHHIVYRAVGKDDDEKWTAEVVTMWEAAVRARTGRAVIDRSDNDRGRFVMSLSIGEMFQIDGDAGRRLLCVVQKMRQDDRRVNYKLHTDARPADEVKKDNLSVSPKKIQECNARKVTVNPLGRIRRAND

SEQ ID NO: 15659 - protein, 1069 aa, unidentified
  REGION 1..1069: note = Cas Enzyme sequence
MSNLTLGLDLGPSSIGWALLRSDGPQQGIVQTGVRVFPEGVDNFDTKKEKPRNEARRIARGMRRQIARRALRKRRLREALVSCGLYPSDASGQQKLETTDPYELRVRALDERLTLHELGRAILHMGQRRGFLSNRKRERKDSEVKGMLAEMSELQADIERTGARTLGEYLHRKTTGINHCKRAENDHVRHRHTRREMLLYEFDQIWKAQSGHYPDKLTDQLRYGSTGPQRQPVKPRPRTNGQSLLESFGIEGLSFFQRPIYWPRSVVGKCELEPKQKRCPRADRRAQRFRLLQEVNNLRYIDPETNEEKCLTSELRAILLDRLAKSKEMDFDKIRKALGFLETVQFNLESGKRKKLWGMVTDAMLAAKGAFGPKWHDLPEAEKNSIVELLVLSTDDDETRDRLVNDHALTGPQAEALLGVELPAGYIHLSVMALEKLLPQLEAGMRLMGNDETDSAMHAAGYMRRDQLQRRVFDELPDPTRARDARIGDIPSPVVKRAIVELRKVVNAIIREYGKPDAIHVELTRQVRQGPKARSEYTSRIREIEEERSCAADEIRKLRDEGAQVRVNRDSILRYLLWKQQNHDCIYCGNKISQAQLFGGDIDVDHILPYSRSLDDAQMNKVVCHRKCNAGKGNQTPHEWLAETNPKKFGEVCQHALSLVRRGSFPYKKYRRIIQKELKLDDFIARQLTATGYIASATLEYLKCLFDKEHAVLGLKGELTAELRHQWGLGEILADMSDSPAWQEQSKLRPGEKNRADHRHHAIDAIVVALTDRSRLGDLSRIRKAGGTAKTGEVLNLPWKSFREDVIASIREVNVSRRAERKVAGALHEDTFYGKTGEPGIFVVRKAIESLSPNEILLIRDEGIRRIVERRLSEQELEVGRGKKKKDDPDAGKKWKAALSGLAMPSGVPIKRVRVLRKEKTIQPLREGRPDETHVKPGSTHHLALFEWEEGDKRKRDAVFVTMLEAINRLKRHEALVRRTPPQNHPTIPANAKFVFSLSRGETVLANWKGGEKTLVFKTASSTQGQIWFGEHTDSRKSSEYKQYSANANTLDARKITVDPIGRIRWAND

SEQ ID NO: 15660 - protein, 1071 aa, unidentified
  REGION 1..1071: note = Cas Enzyme sequence
MTQGNNDSRPYVLGLDLGVASIGWALLDAELDAEGKPHPTAIRAVGSHLFEAGVDGGKAGPETAMARGQEQSKAVPRRVARSMRRQTMRRARRKKKVLGAIIRHGLLPEGDIRTPEAIDAYVKALDVSLREKWCPPGSSHAEHQNMTYRLRAEAAQRPLEPIELGRALYHLAQRRGFLSNRKAPEREDEDRSEMKKEIGELAENIAAHPTPTLGAYLASLDPDEKRLRGRWTSRQMYLDELETIWSMQAGPLELGDEAKTDIREAIFHQRPLRNQSHLVGRCSLEPGRRRAPIALRIAQEFRLLQQVNHLRIITPDYDDRPLTAEERDELLNALRRKGDLTMDKAKKAAGLPTRGPGRVSFSIESGGEKRLIGHRTDAKLRDVFGGRWDDLTESQKDQVVQDVRSTRLPETLRKIGEARWGLPPDAAKKLADTQLEEGHAALSVRALRRLVPRMDADGLSYAEARKDEYPQSFASVEPVDQLPRVEAWEADLRNPSVTRALTELRKLVNAIVARHGKPVRIHLEMARDLKQSRGQREKASARMRTRENERERAAERIAREIGIQYPRRWQIEKVLLADECDWTCPFTGRGFGMADLLGSTPQVDVEHIWPFSKSMDDSFLNKTLCFHEENRARKGNRTPRQAYGAIPEQYDAILQRVRRFKGDAAAVRAKVRRFEEDMPDDPDFTNRHLSDTRYISALACDYVALLYGGRSEGEGSTGRSKRIITPTGPLTAWLRRGWGLNAVLGFGDEKERNDHRHHAIDAILVALADDKAIKRLSDAAERAEREGRERAFGTVEQPWEGFQDDVRHVIDGVVVSHRQNRRVRGPLHKDTVYSPPINGKHRVRKELAKLSAADIQKGRVVDKRALAAIRAKLEELGQSDPSKAFKAPEHAPVVRGADGREVALRKVRVELGDKPMKFGGKPGRGGPGAAKHAMNELNHHVAFYDRHLPGGGVERIAEVVPLKEAMRRLRAGEPVVDRTPRGTDGAHVFAFSLVKNEHVWYREKEGDEPILCRVDSISEGDIELKRHADGRTQNERKAAKDRIRLRSKAIRDGRYEKAHVTYLGEVRRAGG

SEQ ID NO: 15661 - protein, 1049 aa, unidentified
  REGION 1..1049: note = Cas Enzyme sequence
MVKAGSGSAAEGRRFVLGLDVGVASIGWSVVDLCDGPCGVRKAGVHLFEAGVDGGKMDPETAMTRGKEQSRATPRRDARAMRRQIWRRARRKKKVLGSLIRAGLLPEGDIRTPEAIDAYVKQLDAALRERWEGAGASHADRQRLPYRLREAAVVRQVEGDELGRALYHLAQRRGFLSNRKAPDRDDEDRSAMKKSIGELAERVAAHDPPTLGAYLASLDPDDERLRGRWTSRQMYLDEFDRIWEAQRERLGLSDEQRDEIHDAIFHQRPLKDQSHLVGRCSLVDGAKRCPIGDRIAQRFRVLQQVNHLRVVFDDMTERALTREERDALLDALLAEGDLTFHKARKAAGLPRAATFSIERGGEKKLVGHRTDAKLRRIFGPERWAAMSEGEKDAAVHDVRSVREADVLRRIGRSRWGLDAEAADALADLTLEEGHSAHSREALRRLVPRMEQDGLSYSEARKDEFPESFQSEEAHDLLPPLEQWDADLRNPSVARALTELRKLVNAIVRRYGKPVRIHLELARDLKAPRAKREKIAQRMRNREKERETAASVIMRELGVASPPGWMIEKYLLAEECGWHCPYTGRGFCIHDLLGRNPQFDVEHIWPFSRSLDNSYANKTICYHEENRNRKQGRTPTEAYSEQELEAILERVRAFKGDPFLIRAKLRRFTDPIEEGFTERHLQETRYIGRLACDYLGLLYGGQVEAQGTAVSQRRILTPTGGLVAWLRRGWGLNAVLSDRNEKERSDHRHHAVDAIVIACADQRAIQRLSESAERMERVGKERPYEAVDHPWEGFEEAVQEAIDAVVVSHRQSRKVRGPLHKETLYSKEHNGRRRIRKRVELLSTADIEKERIVDRRALEAIRAKLVELGESNPAKAFKDPASRPAVRGRGGRAVTLRKVRVEVGDQPRAFGSGSGRRHALPASNHHTRILAKRNGAGEVVGWEDEPVVLADIAERIARDEGDSLHGEVIFTLAANDFVELDRKDGEGRAVYRVLNISKGDMELREHWDGRTQKELKAARLLERVSGGQLLRRNARKVHVNYLGEVHDAGG

SEQ ID NO: 15662 - protein, 1052 aa, unidentified
  REGION 1..1052: note = Cas Enzyme sequence
MFQPCDENTAARQSAIGDYILGLDIGAASIGWAIIRLNGVEGEVVRAGSHLFEAGVDGGKMDPETALMRGKEQSRAKPRRDARALRRQIWRRARRKKKVLGALIASDLLPPGDIRTPAAIDAYIKRLDDELRESWANADAEHIERQNMHYRMRAAAATRPVERHELGRALYHLAQRRGFLSNRKTPERDGEERSEMKQHIGELADHISRHDPPTLGAYLASVDPDEQRIRSRWTSRSMYLEEFDRIWSTQADLLSLAEEQRQRIHTAIFHQRPLKDQSHLVGACSLTGGKRCPLGERPAQRFRVLQQVNHLRVIFGDLDERALTRQERDDLLNALCSDGDLTFTKARKAAGLPRNFTFSIERGGEKKLVGQRTDAGLRRIFGAERWNDLSEAEKDAVVHDVRSVREPDVLKRIGRNRWGLDAEAADALGDFTLEEGHAAHSREALLRLIPRMEHDGLSYAEARKDEYPEAFSSEQPHDILPPLEDWDRDLRNPSVVRALTELRKVVNAVVRRWGKPQRIHIELARDLKAGRSKREKIARRMRDREREREAAARAITSDLGLAQPKRWMIEKWLLAEECGWTCPYTGKCFGAHDLLGSNASFDVEHIWPFSRSLDNSYMNKTICHHEENRSRKRGRTPREAYGDDELEAILDRVRAFKGDPFVKREKRRRFTQPMDDGFALRHLQETRYIGRLACDYLGLLYGGRVEAQGTDLSARRIVTPSGGLTAWLRSGWGLHAVLSDRDEKQRNDHRHHAIDAIVIACADQAAIQRVANAAKRMEQQARERPFDEIPEPWDGFLDTVRDAIDKAVVSHRQSRKVRGALHKETLYSKEHNGKRRVRKRLDALSATDIQKERIVDRRALEAIRAKLDELAEKNPAKAFNDPNNLPTVKGTGGRPVALKKVRVEVGDQPRPFGKGVRRRYANPASNHHTRIVKKRNAEGEVVGWDDEPVVLADLAEQVVNEGRTRADDDLVFTLAANEYIEMDRKEGEGRALYRVQKISKGDIEIVHHTDGRTMAERQAAKARDRVSGASLYRRNARKAHVNYLGEISDAGG

SEQ ID NO: 15663 - protein, 1347 aa, unidentified
  REGION 1..1347: note = Cas Enzyme sequence
MATRNVLGLDIGTNSVGSAWIDFATGEITPGLSVFPAGVDETEDKRGEPKNVKRRMTRRTRVTLARRSKRKRELRLELIRAGLLPVDPAAMKSLLEKTDPWTLRRQGLDAALTPHEFGRVLMHLAQRRGALGLKPIGTHEYDEADAEGADNNADTAAKEDGKLRAAIGATRDEMLKLGARTFAELICMLREQDSRKQPVPITTKDRRSPSLRAKGAPRQWHNPIRNKSGSYEHAADRALIRHEFEELWKKQRSLRGPLAGLLTDSLKLKIDDPERKAWDHEPSKTPEDRARYRQTFREGGLLFGQRRQTWDMGTLGRCVLEPTERCAPKADRHASYFRVVETVNNLRVIPSGGRDRALTAEERDAVIAFLRGPLGESSPKKRKGQKSDPKPRPKTTVSVTDLRCLSIFGWGKATKNTPFRFNIEADEAREINTDWFHREIVHRAFGEAAWDAMPEQKRESVNKAVLKFDPNEPKDADRLREGARAWWGLSAERADALIEGWKTRRPLEDRANLSRRAIRNLLTLMDKPKEGAPGGGGGGWLTEIEARKLIAENDAFRDVTTGEPLDQWARRRYATGAQGLNAADRYYQRKHPLSLPPAPMLSNPVVRKAIHEVRRHIEAHLQRTGVRPDRIVIELARDAKMGANDADRTLFRNRLREKIRKDIIKTFNLGSKEPNHQRTAVDRVVLAVQQDGVCPLCTNKIVKTKITPRMAANGDDCELSHIIPRGIGGGSGLNNLVLAHTRCNREMKRQTPREFWGDHFGEMIGIVERMYQGIERLRGKAIDKASEDKLWAGYFDARDDKAKVANFKKSKGDIEGFRERDLTDTRYATRQVMAYLSDALFDGKGLPERGGERQIFTTDGRWTGDLRREWGLFEDTHDAKEKGVKAAESAGRKEKNRGDHRHHALDAVAIALTDRSVQMKFEARVKDADSQNITAEGFEAFCKDNPVSPPAPFKSRKDLRERAIAAIFGEDAERPVCHRPVKRKLIGAMHEETLFGPVPGKSGLYTGTKGILSLSPNHLRVPEGWDELSAKYRRAKTPAARNAIGRELAAMEDPPPGKPGLVRDRTLRDRLRVCLREAGLNPDSFTANDLKKAVDAGFVKQASGVPINAVRMLRAMSDPVIASRVEYDHATGKRRTVFDAATGEGDPAAARAYVGGNNHHIEIRVETTGTAKGKGGGKWTGEVVTMYEAAQRKLAFFRELRKAGVPTFKRLRELPKEERRRYTGAIQAADRAHPIVDHRDDPERGGEFVMSLAEGEMLWMLHKESKKLGYFVVAKIDKPQSVVLVPHWDARAAGERKDAFGNKVPGSKREQFSATPTDLRDLAPPGRPHAVKVRVSPLGVVTECDGD

SEQ ID NO: 15664 - protein, 1015 aa, unidentified
  REGION 1..1015: note = Cas Enzyme sequence
MTISEYLSGPLGMEKPRKTRSGQRPARPKTSASVTDLRACLGWGRATRTSQFRFNIERDPDRTINTDWFRREIIHGAITLEAWNGMSERLREGLNCAILRLNPDDDAHEGRLRAGLMGWAGLAAMQADAVVAAWRRRPKLDSKRLTMSRRAIRNLLAFMDRAEPWPDLRDPDACRWITAIEARKMVADSPGFRDITTGAPLDEIARPRYATGARGATARDRYYMRKHVLVRGGEPILDEHGVPLAEPPPAPLISNPVVRKAIHEVRRHLVEYMTRFGRKPDQISIELSREARMGAKQADALLFRNRLRSRIRSDIIEAFDLDALSPSQQRAAVVRVILATQQRGVCPLCGNAAVESMLTPRIGAAGSNCEVAHIIPRACGGHNGLGNTVLAHTKCNRNMARRTPRDFWNAEVSGGYDAGINWVEHIYGGIDRPSAAGNTKVSGDALWQSYFTRRDDESKLEQFKKAITDIQEMTNRQDAATKYATRQVMAYLADAVYGGGGLPERGGQRRIFATDGIWTSRLRREWGLFFDPHDAKLKDVDAIELTARREKNRGDHRHHAVDAIIIGCCTAAVQQQWDRRERQAEHEVPNSADEAAMEAYRRLHPLPAPTPFRTVVSFREAVRHAVFGTDAWHRPICHRPVKRKLIGALHEETLFGPVLDLTGGLSGYYARRKQILEIEPNHLRLPCVETERAAIARLAARRAREKSCSENDARRWARGVVRSGFFKPRLVDPSPGKTGLVRDLGLRRTIRRCLAAAGFDPDNFTKQEMKQLTDAGGVRHTSGVPIRAAVLLQAMKNAVIIDRRRQEYATGRSVRDPNPASKRAYVGGNNHHIEIREGNDGKLMGVIVSAFEAAQRKLAKLNAFKSAGIPKPADVRSLPYAARRKLRPIISQIECDHPIVDRRVDESKGGRFVMSLAEGEMLFVCGKGHAGEIGNAAYYVVAKLEKPNRVVLVPHWDARAAMGRKDSSGGRVPRSQREHLSIVPSDLLTLAPEGEQLAFKVRVSALGEVSRLLTD

SEQ ID NO: 15665 - protein, 1448 aa, unidentified
  REGION 1..1448: note = Cas Enzyme sequence
MVILGLDIGSNSVGSAWVDTERREVHLGVSVFPAGVEEQEGKRGVPKNQTRRQKRAQRRTISRRAERKRRLRSVLTTAGLLPRGSEELQKLFEANRWPIPDDKEQYEKLLRDEYTVWDLRRDALSRPLSPYEFGRVLVHLSQRRGAMGLDLPMEEDTDEQEDQGKQDERKTARKAWDNTQRLMKEHGAETFGKLMAVLVKKRRSTIDANGKTISLSEPIRNRRDLLVNTPESAVFATRELIYREFKVLWDKQRSFGGDIGRILTNPLKADLDDPTEAKPWRHQGEIFGQRLTYWRAPDRCDLEPAERRCPIADMYAQEFRVMEMVNNIRIKGPPDSDWRPLNRDTGGERERVIQYLRGGGGQVPPAGSGPKRAPKNKASSKETGVEGIRRVLEIDKRTLNRRGLAEDAWQIKMEEKDPDRKINTDWFHREIVLGVFTKPMWEALAPQQRDFVNRGILRFDPENENHCNRLHDTAVAQWGLADEAVDRLIGAWRKRPKLERRVNLSRHAILNLLPYLWNGLTVTEARQRFAEDQDAIDQVTGKPPTVEQRALYAFNVTDASKALLLSLLSKDAEKVDKILRPLKDEEKQTLTGSGRIARAGSELLRRRGTNYRARHYMRKHGVALPPAPMLANPVVRKAIHEARRHILAHMNAHRHPETGDPCRPDRIVIELARSARQSGKVRQAILDRNRAREAIREGIIQKHKLANLSSNQQKAAVDRVLLCRQQRYICPYAGLLEKHKGVDPYSGKMITEDQAVQGADVEIDHIVPYSKCGDDSLNNRVLCYRTSNQGKGNLILKDWLGGEQSEAFRALEQRLRHVQAKAKPRRKKGNKDTSVEDIEDKKDYFSRKDYKRKWENLHRRPTSDEFRNSQLTDTAYAAKQVGEFLRAVLYDGEADERRHVFFTKGNFTGALRRDWRLFQRLPVFHPKGEEPAPGEQGKEAHQFKKDRRDHRHHAIDALVIALTLECPPGSNDDYLQHLSRQFEEIEVAKEKYKQDNIEPPQEAFRRRALPPPWPNADVNAFRRLVLSKVYAEFDVMDRRFKGLGSEAGRPLVVSHRAEKRKIVGKFHEDTAYGPVLGQKTTYTCRVDVADLKPGYLKLSQTQRQAITEGRKPKTGDDPRPEGNSYLVRDLRRRLEIRRCLDEGCILKPEYADKRLIEKLNKERRLDPEVDTGGTAEELKSRVDVTKPRLRLDPDGFGSAEIQLLVKHGAIRTRSKIPIKSVVCVRTINDPAVIPPKLWDENMNRRVPDSDPRTHRAYLKKNNHHIEIRERTKRRSRQSATEWVGRLVPMFDAARRNAARLKALREAGIPTERQWRRLPRNERRKFHDLVSRINAAHPLVDRSDNDDGKFIMSLAIGETVHMRHPKSNEPGYFVVFKIDPGGAIHLKSHWDARSAKGEKDKSGSPIKESRREDIRCSPRQLRDLGPEPGVPPYKVRVSPLGEVTRLERD

SEQ ID NO: 15666 - protein, 1090 aa, unidentified
  REGION 1..1090: note = Cas Enzyme sequence
VTDSYILGLDLGPNSVGWALIRATHEVGGFEPAGLLDTSASGHPSLGVRIFEAGLQNFDTAKEASLCEQRRKARSMRRTLQRRAARKESVRELLKAQDLLPQEQDEFERVMALNPYELRAAALDRELEPFEFGRAIYHLAQRRGFQSNRRNQERKPEKAKLEQAMGQLDSAISSASARSLGEYLNTERVRGLERPDGTAQDRAHLGEIRLRNRECRRDDFASQPRRARRNMVREEFDLIVRSQRAYSRLGKVPNAFFDKLAHFLFFQGTFELTQERIDKAPPRANLHRAPKLKSCPLMPEEKRCSKSAWIAQRFRVLKEVNSLRIAVRGSPERILSAEERRKVIDLLSEQKEVKFDRLRKDLRLPTDAIFNLERGRREALDGNSLDRLLVGALGKTRWRAMRDDEKASLRALVEREENEASLRKELDKLGIESQAIESIIDWAPQDGHVAYSAKALGRLLPHLEAGESEYEAIRREYPDRGVGKEWEQLPSLVTPGMPVELADISNPIVRRGLVELRKVVNAIVREHGKPARIVVELAREMRQSSKQRDEYNKELARRKSERSAAKDWLEAQGVPVLDRNIRRYLLWMQQAKFCMYSVPRRVIPQELLFTSAVEEDHIQPRSQTLDDSRGNIALCFAGENQAKGNRTVAEWLGEDSDSFRSVVENAESCVKHHGLPGGVVVRLRQVHVDASDFLERQLNDTKYMSRLACHYLNLLYPPQDRVGERAVRATRGGLTAELRRVWGLNGVLDYLCNAGGEVMEDGDKDGKRKSRADHRHHAIDAVVIGCATRGMLKRYQTQLERSSPRGGRGTASNVAPPWAMIRDDVVNAARQIVVSHRPQLKCSGPLHEATYYGAARGSGGEVIPGQFVTRKSLDQLTAEMIRGEQIVDGVVRTLVEARLAKHGWSKDDKTKQPLPKDWWREELRDHRGTAIRRVRVKICLGDPVKLGHRFAEAGNNHHLAFEPRSAGTDPLLVRVERMFEHARTPGARVPAQSGREGAFPVARTLGRKEMVSVTSPGATVPVLCVVQKFSGSRQAGTGVDLYVRDHRDGRPASIGNKSPFKRFSSTAALMDFRVRKVCVDPLGRVSPAGD

SEQ ID NO: 15667 - protein, 1206 aa, unidentified
  REGION 1..1206: note = Cas Enzyme sequence
LGLNIADASEEDGEADEEDGKVKKAIGDVRAKMLTRKARTFGEFISMIRADRVTPITSADNRRPSERIGVREFRHSIRNKAGNYEHCADRAMIRHEFAELWNAQKKLGAKLSEKLRLVLDDESGDTLWRHKGFLFGQRRQSWDLGTLGRCVLEPTERCVPHADMHASRYLVVETVNNLRILERGKEPRILTPAERAKIKAYLSGPLGTVKASKAKGDAATKPKTTVSVTDLRTLMGWGRATKTTTCRFNIENDEDRSINTDWFSREIIHGAVTIEKWRSLAESVRDGINHAILRSDPEDETHAAKLRAGVMRWGGLSEPQAESLVAAWRKRPKIDAKRLNMSRKAAKNLLAVMDRDEPWSDGVRVRWLTAIEARKLITADDNFLDTTTRLPLDAATRRRYATGSKGSSARDRHYMQKHVLTHNGKVIVDQDGKPLAEPPPAPLISNPVVRKAIHEVRRHLVAYMKRFGRRPDEVYVELAREAKMGKKDADRLLFRNRLRNRIRNDIVESFDLDSLTATQQRAAVTRVILAVQQKGVCPLCGNTIEKMNITPHMAAKGDRCEVAHIIPRASGGHNGLGNVVLAHTKCNRDMGRRTPREFWDATIKGGFDTAITWAEAVFSDIERPKPSEMKSASGDSLWACYFTRRDDSAKLDQFKKSVSDIQEMTNRQDAATKYAARQVMSYISEALYGGEGLPERGGERRIYATDGMWTSRLRREWGLFFDPHDARAKDVGDGEGRVRREKNRGDHRHHAIDAVVIGFCTRDMQIMWEKREKQAERAIPNSADEEAMENYRRNNPLPPPAPFRSIEAFRAAIRDAVFGSGEVEKAICHRPVKRKLIGALHEETLFGPVLDGEGKLTGFYTSKKGVLGLTPNHLRLPKEEAEKDAIERLAKRREREKGVSATDSRKWAKGVVTSKGYKPLIVDPPPAKSGIVRDLGLRKRIRECLKEAGLNPDDFKASEIKKVVDSGKVRHRSGVPIRSAVLLRAMNDPVIVSRRRQDYATGNVHVDPNPAANRAYLGGNNHHIEIRQDSKGQLSGKIVTAFEASQRKLAKLRAFRAAGIPKPVIFRGLPRAERKRMSPTICEIEMAHPIVDRRDDNSQGGAFVMSLCEGETLFICEKMPGGEIGRAGYYVVAKLDKPQSIVLVPHWDARSATERKDSDGNAIPNSEREQFSIVPSDLKTYSPGDKGLAVKVLVSPLGEVTRLVLD

SEQ ID NO: 15668 - protein, 1075 aa, unidentified
  REGION 1..1075: note = Cas Enzyme sequence
MRLGLDIGTNSIGWWLYKTEKDVITEVIDGGVRIFSDGRDPKSKESLAVERRIARGQRRRRDRYLRRKAALMKRMAEEGLMPVDPAEAKKLELLDPYALRAKGLTEKLPLVHLGRALFHLNQRRGFKSNRKTDRGDNESGKIKDATARLDQAMMASGARTYGEFLHIRRSNAPTQNHVPTVRTRLSLGRRNDEHKEESGYDFYPDRRHLAKEFEELWKAQSEYHGEILNDKLYNEISKIIFHQRPLKTPEVGLCLFTDERRVPSAHPLNQRRILLETVNNLRVTTPGKPAHSISFEDREKIVHALDNKAHTKSLSGMSLKLKALGKIIKLREDQSFTLETINRDSIACDPVRASMSHPERFGSNWSKLNTQAQWDVIQRVRAVQSDAEYSDLVDWLVTDQGLSQDNAEASANAPLPEGYGRLGITATQQILIALEAKVITYSAAVASCGWHHSDGRTGEILTDLPYYGKILERHVIPGSYDDKDDDIKRYGRITNPTVHIGMNQLRRLVNRIISVHGKPDQIVLEIARDLKLSEDQKRDVQRDIKKNTDAAIARGAKLEELGVHNTGENRAKYRLWEELGPAIGPRCCPYTGKPINASMIFDGSCDVDHILPFSRTLDDSFSNRTLCLKEANRQKTNKTPWEVWGGTPQWDSITANLKKLSSNKAWRFAPDAMERFEGENDFSARALKDTQYLSRIARTYLETLYDGQDGKSHVWVVPGRLTEMLRRHWGLNGIAELTDSSKETVKAKNRSDHRHHAIDAAVVAATDRSLIKRISDIAKKDELEGAEQIARSVHPPWNNFRQDIAKQLQKVIVSHRADHGRIDINARKLGQDGTAGKLHNDTAYGLTKDDTVVSRSPLLSITSKDIEITTRGKNIRDQYLQKHLARVTQGLEGKAFEKALSDFSNTQKLPDHSDNPYLGIRRVRLEEALQESSRVAVSDKHGKMFKSYKGDSNHCYEIWRLPDGNIKGQVVTTFEAHTVNIEKKPHPAAKRVLRVFKRDMIAFERNGKMVAGYVQKLNEGQGLVIAPHTEANADARNRDKNDWFKFIYMSAAPLMKAKVRRIYVDEIGRIRNPAI

SEQ ID NO: 15669 - protein, 1075 aa, unidentified; identical to SEQ ID NO: 15668
  REGION 1..1075: note = Cas Enzyme sequence

SEQ ID NO: 15670 - protein, 1179 aa, unidentified
  REGION 1..1179: note = Cas Enzyme sequence
MSFPDGVRQKYILGLDLGSASIGWAVIDLDGNLDPCGLLAAGSHIFDPGVEVPPAAGKMARDEAVFQGLDRSKAVGRRIARQMRRQIDRKGIRLKALFKLLQSKSLLPIYPELKGEPLAAERHHLFTRLDKELTDALCAEKRKRGTDGLMLEADQALPYVLRKEALERKLELHELGRALYHLCQRRGYRPSAADDSEKEETASTEEEIESKRGRRKKPEPEDKGDKDSESPKKVAEWISDLQAKMDAAHTPTIGAYFADFKHNNPHQERIRHRWTGREMFVKEFDLIWERQSEFYRDSRPGLLNDDLRNRVYDCLFFQRPLASAEHLIGMCDLERGERRAPWATLEAQRFRLLQKVNDLAYIPSGLFNERKLSLEQCATLAAALQDKGDMPFPEIAKLLGLPPKTEFNLMRGKKKKIEGNRINQVMLQVFGDRWRAFTEQERSSAVALWTKTEGFEERKNVAISQCGLDAWKAKEWAENRPPKDCCRHSRKALVKLIKRMEEGVPYATAKLEIYDSQLAGKAPLDFVPKVIETLPSINNPAVLRALTELRKVVNAIIRTYGDKPYEIRIELARELRKNRKQRQNATEAGDKQHLRRIDAARTILRECRNYDAQGRDAERLVRERRDDVTKMLLLMECRCLCPYTGDSISYLDLFGGEVEVEHIIPQSLMVDNSFNNLTLCYRKVNHEKLDKTPRQAFCRAEDDQQWIDIIGRVQKFGNKEKLHRFLLSSREDIDRFSNRRLNDTRYTSKLAGRLLMSLYGGRDIVPAETLDELDEFKDRTGRRAICVSSGMVTSLLRDAWHLNLSGVIGDDAFKCPKKSEDDEESGKRRKGQSNKKDRCDHRHHALDAVVIALTSEKVIREINMLASRLYRERQTPLKYRDLKSIQNPWHNFMDDHFRDIFRGMLVSHRPEHKLSGALHEATSYGKVRYYNAKGDPVRYQRIAIGKLLTDKQIEKIVDEEVKKSVVKLGETIGGYKKWSQEKHGWPKMPNRNGEPVPIKKVRIKITKNAKEIEAERFRGFGTGRPESNVEDKEIAYASFFTVQDRKGTKTVWEIVKLFEAAQRVRALPKSERGHEKICWKYPKYPDATFFRFSLMKGDLVELVLNGKPAIFIVRRFEFDSRLWVAPINAAGKDEEMEAAGHLLRLGFSRFLTMGAGDDKIPRPVFVDLLGQPHYINIGA

SEQ ID NO: 15671 - protein, 1083 aa, unidentified
  REGION 1..1083: note = Cas Enzyme sequence
MGKMGETGSLAQSYVLGIDLGSASLGWAAISLDETGKPSGLLRAGVRIFDPAVTGDTEKGQDESNAVARRTARLIRRQLRRRAARQSDLFGLLQRHSLLPPYEGAEADASQQRHSILNTLDKQLAARWESSGGQTAADLPLYLLRKAALDAALEPFELGRVFYHLSQRRGYRSNRKEQASKKDTPGKAKKEDDLGVVEGDIKNLLEEMSRAHARTLGEYFASLDPHTQKVRRRWTGRKMYEDEFAAIWASQAAFHPVLLTEELHREIKHLLFYQRPIKAQAHLIGGCELEEGERRAAWATLEAQQFRVLQKVNDLEMILPGQVNGIPLTAEQRQTVLDLLEHSETASFDKIRKALKLDKNIGFNLQRGGETKLKGNLTNTHMAAVFAERWPEMPDADKMQIVEDWRTIPQDDSLIRRAIEHWKLDEPGAKWLAGKAAPSGYCMYSRKAIRKLLPLMATGMRLKAAENEIPEYRNRLTGGQAHDRIPPVRDTLKTLRNPAVERALTELRKVVNALIREHGKPAEVRIELARDLKKPRHERARATTQNRDREKERETMRKRIAAEFGEGFRPSRADVEKALLFEECGGECPYSGKRFPFSSLFGENSPWQVEHIIPFSRMPDDSFQNKTLCEVHENQYKANRTPREAYTDPQQYEAICNRVRNWKKPNLGKLKRFELRTTEEIEGFSSRQLNDTRYASKLACELVGSLYGGRDVAAADGKSRQVVFASSGMVTATLRRGWGLEGILREIAPAADADKKGKPRTDHRHHAIDAITIALSRPKLIAALSRANERDPYWPKTGRRFPRIDAPWKDFVDSIRPQIEQMLVSHRPEHRLTGAMHDETNYGRPRKEGGKDVVHIRKAVAGLPAGAIESIVDSAVREAVRAKAAEFGGSLEKWTPNEGKEDWPLLKTKAGKFVPIKRVRISKALGVETIAQGGRARNVALSSNHHVAIFALLDERGREKRWDSIALSLFDAMERKRKGQPLIQTSYPDAGNYVFKFSLMGGDTVLLHKECNHKENLCNPSVWRLRTIASNGQLCLMRVNDARLIKAVKDAGDWWSPRVDALRKLDATKVVIDSLGRIHQAGG

SEQ ID NO: 15672 - protein, 945 aa, unidentified
  REGION 1..945: note = Cas Enzyme sequence
SSQPEGILNSLGDPYALREKALDNSLTANELGRVLLHLVQRRGFLSNRKTLLGRDMLDDPDVLAVLGEHDESEDDAAEESAFKADISQLRESIREAGCRTLGEYLANKPKGACKRNRDGQHLRTDRQMYQEELSLILEQQSQHHPLLTSDVQEKIERIIFYQRPLKLKPDRVGKCSLEPKNKRAAIARLEYQRFRYLQDINNLSYLDPYTDEFHSLTQEDRQKLASLFEISDSLSFPAIRKALGLDKKVEFNLDSGVKKLRGNTTVATIRSEFSEWDSLSPGEHQMLVEDLLTIKKKSALKQRLMTRWKMDGGTAVRLCLQEFEPGYGSVSLKAIRRLLPHLEQGLIYSDARQAAGYSYDPEVMGVQVQEKLGPPPMLPNPIVSKALHELRRVMNALINEHGKPDIVRIEMARDLEMNTKRYNSFRKQQDKNTKSNDRATEAYQQIGKERPTLKLKVYPSREQKIRYRLWEDQGHCCAYSGRTINLGALFSGEVEVDHILPYSLSLDDSYMNKVVCFANENQRKGQRTPIDAFGLDEEKWNQITQAISRWGRELSSKRNRFYRREVELLERDFIGSQLTDTRYIAKEAGTYVKTLGVDVTFSRGIMTGWLRHQWQLNDLIGSSSEKERTDHRHHTIDALVTACIDRPLYNALVRQSKDLEKSGSGRTMKEIYLTPPILDIRQQLAEKLESLIVSHVPQRKITGALHEETGVGFIEGVGTVYRQRLDQEFNAKKVASIVDDGVRELVIAHLDKYGNDAKKAFSEGVQLLHKDGKTSIKRVRVVQSKTTREKLEKSKFAIRKADGVAFKWHAYGNTHHVEILRRRDGKGETASFFVTAMEAARRAREGVGKSASLVKIEHGDQWEFLMALHINDLVKVLVEGEQQVHRVQKLEMDASRITLRLHTAATIGGKSEGIRKSISTLINDYQMQPITVNAIGKYHHDQAHD

SEQ ID NO: 15673 - protein, 1036 aa, unidentified
  REGION 1..1036: note = Cas Enzyme sequence
MSKTILGLDLGSNSIGWALLTADDNGQPWGICDAGVRIFPKAVEEKTPTPKNVKRRTMRLARRTIQRRARRKMKLSNYLISLGLLPKELLESSQPEGILNSLGDPYALREKALDNSLTANELGRVLLHLVQRRGFLSNRKTLLGRDMLDDPDVLAVLGEHDESEDDAAEESAFKADISQLRESIREAGCRTLGEYLANKPKGACKRNRDGQHLRTDRQMYQEELSLILEQQSQHHPLLTSDVQEKIERIIFYQRPLKLKPDRVGKCSLEPKNKRAAIARLEYQRFRYLQDINNLSYLDPYTDEFHSLTQEDRQKLASLFEISDSLSFPAIRKALGLDKKVEFNLDSGVKKLRGNTTVATIRSEFSEWDSLSPGEHQMLVEDLLTIKKKSALKQRLMTRWKMDGGTAVRLCLQEFEPGYGSVSLKAIRRLLPHLEQGLIYSDARQAAGYSYDPEVMGVQVQEKLGPPPMLPNPIVSKALHELRRVMNALINEHGKPDIVRIEMARDLEMNTKRYNSFRKQQDKNTKSNDRATEAYQQIGKERPTLKLKVYPSREQKIRYRLWEDQGHCCAYSGRTINLGALFSGEVEVDHILPYSLSLDDSYMNKVVCFANENQRKGQRTPIDAFGLDEEKWNQITQAISRWGRELSSKRNRFYRREVELLERDFIGSQLTDTRYIAKEAGTYVKTLGVDVTFSRGIMTGWLRHQWQLNDLIGSSSEKERTDHRHHTIDALVTACIDRPLYNALVRQSKDLEKSGSGRTMKEIYLTPPILDIRQQLAEKLESLIVSHVPQRKITGALHEETGVGFIEGVGTVYRQRLDQEFNAKKVASIVDDGVRELVIAHLDKYGNDAKKAFSEGVQLLHKDGKTSIKRVRVVQSKTTREKLEKSKFAIRKADGVAFKWHAYGNTHHVEILRRRDGKGETASFFVTAMEAARRAREGVGKSASLVKIEHGDQWEFLMALHINDLVKVLVEGEQQVHRVQKLEMDASRITLRLHTAATIGGKSEGIRKSISTLINDYQMQPITVNAIGKYHHDQAHD

SEQ ID NO: 15674 - protein, 1026 aa, unidentified
  REGION 1..1026: note = Cas Enzyme sequence
MSKAILGIDLGSNSLGWALLSADDDGKPTDIIDTGVRIFPKAVEEKTPTPKNVKRRTSRLARRTIQRRARRKKKLMNYLVSLSLLPKTLLTDLQPEGILNSLGDPYLLRKKALDQDLSSHELGRVLLHLVQRRGFLSNKKTLLGRDMLDDPDVLAVLGEDDLDESDGAEETAFKADISLLRAEIRENGCRTLGEYLAKRPLHECKRNRLDEHIRTDRQMYLEELSLIFERQTKCHKALTEEVRGHIEHIIFYQRPLNLNKDRVGKCSLEPSKKRAAMARLEYQRFRYLQDVNNLSYFDPNTEEQIKLTEADKQKLYAFFETKESPTFPQIRKLIGLDKSCEMNLETQVKKMRGNTTAVKIQKCYTGWSDLSADKQEMFVEDLISIKKKSALKQRLMSYWKMTGVEAVQVCLLELEPGYGSLSLKALRKLLPHLEAGLIYSDARQAAGYGYEVEEVEAQDTLGLPPEIPNPIVSKGLGELRRVVNALIAEYGKPDVIRIEMARDLEMNTKRYKSFMAQQSKNTKSNDKASDAYKKIAQEHPKLQLSSYPSREQKIRYRLWLDQSHMCPYSCKQISLSALFSADIEVDHILPYSQSLNDSYMNKVVCFAKENQIKGQKTPKDAFGASTDKWEQITQAISRWPRELSSKRDAFYRTEGELLERDFIGNQLTDTRYISKEAGTYLKSLGSDVTFTRGAMTSWLRHQWKFNDLLGTTAEKERTDHRHHAIDAVVTACIDLSLYRSLVAQSNDLERSKSKLTMKDLYVTPPIIEFKDKLAQKLDSLIVSHVPQRKIAGALHEETGVGFIEGIGTVYRQRLDSDFDAKKADKIIDVTVRAIVLGQLNKHGGDPKKAFGDNNKVYHSDGKTLIKRVRVVQSKTTLKKLEENKFATRDRNGKAFKWHAYGNTHHVEILKNIKTGKYKGDFVTVAEAALRCRSKNTPIINKDHGEEWEYQMSLHVNDLVQLTVADDTEIYRIQKLNMVNAIVSLRLHTAATIRISAEGIEKSAGTLVKDYKMAPVLINSIGKLMND

SEQ ID NO: 15675 - protein, 1033 aa, unidentified
  REGION 1..1033: note = Cas Enzyme sequence
MILGLDLGSNSLGWALLRADDDGLAQQIHDAGVRIFPKAVEEKTPTPKNQKRRNSRLARRTIQRRARRKKKLLNCLVSLNLLPRALLDTSQPEGILNKLGDPYQLRSRALDHPLTATELGRVLLHLVQRRGFLSSRKTLLGRDMLDDPDVLAVLGEEDESEVDDTEESAFKADINQLRRDILEAGCRTLGEYLASKAEHACKRNRHDQHLRTDRQMYLDELALIFERQAPHHSVLTQETQDKIEHIIFHQRPLKLKKDRIGKCSLEPKSKRAAIARLEYQRFRYLQDINNLAYLDPYTDEYQTLSQEDRKKLTDLFEVSEAVTFAKLRKTLGLDKKVEFNLDSGVKKLRGNTTAVAIRSVFPEWDTFTQDQQYDLVEDLLTIKKRSALKRRLMSFWKTTGEIAVKLCLLELEPDYGSVSLKAIRRLLPHLELGLVYSDARQSAGYTYEMPDSKTLTQDKLGPPPELPNPIVNKALHELRRVVNAIIREHGKPDVVRIEMARDLEMNTRRYKSFRKQQEKNTKSNDRATEVYQQIGREFPKLKLSKYPAHDQKIRYRLWEDQGHCCAYSGRSINLATLFSGEVEVDHILPYSQSLDDSYMNKVVCFTSENRLKRQQTPIDAFGGNEEKWNQISQMISRWPRELASKRNRFYQRANDLLERDFIGNQLTDTRYIAREAGSYLRQLGVDVTYSRGIMTDWLRHQWQLNDLIGSTVEKERTDHRHHTIDAVVTACIDRPLYNTMVKQARDLERSGSGLTMKDIYITPPFVDIKQQLAQQLDALIVSHVPQRKITGGLHEETGVGFIEGVGTVYRQRLDQNFDLKKAEGIVDDTVRKLVIAHLEKWGGGAKKAFSGDFKLLHQDGKTPIKRVRVVQSKTTREKLEKSKFPIRNDEGIAFKWHAFGNTHHVEIVRHRRNKDKIDSHFVTAMEAAQRVRAMAGSRQQLIRTEHGEDWELLMVLHINDLVEVIVNGSPQIHRVQKMQMDTSQISLRLHTAATIKDQAEGIRKSIGTLTKDFQMRPISVNAIGKLRNDQAHS

SEQ ID NO: 15676 - protein, 1022 aa, unidentified
  REGION 1..1022: note = Cas Enzyme sequence
LSIYEGGRTLSKQSETILGLDVGTNSIGWALLEVRGEQLLSIKNCGVRIFPEGITRDNKGKETPLNQERRLARSMRRQTQRKTGRMRHLLLTLQKNNLLPLGELHDLESPLAILMKEDPYILRKKALYESIELHLFGRALYHLAQRRGFLSNRKSISQGEAKEKSVMKVSFSQTRKAMEEMHALTYGEFLANLNSHEQRRRGQYILRQWIEDEYEKIWCRQSVYYPEILTPELKESIKKIIFYQRPLKLVNHLIGNCQLEPHRKRAPMAFPAAQYFRMLQMINDTQIQYEGQTRKLAQEERSKLIEKLLQKNLKFNDARKVLKLPKSSSFNMENGSRKDFLGVSTIPKFIKIFGDKWEALTPEDKSQVFEDWWSYTNEEALIKRMQEKWQLPLEKAEKFAKLELESGYSAFSRKALSKLIPLLEEGLSLQTSIIKIYGEKPSQIGVDKLLPAENVRNPIVQRSLSEIRKVVNDLIKKHGKPEIIRIELARDLKRNIAQRQEIFNKQEQRRKQREKIAHKITQEIEIQYPLRRDIEKALLYDECKGICPYTGKSISFCDLFGAHPLFDVEHIIPFSRCLDNSFNNKTLCFVDENRNIKENSTPWEIYGHDPENWQEIIQRVEKFGNFEKLRRFKLKDVFNGGDNSAWDEFASQQLNDTRYITRFATRYLSQLYYSDSKLHVQPIRSGRITAFLRNAWGLNNILGDGIKNRNDHRHHVIDAITIGLTTSSTIKDLSMASKRSFRSGSFDSDSFPKPCNDFFNTVKKSIDKIIVSHRVSHKINGPLHKEKMYGFIESDTHGEPVKAVIRKPIETLSINEVEKIVDPVVKKAVKEKLRESSYKEPSNAFAVKENHPLLFSKNGTQTPIHKVRVFQNDKPKTIGRKQNKRNVLTSNNHHLELYLSKSHRGKETFQGKVVTNLEMMQSLAKLKKRNSQQSLYPSHDENGNPLAMVLFKGDMVKVTWNKKDVICVIQSISKGDIEMRLHNDARPNKERKKERIRFRSFPSLYDANIKKIHISPTGFIHE

SEQ ID NO: 15677 - protein, 1080 aa, unidentified
  REGION 1..1080: note = Cas Enzyme sequence
MTENPPQDFILGIDLGSNSLGWALIERTNGEPSGLLRAGARVFEAGTEGDRGSGQEESRNRARREARLQRRQLWRRARRQRKVFHLLQGCGLLPPGGATDEARQNLLNELDRTILASGWFRAKAASGAFPAPAQAMPYVLRAAALDEKLEPHFLGRALYHLAQRRGFLSNRLKPAKKDDDEGVVKEGINKLRQEMGEARARTLGEYLAHLPTSEQRLRGRWTHRDMYNEEFDALWDAQARHHPDLLSEESRKELFQTMFFQRPLRFDPAVIGHCELEPDQARAARYLLISQRFRLLQVVNNLKLYPPLEGERDLTPQERQKLVEALEVQGDQTVAAVRKLLALKRAVAFNLERGGEKSLKGNRTAAEFFAVFGERWLSMSAEERDDAVQYVYSFEKADKLKEAAKRRWGLDEQSAEKLSEVTFEPDHMNLSRRAMEKLLPLLERGVTYAAARHQLYPEQFRAAEPLPELPPIECATDADPLRKWAEQRKIAPKAGRLPDPVGAIRSPGVMRSLTELRKVVNAIIRQHGKPAEIHIELARDLKKPKTQRQSLSERMRRNEAERKQAAKRIFDEVGIKEPKADDIRKVQLAEECGWKCPYSGRAISMRRLVGPESEFQIEHIIPFSRSLDSSFVNLTLCHVEENKNKSNRTPYEACSGDSDRYEQILERVRQFKGDRALVAVKLRRFQMTPEQVAEFLGDFTSRQLTDTAYASKLAKRYLSLLYGGLADEAHEQRVFASPGKATAYLRNEWKLNSILEDGPTAAGGRFPKERTDHRHHAVDAVAIALTSPATVNALSDAAQRAPLERRRRFASLEAPWDGFVDSVRNVVDSIVVSHRVSKKASGALHEETIYSAKGDGEGRRRTRKHLSQLTRSEVEQIADERVKRKVMEKLGDGDPKKVFSNPENLPRFETSDGRRIPIKRVRLSKAVPTFGLGEGRTERHVTSESNHHMEVFAELDENGNEVEWDGAVVSMAEAYRRVRLREPVVRRDFGPHRKFIFSLAPTETIECQDKSGGRSLFVVRKMSRLSSGQLQVGLAPVSDARKAKEMQTSRAWLWVTPDTLRERSPRKVLVSPLGEVEEAH

SEQ ID NO: 15678 - protein, 948 aa, unidentified
  REGION 1..948: note = Cas Enzyme sequence
RALLNGLKGRQSASDYSQSEQLLPYVLRKEALERKLEAHELGRVLYHLCQRRGFKSNRREGGGKDKEEELGKVKQDISTLRREMGDKTLGAYFAGIDPHVRKVRQRWTARDMFETEFELIWERQSQEWPELLSAQLKAKVARLLYFQRPIAKQEHLIGHCELEKKERRAPWASLDAQRFRLLQKVNDLKIIPAGSFDEVCLTSEQRQLLLEYLEVHGGITFGDLKKLLGLPPRTHFNLERGGEKSMPGNRTNAHMIAVFGEQWRELAAESKNEIVEMWRWVESEEKLARYGQERWALDEHTAKLFAGKRAEDKYCNLSLAAIRKLRPLMEEGVAFMTAREALYPEQREEPRKLLPLVRVAVPELRNPAVERALTEVRKVVNAILRKYGKPYSIRIEMARELRKPRKEREAAAKRMRQNEKERIAVKARILKEAGLPNPSRDDIERARLWEECGGICPYTGRTIEFSSLFGRESQFDIEHIIPLSRCVDDSFGNKTLCYHEENRHVKRNQTPWEAYGGEEERWDGILQRVKAWKVGTTAAKLRRFELKSTEELEGFAARQMNDTRYTTRLAIDLLRTLYGGLHVAEADGSTRQAIFASSGSVTATLRKVWGLEGILREALPSANGENHGKPRTDHRHHAIDAIAIALSSSSTIQRMNAYAATATARDAGTRVFRGLQSPWPDFVDSIRPRILAMRVSHRPEHKMSGALHNDTLYGRPYVLDGKSLVHLRRSVKGIKPDQIANIVDPAVRAAVERRLAEHGGDVGKFNPEVPESLPYLESKRGKIPIKKVRVKETKKGLLALRNNRFVESGDIHHFELFVQRDENRRESWTHVPVSLMEASLRNAANRRNGHAVAVVSQELKDDPEAEFLFSLMKGDIVEVDYEGGRDLFRVKKFYAAGRTWFSHVNNAQKDADQKRDGTCWAKPPNGLMQLNARKVTIDLLGKVHPVHD

SEQ ID NO: 15679 - protein, 1070 aa, unidentified
  REGION 1..1070: note = Cas Enzyme sequence
MTEEVAVRKYTLGLDLGSASIGWALIGLDAEYSPCSLLHTGVRIFEPGVEGSIENGQDESKALARRTARLQRRQLRRRAARQRELFRLLQTEGLLPANDPAIEDYSLQRHAILNQLDKELLKKHTARQTPAEAIQPEQLLPYVLRKEALDRKLEAHELGRVLYHLCQRRGFKSNRREGGGKDKEEELGKVKQGISELSCAIATSGSRTLGEYFAGLDPHLCRIRKRWTARKMFEDEFAKIWERQAAFCPERLTASLRDKVAQLLYFQRPIDKQEHLIGHCELEKEERRAPMASLEAQRFRLLQKVNDLRIIPAGSFNEEELTTEQRRTVLDLLETQGRVEFTNLRKLFDLPRLTHFNLERGGEKSLPGNRTNAHMLEVFGETWREFAPEEKSKIVELWRSEESEEKLTQEGIERWALDGQAAKLFAKVQPEDKYCNLSLKAIRRVLPLMEQGVAFATAREQFYPAKPEKPCERIPLVRNVITELRNPAVERALTEVRKVVNAIVREYGKPYEIRIEMARELRKSRKEREETSKRIRQREKERAAIKSRILSEAGLQNPSRTDIEKALLHEECGGVCPYTGKSIEFSSLFGGESQFDIEHIIPLSRCPDDSFLNKTLCYHEENRNVKRGRTPWEAYGSDEQNWNAIIQRVRSWKPGNLAKLRRFELKSDAELNGFTERQMNDTRYTTRLAVDLLKTLYGGLDVPRGDGSNRRVIFATTGMVTATLRKVWHLEGILREAVPSANGENKGKPRTDHRHHAVDAIAIALSSPREVQLMSIYASQSSSWEAGARAFRGLQAPWPDFVDSIRPHILDMRVSHRPEHKMSGALHDETNYGRQRTEGKKKFVHIRKAIVSLSAKDVENIVDPAIRMAVLNKHNALGGDLKRCETANDWPVLLAKDGHKIPIRKARIRKSLEITAIARGPKERFVALSNNHHVAIFAHVNDKGKEDRWEGIITSLFEATQRQKQGLPVIPRSYPNAEDYVFKFSLMGGDLVELHRDCDHAANKCEPQIYCVRTIATNGQLSLVAVNDARLKALIQDEKQWWSPRCDPLRKLDCRKVTIDLLGRVHPVND

SEQ ID NO: 15680 - protein, 1080 aa, unidentified
  REGION 1..1080: note = Cas Enzyme sequence
VRSAATVGDGARAGLRYVLGLDLGVASVGWAVVRLGEDGAPAGIIRMGTHLFEAGIDAGKSTPEAALAAGKEASRATPRRLARQQRRQTWRRAARKRRLLRTLQRYGLLPEGDTRDGAAIDAYMKALDAGLRETWNEGADHRTHQILPYRLRAAALERRLEPYEVGRALYHLAQRRGFLSNRKTDRGDEDQEAGKVKQGIADLAAAMERAGAPTLGAYFASLDPTNPEERRIRERWTDRRMYVKEFEAIWGAQAEHHPELMTEEAREAVRCAIFFQRPLKSQRHLIGRCRLIPSRRRCAVADRAYQRLRLLQKVNDLRYVDTATGEERGLTPEQRAALIQLLEAGDVPFSALKRTRGGLGLPKSVEFNLERGGEKKIVGHRTDEKLRKVFGEERWGRLSEADRAELVEDVLTIENPDALERRGRERWGLPADAAVELARVRLEGGYAPFSRRAILRLLPHLERGVPLQTAIKEEFPASFEAAEAMDLLPPVIGTGPGGEGGAFRDPPSPAVTRGLSELRKVVNAIIRRWGKPERIHLEMARDLKKGRKQREEAAREMRAREKEREEAKRKLLEEAGIEHPSREDIEKVLLAEECGWTCPFTGRCFEMRDLVGPTPSVDVEHIWPFRRSLDNTFLNKTLCLHEENRHRKRDRTPFEAYGADPQRYGEILQRVARFKGGARREKLRRFAATEIDEGFTERHLAETRYVSRKAAEYLALLYGGLWDADGTRRVQVSTGGLTAWLRRNWGIDGLVGAADGEGGKARDDHRHHAVDALVVALSDARAVKRLSEAARAAAENGGGRLLAEVERPWEGFERDAREAVASVVVSHRADRRVSGALHKDTIFSRPIRGVGTSGEGGHRLRKALHKLSRDEVEAIADPRIRDLVRAALESRGGGDPAKVFADPAAAPVLEYGDGRRVRVRKVRVDRRERPRAFGQGGGRRYVAPQSNHHTVILARVGPDGRDVEWRDEPVPLWEAYERIRRGEPVVDTRDREDGWVFRFSLVVNEYIEMDRKDGGGRGVYRILNISGGDMEIREHFDGRTRQAIRAAGSSPERVSGSSLLRRNARKVRVTHLGEVVRAGG

SEQ ID NO: 15681 - protein, 1031 aa, unidentified
  REGION 1..1031: note = Cas Enzyme sequence
LDIGAKSIGWALIQGPESGKPKIIGLGVRIFEAGVDGDIEAGQDSSRAAARRNARQMRRQTFRRVQRKRKLFSLLQSAGFLPATADTLAVARDKALKEIDQRLLATLGKTYGSAGATARKLPYVLRAEALQRPLSAEELGRAIYHFGERRGFKANRRTDRQSETTGVVYEGIAEIQRQKGEKTLGQYFADLDPTHDRIRGCYLGRADYEEEFNRVFDAQQSHHAALTPKLRRRLRRCIFWQRPLKSQKALVGRCSLLTNRRRCPMAHPIAQEFRLLQAVNHLSLFDADGQMRLLTNAERLKLLAALRTDGDITFTQVRKLLGLKKKDSRFNLEEGGEKKLPGNRTGRSMTDAIGDDWAKLSPDQQALLVGIVRGSPDAASLRGQIGKSFPSLLPRCDTLDKVALEDKPAAHCKRVLADLVDRMKDGIPYATARADFEATHNLGMPTDPVDQLPPVRTALPGITNPAVIRAMTELRKVVNEIVRVYGKPDMVRIELARDLKKPRRIRQLLSERMRAREGERSVASQNLKSVGITNPSRADVEKILLAEECGWVCPYTGKSFGMADLVGSHAKVDVEHIFPRRYLDDSFANKTLCFAAENRAVKKDRLPFEAYSGDETRYREILDRVRTFQSGVRDEKLRRFMANGVEEGFASRQLIDTAFASREAAKFVGLLYGGIVDIRSDKRVRTSTGKLSALLRGAWKLNSILGTDSSPKGRDVDHRHHAVDAIVVALSSDAIIKSVSDAAGKYAGRSSGRWHVDVPDQDGLLEQAACEVKKVVVSHRVDRKLAGRLHEDSIYSPPRADGAGGAYHVIRKPLQRLSPADITGDKIVDPRVRRLVQEQYAKLCHAIGKTKPSDLFTDDTRLPRLPNRNGPPVPVRKVRLRVRDKAIRIGDAEHRARHIMRDADGLHHTVIIATRKCERETWEEAPTSRLEVQDRKRRGEPVVRTDWGPDCGFVLHLCKGDSLELDTPDGARAVYVVRGVAGTDIAVVQTWDASRENRTSETRIRSPNKLKERHPRPVVVTPAGRVFPRGG

SEQ ID NO: 15682 - protein, 910 aa, unidentified
  REGION 1..910: note = Cas Enzyme sequence
ALDEKLPLHELGRALYHLAQRRGFLSNRKAAPKKEENKGVVERDIAKITVAMQETEARTLGEYFSRLDPQQERIRGRWTSRKMYEDEFERLWAAQAPHHPDRLTSDLKKKVKRAIFYQRPLKVQKDLVGECEFESGRKRAPMAVLCAQRFRVLQQVNNTRVLAPDGVERGLTPEQAGTLLDALETQGDVKFAKAKKLLKLSPQHVFKFESGGEDKFIGNRTAAKLIGVFGLDRWKGFTLAQRERVVDDLLTIQKPETLGRRGQSFWGLDAEAADNFARVRLEDTHCRLSRLAIENLLPLMERGMSYMTAAREIYGERPAPPPVDLLPAVGEAMPALRNPAVQRALTELRKVVNAVVRKYGKPAAIRVELARDLRKNRKQREQTWKQNRENEGLRLDAARRLLEEMHMQGPKRSDIEKMLLYQECACQCPYTGRHISMRDLFGDAPQFDVEHIIPFSRSLDDSFLNKTLCEVAENRNVKGNKTPWEAYGHNPQRWSEIIQRVSGFQGNAVREKLRRFQIQSVQELDQFTSNQLNDTRYASVEAVKFLKLLYGEEAQRRTIVQAARGGTTRFLREEFGLNQILGDGGEKSRDDHRHHAVDAVCIALTDPATVKMLSDAAARARSERRRRFAPVPFPWGGFVDHVRAAIAGINVSFRVSRKVGGALHEETFYSPPKKDPATGRECVHVRKPVSALSEQRIENIVDPAVRAAVQAKLKQVGGDPRKLADNPPKLKAKDGREIPIRKVRVREYITTFGIGQGGNRQVVTDTNHHVEIVETRVKAGQAKWEGHVVSQYEALRRLRAKEPVIRREHGEGRMFMFSLALGETVQMRGDDGQVGLFKVTGVSVTSGAHVDLEFRAIADARPASRLRKEQKENPKLKGWRVRRTPDSVRQSSAQKVLVTPLGELRRVGRD

SEQ ID NO: 15683 - protein, 1065 aa, unidentified
  REGION 1..1065: note = Cas Enzyme sequence
MSTPATPYVLGIDLGANSVGWAILGLDKNSNEYRALAQYGVRAFEAGVEGDIEKGKDESRAIARRDARSARRRLERLARRLNKVFFILQDAGLLPSGGERQRLPQNATAKERRAIRKAKSLERHKILEPFDAQLSKQWQEKLRSEGASAAKVSLVPHLLPYILRARALDGKLSPHELGRALYHLSQRRGFLSNKKSLKKDKEEGEVKSSIAELAQKMQESGARTLGEYFSTLDPHDKRIRKRWTSRLALLDEFEKIWSGQQPHHPTILTEELKKKLHKAIFHQRPLKIQKHLIGACELEPDRKRAPLALLAAQRFRLLQMVNDTRVITPYGELVEFTPDQRKILLDALETEGDVTFAKAKKLLKIKGHRFNWEEGEEKRFIGNRTAAKLADVFGERWKAFSAADRDRIVEDIRSIQKDEVLARRGKKAWGLDDEAAGKFASLALEEGYCGLSRQALEKILPLMEKGVAKQTAAKEIYGDRPAPEAVDALPPVHDALPELRNPAVERALTELRKVVNAVVRKYGKPATIRIELARDLRKSREQRKQFAQKMDDNRKDREKAAEKIIREMNLGGASPKRADVDKVLLWEECGGRCPYTGKSITMSALLGSTPQFDVEHIVPFSRSLDDSFMNKTLCDIEENRNRKKNHTPYEAYGSIPERWNEIIQRVKGFTGRAAHEKLRRFQLKEITDDFASNQLNDTRYASKLAKKYLGLLYGEDAPSRVQAGRGGVTAFLRNEWDLNSILNDGGTKTREDHRHHAVDAVVIALTEPNTLKMLSEAAVNAAREGRRRFGKISEPWPGFNGDVRKAIDSLVVSHRVSRKISGPLHEESNYSPPRKDANGNGYVVIRKPLEALTKNEAEDIVDPTVKKLVFEILAARGGDPKKAFQSAADHPFLTASDGRKIPIHKVRVRKNISPFPVGGVGRQRHVTNDSNHHAEIIEVIDKKGNTKWDARIISLFEAMRRHKAGEPIVKRDHGDGKKFIFSLGGGEIIQLDATDGGRGLCRIRTISADRDGYVTVEYVSLNDARKKDDIKRTKDWKKIAMEPLRKLHCRKVVVTPLGEVRTAND

SEQ ID NO: 15684 - protein, 1055 aa, unidentified
  REGION 1..1055: note = Cas Enzyme sequence
MILGLDLGETSVGWALLRASDGTPDGLVDAGVRVFESAMEGDYDSGRAEPRNAERRLARSRRRLTERRARRMRKLRHILTRAGLLPEMDESDLAAAFASLDKSLMSALPQACDVRDLNREACDRLRHVFHYRLRANALDRKIEPFELGRAIYHLAQRRGFLSNRKSLPKEGEKPGLVKEEIETLKAKMAAVNSRTLGEYFSTKARPYERRIRNWHTSRKMHEEEFEKIWTAQAAYYTDILSDDLKAAIHGAIFYQRPLKSVRGLIGKCRFERGRRRAARANPEFQRFRILQTLANTDVDPEGIIRPLTDDERATLLSILNLETPEALKILTKKGELNLKKAIKLLGLDKTTEFQEQRTGEKHFIANTTYFRLATVFGACWWKLTEDDRNGVVQDVMSIQKPEVLEKRGREVWGLDKEKARELASVRLEQDYASLSTKAIRKLAPLLERGIRYGTAVKEVYPDTFEAGKAVDHLPPVAKVLSDLRNPVVTRVLTETRKVVNAIIAKYGKPDIIRIELARSLKNPAKRRAEITQRNRRNRKAREAAAERIAKEAGIQEPTRHDALKVVLAEECNWTCPYSGRRITMSALLGEHSQFDVEHIIPFSRSLNNSYMNKTLCHREENAFKGNRTPFEAYGSDNERWREILERVKRFKGEARAAKLRIFQTESFADLQDEEGFGEFARRQLNDTAYASRLAREYLALLYGGYADADGRLRVTTSSGHATAYLRNEWGLNAILGDGGEKERGDHRHHAIDAAVVALADAGKIKRLSAAAARAQEAKRYRRFAPMEPPWEDFFDDLKEKVDDIVVSHRVSRRVNGPLHADTFYSRATVDDEGRECVRVRKPLAALSANDVESIVDDAVREAVKLKLWEVGGDPKEVFSNPANLPVAKNGTTVKSVRIWQHVNPFTIGEGPRERRVLTKSNHHIEILEVDDGKGGVKWDAEMVTRFEAMRRLKAGEPIVKKDHGDGKRFVCSLSPGECFKLKTNGDVWCINIVRTISRERGGYVTVEYVTISDARLKKDIKNSKDWKKISPNSMRESGFEKITITPLGEVRRAND

SEQ ID NO: 15685 - protein, 1095 aa, unidentified
  REGION 1..1095: note = Cas Enzyme sequence
MTNPQLIRQRYALGIDLGSASLGWAAIVLGEDGAPTELLRTGVRIFDPAVSGDIEKGQDESNAVARRAARLVRRQLRRRAARQRELFKLLQRNGLLPLYNGEEPDGSQQRHSILNRLDREISAKWIAAGGNAAHVATELPLYLLRKAALDDRLEPFEIGRVFYHLSQRRGYKSNRKEKAAKQDTTRKAKKEDDLGQVEGDISELENAMRLANARTLGEYFASLDPHTQKVRRRWTGRKMYEDEFAKIWEKQSSYFPELLTEELHQELTRLLFYQRPIRAQSHLIGGCELEPGERRAAWATLEAQEFRVLQKVNDLEFVFPGQVAGVPPTAEQRQVVIDLLQNSAEATFKKIRKELGLPENIEFNLQRGGETKLKGNLTSSLMTAVFGERWATMSDDDRKQVVEDWRTIDAEDSFIRRAIEHWKLDEAGAKWLAEHPAPSGYCLISRKAIRKLIPLMRQGHRYKEAENAIYGNRFSGGRVYDRIPPVREALKTLRNPAIERSLTELRKVVNALIRDLGAKPEEVRIELARDLKKPRKERAEAAARNRARGKERDSAKAKLLRELGPGFEFPSRADIEKALLHEECGGVCPYTGRHIEFASLFGQNPQFDVEHIIPFSRIPDDSFQNKTLCYHEENRHVKRNQTPFEAYKDLEQYEAILNRVRSWPKRNLGKQARFELKTTEQLEGFSSRQLNDTRYSSKLACQLIGTLYGGRDIQTESGMSQVVFASSGMVTATLRRGWGLEAILREPGPSANGLNKGKPRTDHRHHAIDAITIALSRPSLIAALSRANAQDPYWPNNGRTAPKLQVPWKNFGSSIRPHIEQLLVSHRPEHRLTGQLHKETLYGHPYKEHGKDVVHIRVPVAGKNRGEGLSAADIKDIVDPAVREAIQAKAAEFGGDLKNWTPNETQSDWPQLKTKTGKSIPIKRVRIKDYRSVDAIAEGERERFVTLSSNHHVAVFALMDEKDREVRWDSVPVSLYEAMQRQEAIRKGRLQEPLIATRHPDGDDFQFKFSLMGGDTLLIHKDCNHKENVCTPSVWRLRTIATNGQMSFVRINDARLKTDIQKAQEWWSPRADALRKLDAIKVVVDTLGRLHESRG

SEQ ID NO: 15686 - protein, 1081 aa, unidentified
  REGION 1..1081: note = Cas Enzyme sequence
MSESGSLAQDYVLGIDLGSASLGWAVVGLDETGMAAGLLRAGVRLFDPAVTGDIEKGQDESNAVARRAARLIRRQLRRRAARQSELFRLLQVHGLLPGYEGAEADASQQRHAILNTLDLELAAKWARPGTAGAKAAIELPLYLLRKTALDSVLDPFKLGRVFYHLSQRRGYRSNRKEQRDGKKASGKAKKADDLGAVEGGIKELEDAMRSAGARTLGEYFASLDPHAQKVRGRWTGRKMYEEEFAAIWTKQATFHPALLTEELHHQIKHLLFYQRPIKAQAHLIGGCELEPGERRAAWATLEAQQFRILQKVNDLEVILPGNVTGVPLTREQRQTVLDLLENSAEVTFKKIRKALGLAENIGFNLQRGGETRLKGNLTNTLMVEAFAERWPDMSDADKKQVVEDWRTIEQEESLIRRTIEHWKLDEAGAEWLASRPAPSGYCSISRKAIRKLLPLMMEGKRFKEVEKEVYGNRLTGGQVYDRIPPVRQALKTLRNPAVERALTELRKVVNALVREYGKPTEVRIELARDLKKPRHERAKAIGQNRDREKQRNAAKGRMLQELGPGFEHPSRADVEKALLWEECQGECPYTGKRFPFSSLFGENPPLQVEHIIPFSRIPDDSFQNKTLCYHEENQRKGNRTPFEAYTDPLEYEAILNRVRNWRTPNPGKQRRFELRTLEELAGFSERQLNDTRYASKLACELVGTLYGGRDIQTETGSRQVVFASSGMVTATLRKGWGLEAILRDAAPSANGQNRGKPRTDHRHHAIDAITTALSRPKMIAALSRNNAQDPYWPRNGRTAPKIQSPWKDFVDSIRPNFEQMLVSHRPEHRLTGALHDETNYGRPRNEGGKDVVHIRKQVVGLSAGDIENIVDPVVREAVEAKAAQLGGDLKKWTPSEGSEDWPLLKTKTGRQVPIKRVRIKKSLGVETIGKEERTRYVALSSNHHVAIFALLDEQGREKRWESEIVSLLTAMERRRQHLPVIQTRLAAVPEAAFKFSLMWGDTLLLHKDCEHAKNICKPSFWRVRSIWEQGTLTLVRINDARQLNEIRGAKDWLLPSPDTLRKLDAVKVVIDSLGRIHQAGA

SEQ ID NO: 15687 - protein, 998 aa, unidentified
  REGION 1..998: note = Cas Enzyme sequence
SELFRLLQVHGLLPGYEGAEADASQQRHAILNTLDLELAAKWARPGTAGAKAAIELPLYLLRKTALDSVLDPFKLGRVFYHLSQRRGYRSNRKEQRDGKKASGKAKKADDLGAVEGGIKELEDAMRSAGARTLGEYFASLDPHAQKVRGRWTGRKMYEEEFAAIWTKQATFHPALLTEELHHQIKHLLFYQRPIKAQAHLIGGCELEPGERRAAWATLEAQQFRILQKVNDLEVILPGNVTGVPLTREQRQTVLDLLENSAEVTFKKIRKALGLAENIGFNLQRGGETRLKGNLTNTLMVEAFAERWPDMSDADKKQVVEDWRTIEQEESLIRRTIEHWKLDEAGAEWLASRPAPSGYCSISRKAIRKLLPLMMEGKRFKEVEKEVYGNRLTGGQVYDRIPPVRQALKTLRNPAVERALTELRKVVNALVREYGKPTEVRIELARDLKKPRHERAKAIGQNRDREKQRNAAKGRMLQELGPGFEHPSRADVEKALLWEECQGECPYTGKRFPFSSLFGENPPLQVEHIIPFSRIPDDSFQNKTLCYHEENQRKGNRTPFEAYTDPLEYEAILNRVRNWRTPNPGKQRRFELRTLEELAGFSERQLNDTRYASKLACELVGTLYGGRDIQTETGSRQVVFASSGMVTATLRKGWGLEAILRDAAPSANGQNRGKPRTDHRHHAIDAITIALSRPKMIAALSRNNAQDPYWPRNGRTAPKIQSPWKDFVDSIRPNFEQMLVSHRPEHRLTGALHDETNYGRPRNEGGKDVVHIRKQVVGLSAGDIENIVDPVVREAVEAKAAQLGGDLKKWTPSEGSEDWPLLKTKTGRQVPIKRVRIKKSLGVETIGKEERTRYVALSSNHHVAIFALLDEQGREKRWESEIVSLLTAMERRRQHLPVIQTRLAAVPEAAFKFSLMWGDTLLLHKDCEHAKNICKPSFWRVRSIWEQGTLTLVRINDARQLNEIRGAKDWLLPSPDTLRKLDAVKVVIDSLGRIHQAGA

SEQ ID NO: 15688 - protein, 1080 aa, unidentified
  REGION 1..1080: note = Cas Enzyme sequence
MSESGSLAQDYVLGIDLGSASLGWAVVGLDETGMAAGLLRAGVRLFDPAVTGDIEKGQDESNAVARRAARLIRRQLRRRAARQSELFRLLQVHGLLPGYEGAEADASQQRHAILNTLDLELAAKWARPGTAGAKAAIELPLYLLRKTALDSVLDPFKLGRVFYHLSQRRGYRSNRKEQRDGKKASGKAKKADDLGAVEGGIKELEDAMRSAGARTLGEYFASLDPHAQKVRGRWTGRKMYEEEFAAIWTKQATFHPALLTEELHHQIKHLLFYQRPIKAQAHLIGGCELEPGERRAAWATLEAQQFRILQKVNDLEVILPGNVTGVPLTREQRQTVLDLLENSAEVTFKKIRKALGLAENIGFNLQRGGETRLKGNLTNTLMVEAFAERWPDMSDADKKQVVEDWRTIEQEESLIRRTIEHWKLDEAGAEWLASRPAPSGYCSISRKAIRKLLPLMMEGKRFKEVEKEVYGNRLTGGQVYDRIPPVRQALKTLRNPAVERALTELRKVVNALVREYGKPTEVRIELARDLKKPRHERAKAIGQNRDREKQRNAAKGRMLQELGPGFEHPSRADVEKALLWEECQGECPYTGKRFPFSSLFGENPPLQVEHIIPFSRIPDDSFQNKTLCYHEENQRKGNRTPFEAYTDPLEYEAILNRVRNWRTPNPGKQRRFELRTLEELAGFSERQLNDTRYASKLACELVGTLYGGRDIQTETGSRQVVFASSGMVTATLRKGWGLEAILRDAAPSANGQNRGKPRTDHRHHAIDAITIALSRPKMIAALSRNNAQDPYWPRNGRTAPKIQSPWKDFVDSIRPNFEQMLVSHRPEHRLTGALHDETNYGRPRNEGGKDVVHIRKQVVGLSAGDIENIVDPVVREAVEAKAAQLGGDLKKWTPSEGSEDWPLLKTKTGRQVPIKRVRIKKSLGVETIGKEERTRYVALSSNHHVAIFALLDEQGREKRWESEIVSLLTAMERRRQHLPVIQTRLAAVPEAAFKFSLMWGDTLLLHKDCEHAKNICKPSFWRVRSIWEQGTLTLVRINDARQLNEIRGAKDWLLPSPDTLRKLDAVKVVIDSLGRIHQAG

SEQ ID NO: 15689 - protein, 1080 aa, unidentified
  REGION 1..1080: note = Cas Enzyme sequence
MSESGSLAHDYVLGIDLGSASLGWAAIRLDSTGMAAGLLRAGVRLFDPAVSGDIEKGQDESNAVARRTARLIRRQLRRRAARQSELFRLLQSHTLLPGYEGAEADASQQRHAILNALDLELAAKWTKLGGAGAQVAIELPLYLLRKTALDAALDPFELGRVFYHLSQRRGYKSNRREQTEDKKATGKAKKAEDLGAVEGGIRDLEEAMLSSGARTLGEYFAALDPHAQKIRGRWTARKMYEEEFAAIWTKQAIFHPALLTEELHHQIKHLLFYQRPIKAQSHLIGGCELEPGERRAAWATLEAQQFRVQQKVNDLEIILPGNVTGIPLTSEQRKVVLDLLEHSSEATFKKIRKALGLAENIGFNLQRGGETRLKGNLTNTLMAEAFAERWHEMSDEDKKQVVEDWRNIDLEESLIRRAIEHWKLDEAGAKWLAQKPAPSGYCMYSRKAIIKLLPLMVTGMRFKAAEKEVYGNRLTGGEVHDRIPPVRDALKTLRNPAVERALTELRKVVNALIREYGKPTEVRIELARDLKKPRHERAQAITYNRNREKQRNTAKEKMLKEMGSGFQHPSRADVEKALLWDECQGECPYTGKRFPFSSLFGENPPLQVEHIIPFSRIPDDSFQNKTLCYHEENQHKGNRTPFEAYTDPVQYEAILNRVRNWRTPNPGKQRRFELRTLDELEGFSERQLNDTRYASKLACELVGTLYGGRDIKTDTGSRQVVFASSGMVTATLRKGWGLEAILREAAPSANGQNRGKPRTDHRHHAIDAITIALSRPKMIAALSRNNAQDQNWPWNGRSAPRIQSPWKDFVDSIRPHFEQMQVSHRPEHRLTGALHDETNYGKPRKDGGKDIVHIRKQIVGMSAGDIENIVDPAVREVVRAKASSFGGDLKKWTPKEGSEDWPQLETKSGKYIPVKRVRIKKALGVETIGKGERTRNVALSSNHHVAIFALLDERGRERRWESEVVSLMAAMERKRQLKPIIQTKSASIPDSIFKLSLMWGDTLLIHKDCEHSKNICKPSFWRVRSIWEQGTLTLVRINDARQLNEIRAAKDWLLPSADTLRKLDSVKVVIDSLGRIHEAG

SEQ ID NO: 15690 - protein, 1080 aa, unidentified
  REGION 1..1080: note = Cas Enzyme sequence
MSESGSLAQDYVLGIDLGSASLGWAVVGLDETGMAAGLLRAGVRLFDPAVTGDIEKGQDESNAVARRAARLIRRQLRRRAARQSELFRLLQVHGLLPGYEGAEADASQQRHAILNTLDLELAAKWARPGTAGAKAAIELPLYLLRKTALDSVLDPFELGRVFYHLSQRRGYRSNRKEQRDGKKASGKAKKADDLGAVEGGIKELEDAMRSAGARTLGEYFASLDPHAQKVRGRWTGRKMYEEEFAAIWTKQATFHPALLTEELHHQIKHLLFYQRPIKAQAHLIGGCELEPGERRAAWATLEAQQFRILQKVNDLEVILPGNVTGVPLTREQRQTVLDLLENSAEVTFKKIRKALGLAENIGFNLQRGGETRLKGNLTNTLMVEAFAERWPDMSDADKKQVVEDWRTIEQEESLIRRTIEHWKLDEAGAEWLASRPAPSGYCSISRKAIRKLLPLMMEGKRFKEVEKEVYGNRLTGGQVYDRIPPVRQALKTLRNPAVERALTELRKVVNALVREYGKPTEVRIELARDLKKPRHERAKAIGQNRDREKQRNAAKGRMLQELGPGFEHPSRADVEKALLWEECQGECPYTGKRFPFSSLFGENPPLQVEHIIPFSRIPDDSFQNKTLCYHEENQRKGNRTPFEAYTDPLEYEAILNRVRNWRTPNPGKQRRFELRTLEELAGFSERQLNDTRYASKLACELVGTLYGGRDIQTETGSRQVVFASSGMVTATLRKGWGLEAILRDAAPSANGQNRGKPRTDHRHHAIDAITIALSRPKMIAALSRNNAQDPYWPRNGRTAPKIQSPWKDFVDSIRPNFEQMLVSHRPEHRLTGALHDETNYGRPRNEGGKDVVHIRKQVVGLSAGDIENIVDPVVREAVEAKAAQLGGDLKKWTPSEGSEDWPLLKTKTGRQVPIKRVRIKKSLGVETIGKEERTRYVALSSNHHVAIFALLDEQGREKRWESEIVSLLTAMERRRQHLPVIQTRLAAVPEAAFKFSLMWGDTLLLHKDCEHAKNICKPSFWRVRSIWEQGTLTLVRINDARQLNEIRGAKDWLLPSPDTLRKLDAVKVVIDSLGRIHQAG

SEQ ID NO: 15691 - protein, 1048 aa, unidentified
  REGION 1..1048: note = Cas Enzyme sequence
MATGLLRSGVRLFNPAVTGDIEKGQDESNAVARRTARLIRRQLRRRAARQSELFQLLQRYTLLPPYKGAEADASQQRHSILNALDQELTAKWVKPGNAGAQAAIELPLYLLRKTALDAALEPFELGRVFYHLSQRRGYRSNRKDQASDKGTPGKAKKADDLGAVQGGIKELEDAIRSSGTRTLGEYFTSLDPHSQKVRGRWTARRMYEEEFAAIWAKQVTFHPALLTEELHYKIKHLLFYQRPIKAQSHLIGDCELEPGERRAAWATLEAQQFRVLQKVNDLEIILPGNVTGIPLTPEQRQTVLNLLESSSEATFKKIRKALGLGENIGFNLQRGGETKLKGNLTNSHMADVFAERWLEMSEEDKKQVVEDWRTIEREESLIRRATEHWKLDETGAKWLASRPAPSGYCSISRKAIRKLLPLMMEGKRFKEAENEIWGSRFSGGQVYDRIPPVRQALKSLRNPAVERALTELRKVVNALIRELGKPTEVRIELARDLKKPRHERAKAVSQNRDREKQRSAAKVKMLQEIGPGFEHPSRADVEKALLWEECQGECPYTGKRFPLSSLFGENPPLQVEHIIPFSRIPDDSFQNKTLCYHEENQIKGNRTPFEAYKDAEQFETILNRVRNWRTPNPGKQRRFELRTLEELEGFSSRQLNDTRYASKLACELVGTLFGGRDIPTESGSRQVVFASSGMVTATLRKGWGLEAILREAAPSANGQNRGKPRTDHRHHAIDAITIALSAPRMIAALSRNNAQDPYWPRNGRTAPKLQSPWNGFVDSIRPHFEQMLVSHRPEHRLTGALHDETNYGRPHKEGGKDVVHIRKQVVGMSAGDIENIVDPAVRESVREKAASFGGDLKKWTPKEGSEDWPLLRTKTGKEIPIKRVRIKKSLGVETIAKGDRARHVALSSNHHVAIFALLDERGGERRWEPMIVSLFEAMERKRKGQPLIQTRYPVVGEFIFKFSLMGGDTVLLHKDCDHKNNHCNPSVWRLRTIGSNGQLSLVRINDARLKAEIQKAKEWWSPTQDALRKLDAVKVVIDSLGRIHQSGG

SEQ ID NO: 15692 - protein, 1057 aa, unidentified
  REGION 1..1057: note = Cas Enzyme sequence
MSAQTAQSYILGLDIGVASVGWSRIECDPDNNFRPLRLLGAGAHIFEPGTEGSQADIAKGKDVARNQQRRTARLTRRQTWRRARRKQQLLRLLIANDLLPASITPLKRPEEIDTYLKRFDADLRQRWITNKQHTDELRLAYLVRSAAADRKIDRHDFGRALYHLAQRRGFLSNRRADARKQDGDDDRSVVKTSIGELQKRIDAHTPPLLGAYLASLDPEQEKVRRQWTSRPMYTTEFDALWLKQAEHHGLVDDAHDAIRQAIFYQRPLKSQKNLIGRCSLIPTEPRAPIAHRLYQRFRVLQTVNNLQIVPLDGSPRALKKEERTGLLSLLLEKGDLTFDKARKLLKLPRGTMFNLEAGDEKRIVGHRTDAKLREVFLKRFDSFSAADQDRMVEDLRSFRLPEALERRGRKRWDLSAVDPTAFAAINLEEGYAPLSIAAMKLLLPKLEQGMPYATVRRAEFPESFASQEPVPTLPPVQEAVNDLRNPAVARSLTEIRKLVNEVVRQFGKPHTIRIELARELKNPRGVRERITKQMRDREKIRAGIVQRILDEPKLGIGQPRRDDIERVLLAEECGWNCPYTGRSFNMAELLGPTPQVDVEHIWPRSRSLDDSFLNKTLCFHDENRSRKRGRTPLEAYGGNRELWADMIKRVERFKGDPYARLEKLRRFKAEEIDADFSNRHLSDTRYIGRAAADYLGLLYGGRDDATGTKRVQVCTGGLTAWLRSGWGVSDLLGEDGEKNRADHRHHAVDAIVVALSDTRSVQLLSSAAAVADQRWARRAFDHVDEPWPGFRQEAAKAIDAIIVSHRQSRKVSGPLHNDTIYSGLIDGTPRVRKELQKLSPSEIRDGKVVDKRALAAIRAKLEQAGKPEPTPRDISQLFGLAENLPLVRGHDGQMVKLRKVRVLADPGQTRIGKPGFERHINTASNHHTIIYAELDAAGKDKKWFDEPVPLLQAYRRQAAGQPIVRRELGADRRFVFSLAPGEFLEMATPDDATKRAVYRVLSISQGDMELRLHHDARMADEVRKSKARLRASADKLRKLLARKILVTYLGEIRNAGG

SEQ ID NO: 15693 - protein, 1057 aa, unidentified
  REGION 1..1057: note = Cas Enzyme sequence
MSAQTAQSYILGLDIGVASVGWSRIECDPDNNFRPLRLLGAGAHIFEPGTEGSQADIAKGKDVARNQQRRTARLTRRQTWRRARRKQQLLRLLIANDLLPASITPLKRPEEIDTYLKRFDADLRQRWITNKQHTDELRLAYLVRSAAADRKIDRHDFGRALYHLAQRRGFLSNRRADARKQDGDDDRSVVKTSIGELQKRIDAHTPPLLGAYLASLDPEQEKVRRQWTSRPMYTTEFDALWLKQAEHHGLVDDAHDAIRQAIFYQRPLKSQKNLIGRCSLIPTEPRAPIAHRLYQRFRVLQTVNNLQIVPLDGSPRALKKEERTGLLSLLLEKGDLTFDKARKLLKLPRGTMFNLEAGDEKRIVGHRTDAKLREVFLKRFDSFSAADQDRMVEDLRSFRLPEALERRGRKRWDLSAVDPTAFAAINLEEGYAPLSIAAMKLLLPKLEQGMPYATVRRAEFPESFASQEPVPTLPPVQEAVNDLRNPAVARSLTEIRKLVNEVVRQFGKPHTIRIELARELKNPRGVRERITKQMRDREKIRAGIVQRILDEPKLGIGQPRRDDIERVLLAEECGWNCPYTGRSFNMAELLGPTPQVDVEHIWPRSRSLDDSFLNKTLCFHDENRSRKRGRTPLEAYGGNRELWADMIKRVERFKGDPYARLEKLRRFKAEEIDADFSNRHLSDTRYIGRAAADYLGLLYGGRDDATGTKRVQVCTGGLTAWLRSGWGVSDLLGEDGEKNRADHRHHAVDAIVVALSDTRSVQLLSSAAAVADQRWARRAFDHVDEPWPGFRQEAAKAIDAIIVSHRQSRKVSGPLHNDTIYSGLIDGTPRVRKELHKLSPSEIRDGKVVDKRALAAIRAKLEQAGKPEPTPRDISQLFGLAENLPLVRGHDGQMVKLRKVRVLADPGQTRIGKPGFERHINTASNHHTIIYAELDAAGKDKKWFDEPVPLLQAYRRQAAGQPIVRRELGADRRFVFSLAPGEFLEMATPDDATKRAVYRVLSISQGDMELRLHHDARMADEVRKSKARLRASADKLRKLLARKILVTYLGEIRNAGG

SEQ ID NO: 15694 - protein, 1052 aa, unidentified
  REGION 1..1052: note = Cas Enzyme sequence
MTTSARQEAGSQSAHAPFVLGLDIGTNSVGWALLRLDAGGVATSIERLGVRIFDTGLENFGTSKEASRASGRRLARGMRRQTARRRQRKSKTLGLLIAAGLMPSIDRRRPENVRLALDAIDRELHARHAPKRDDLAHQTLLYRLRARGVHERLGQMELGRVLYHLAQRRGFKSNRRVDGRGKKAADAADESSVVKAGIQSLREEMRAGGHATLGAYFATLDPHVRRIRSRYTSREDYEREFDLLRAMQEPLHPDLPTGFWAGIRAALFDQRPLKSSSHLIGRCDLEERRPRAPLYSDLAQRARILQDVNHLRVSIGSEPERPLTPDERGTLLSALLVGDRLTWPQAAKALGLKKPKVAVQFNLQRGGADNLKGHATAARVRPIVGTDRWDAWTSVERDRVAQWLDSVESPVVLRRLAKEMLELDEEAAEQFANSSVPEGHARHSTRAYRRLLPYLEQGLSYAEAADRAYPDRRRTTEVHSTLPPLVDAFPDLRNPTVARSLTEVRKVVNELIATYGRPERIHVELARDVKRGRKAREEISRKINANRKQREKARAKILAERPNARPSSGDVQKVLLAEECHWICPYTGRSFGMDDLFGDHPTIDVEHIVPFSRCFDDSFANKTLCYVEENRTVKRNQTPFEAYGSDQKRFKEILERVARFDTAYAPRRAKLERFAARDDGEWDLDEFVSRQLVDTAYAARMATEYLGCLYGGRVDADGQRRVQPTNGRVTSYLRRQWGSETLLGKKPDGGSKSREDHRHHALDAAVVALSTPSAVKQLSDAAEKAEARGHTRPFIDIPPPWPGFRSDLERALRPIVVSHRVQRKLNGRLHEETNYQSRKDDEKGWTRKPVSALKDKDLEHIIDPVFRDALMRWIEAGRPDPGPRMRSRDGREQTVRHVRLRGSRGAVPIGEGDRRRYVAPGSNHHMEIVRRLDGKGGYEAFVVTRLEAMERQRLGKPVVRRDFGSERAFMFSLHPGDALARPYGPGWEVLVVSSISDGVVECRFAADARSATDIRKGGAEGGRLAGAPSGFLKQGYIKVDVSAAGRITRSHE

SEQ ID NO: 15695 - protein, 1097 aa, unidentified
  REGION 1..1097: note = Cas Enzyme sequence
MSSQANDPTLKPYVLGLDIGANSIGWAAIAIDPGGQPLGFLNPPGEMRERPTLGVRIFDAGIENYGQGKREEGRGQKRRSARLARRQTMRRARRVSKTFRMLQELQLLPPNEARDVTERGRSLVRDSIIKKLDELLGRALAGQYPERASEYLECLPYALRVDALDRALSIHELGRALFHLAQRRGFLSNRKGGKKTEDTGPVYEGINEIEQAMAAEGCRTLGEHFLHLQRSGKRIRTRWTARRMYEAEFDAIWEAQRRHHPDILTDAARRRLHRAIFFQRALRSQSSLIGACELECGDEYVNPATGAVARTKKRRRAPECLLVSQRFRLLQRVNDLAVDPGEGLPRIPLTDEQRVRLAAKLEVSKDLTFPRIAEVLGLKRGTKFNLQAGGEKKLVGNQTNAKLFAVFGDRWVALTPTERDQVVLELWGAPDDKVLYTRARSRSGIWGSLRTTTDEAREVSEMPLPSDYMALSKHAMSAVLVEMERGVPYTTAVRTVYGERMRHEKLDRLPPVMNSLGSLRNPTVMRALTEVRRVVNHLLAAYGLPVEIRVELARDLKKSKDERNRIIKMNREHEELREKAAARILEQGGIRDVRGGDILKVRLADECNWTCPYTGKQFGMAQLLGEDIDIEHIIPYSMSLDDSYVNKTVCFANVNRSEKRNQTPYAAFGHDEERWTAMLERMEHNVGEHDMSPGKLERFRLAGGALAEALDHFKSSQLNDTRYASRAAKEYLAVLYGGNVSQGVDSENRKRVMVGNGQATSLVRRQLGLESVCRSLPGWPGGVGRDWDKRADHRHHAMDAIAIALTGPRMIQQLSRAAESGFGSSRRASFRMAAPWDAFEDDAARCLEHALISFRIDNRARGPLHAETIYSPPRGENGAVSDSGTVSHVRKPVSRLTASDFEAIVDPRVRRTVSAFFGDRDPAKVCQDDDPATFPHLDAADGRRIPIRRVRLRKRNSLLVMGSKERTRHVENEANHHLVVRRSRLAPDTVSFELVSMFEAVRRRSSGEGVWKRDEQTLVILARNDLVELTVDDRPRLCRVQSTSSKEFEGCWIADARPFDVRRRTGGRVRISPSQFMQRACRKFSVSPIGVLRPCRA

SEQ ID NO: 15696 - protein, 905 aa, unidentified
  REGION 1..905: note = Cas Enzyme sequence
ALDEKLDPLELGRAIYHLAQRRGFQSNKKNISKKDEEEGNVKKGIHQLEEEMESAGARTLGEYFSGLDPEKERIRQRWTARSMYEAEFEKIWWAQKKHHPKILTDDFKAEVRRAIFYQRPLKSQKHLLGKCSLEPKKNRAHMAALDAQRFRMLNMVNNVEIISDKGEVLEFTAEQRQALIDALETEGNLNFRKVKKIIGIPQSYRINYEEGGEKRLMGNNTAAALIKIFGKKRWDGFTKEQKDKIVEDIISINDRGALKRRGMNAWGLDEEKADEFAEIIPEDGYSNLSLKAISKLLPLLEEGQKYATAKKEVYGDRVVTEALDQLPPVTEALTEVRNPVVIRVLTELRKVVNALIREYGKPEVIRLEMVRDLKSSRKDKAGIIKRIKENEKARYEARSAIMKEDVGIKKPSPDDILKWRLAEECNWQCPYTGKTITPGNLFTQFDIEHIIPFHRCLDNTFVNKTLCYNEENRLYKRNRTPLEAYGHTTKWDEILQRVERFKGGDMARKKLARFKMTQEQVEEEFSNFTERQLRDTSYAARLAVKYLGLLYGGDIDPDGKLRIQPGRGRATQYLRDVWRLNRILNDGGEKSRDDHRHHAVDAVAIALTTPGVTRMLSDAAKRAPKRGREKFAEIPPPWEGFLEDVRAAVDEIVVSHRVSRKVRGRLHEDTIYGPPKTDEDGKVYHPVRKRLENFGKRDAENIIDPVIRELVKKKLEEVGNDLKKLESDPPYLVAKNGRKIPIKKARVKVYQAAFPVGPDARHVHTDTNHHVEILEVTDKKGKTKWEGEIVSLYEAKQRHKRGEPIIKRDHGEGKKFLFSLAGGEAIEIDENDGSRGIYVIRTISKMKVGKREYTNLAFVKINDARKKKDIIKAKEWRTSLTDPLRKLNCRKVLVTPLGEVREAND

SEQ ID NO: 15697 - protein, 1006 aa, unidentified
  REGION 1..1006: note = Cas Enzyme sequence
MWHVRKGATVKRVLGLDLGTNSIGWAVIDVPDDDDDAGSVVAMGSRIFTMGAEEAGSALVTPAKERRQKRSMRRQISRRATRRRRIRGELTRIGLLPEDDAQFDGLMNSDPHDLLRRSADGEGLTLREIGRVVYWFSSKRGFLSLRSEGADLTDDDDERAVRPRYRRPQVHSETGEILTQGQEDLLVGFLRDQAVHHPDLITDQLIFGARGQLTYPMRPISRDRFIGDGTWLDEFGIHGLVFFQRSIYWDEKTIGDCSIDPRRGGPRALRADRLAQKYRAWKTIVDLRVDFDERPLTEDERSVAFDALMTQGTLAFTALRKRLRLPEGSPINFERSDRTNLKGNETDAAMRKALGTGHWRDLDEDTRDRIVMLLLGDAQEEQIRATLAGEYDLGDDQIAKCLAARFPGGRVMYGRRTLRRLLEVLPECDTERKALEAAGYRMPEEVRRERPVVVSDLTNPLVRQTLSQLRKVLHAVAHAYGKDSDDPFDVVRIELSRDVRANRKDRERTNKFQRANEAANKAAEEFIEEFAQGSKANRDRKRRHRLWQEQNQQCLYCGQPISSTSVLSSATELDHILPRSRTLDDSMANMALVHAAENQEKGNRTITEWEGPDKAAEVAERLMHASIPWAHKKPKLRRIEAVDVADSPVPEALIVQTGYINSVARDFVRQELGVEPEVSAGRITAQLRYRIGLHKDNEDHRRHALDAAMVSICDISTARKLSDRFRKERDHGIRRDDKYGSWEPWEGLRSDIEANYEAINVSHAVKGKVSGQLHEETRYGKVTSPYRDKEHTWARRRLLSGGLTLPQLAEVADPVVRAALESNLRLRGIDPEVGVRKKLTFDPKIPPVMPDGSEIQRVRCHMELPSNRVLQPETAPKTSVTMGRNHSAYIYENEETGKWRIHVVPRFEAFRGRGLPPDSMRDAHIGDGERFVFSVTIGTSLLLEIDGTDELSLVKSLDAASSRLDVQPATSSGPLKQAWHSGTKLKRLNTRKVVVLPSGEIRSARD

SEQ ID NO: 15698 - protein, 1041 aa, unidentified
  REGION 1..1041: note = Cas Enzyme sequence
GVRVFEAGVEGDIEQGKDESRGVQRRVKRQQRRMLCRRARRLRKVAKALAAAGLLPPGNWGNPVERHELLLKLDSELRKKWLKEGDRVEAHLLPYKLRAAAVKGRVEPFELGRAIFHLGQRRGYKSNRKAERKLQAQEEVQTGKEKKEGSKERLGEVEGGIRTLQEQMSAAGCTYLGEYFATLDPEQARIRQRWTARAMLEAELDRIIEVQRVHHPDLLTEEKAKAIRRAVFFQRPLTSAKGLVGKCALEEGKRRAAIALPVAQRFRMLAAVNNLEIVEPTGVVRDPTAEERGKLIAALEREGGRTFDQTRELLGLRKTKKRKGVIEPGHVFNLERGGETRMPGDRTGSKLRAIFGEQWGRMSEEEKEKLVYELLNLENKETVARRGREVWGLDKEAAEKLAEVTLEDGYAAYSKPALRKLVARMEGGTRLKTAEIDVYGEAKRTEPVDVLPPVVQAGLDVRNPAVMRSLSELRKVVNGVIRLYGKAERIVIELARDLKQPRRVREEIAKRNREREGERKAAAEEIFREAHLGEPRPSDIEKWLLAKECRRVCPYTGQAITPGTLFGENVQFDIEHIIPLSISLDNRLVNKTLCAANFNRHHKHNRIPLEAFDTGSQAWEEVLGRVRRFEGALAGEKFRRFQMTSDAMREEYGDDFTARHLADTQYGSKLAAEYLGLLYGGINDESGKKRVFTSPGTVTWFLRNEWQLNAILGGREKNRSDHRHHAVDAAVIGVTTTRIVKMLSDAANGAALARRRMFAPIPDPWRGFSDELRAAVEKIVVSHRMDHRVAGPLHAETNYSPKHKIRDAKTGEVVEAHLQRVPIVKLSASTVEDIVDAKVREAVKAALNGGEPKRVFAGGANLPYLKARDGRTIPIRKVRIRVRKDARPVGKQHRERYVISGKDTLHHTVIVARQTRKGETWTDEPADRLKVHERLGAKPKQPAVQMDWGVGGKVAMVVFKGDCLEMDRKDGKGRALFVVRSVSRADITVRLVEDARKDDDVKKAGERDLYRIRSGDDFRKRKAAKVEISPIGEVAYVKPGT

SEQ ID NO: 15699 - protein, 1077 aa, unidentified
  REGION 1..1077: note = Cas Enzyme sequence
MRTAPSEAPKYSLGIDLGSASLGWAMVRLNEANEPTELLRAGVRIFEPAVEGNVEKGQDVSNAVARRQARLARRQLRRRTGRQKQLFKLLQHHGLLPRYEGQARDSAIQRHEILNALDRDLAAKWSNSVNPITSNFVELPLYVLRKAALDTQLQPFELGRIFYHLSQRRGFQSNRRAGSKESEKEQGEVKAGISQLEAEIKAAGAQTLGAYFATLDPHSQKVRRRWTHRRMFQEEFEKIWKRQHSFHPALLTEELRREISRILFFQRPIREQANLIGHCELEPDQRRASWATLEAQRLRLLQKVNDLEIIYPGQILGIPLTDAQRLSLYELLDTGGDQKFEAIRKHLGLDKNIGFNLQRGGETKLRGNLVNKIMRKAFAARWEEMDEEQKRLAVDEWRTIEGEQSLRRRFVEHWGLDDLAASALAEQSPPKGYCQLSRKAIRRLLPLMFLGKRFMAARQEIPEYRPQLQEPMDRVPPVREALTTLRNPAIERALTELRKVVNAMIREYGKPAEVRIELARDLKKSRAERAKATDIMRKRERERITAKERLLKELGPAFDHPSRADVEKALLWEECGGICPYTGRSIEFASLFGQAPQFDVEHILPLSRVPDDSFQNKTLCYHEENRNRKGNRTPFEAYGADPETYDQIIARVKAWKIENPGKLRRFELRTLDEIEGFSSRQLNDTRYSSRLAMQLLATLYGGDRIPQQDGSNRQIVFASSGSVTATLRKVWGLEEILREAAPSANGQSKGKPRTDHRHHAIDAIVIALTRQGTIQAMNRAAEQAPSWMRTGRAYRGLQQPWRDFAPSIRPVIHGLLVSHRPEHRLTGELHDATNYGAPRKLNGKRVVHVRKPVSSLGVKDVESIVDPAVRDAVRAKAKELGGDLSKCNPKEGVEDWPLLRTGSGKLVPIKRVRIQKTLEVETIANGSARERYVALSSNHHVAIFAELDRQGKEKRWEPMVVSLYDAMNRNRLGLPVVQRAYTGAEKYVFKFSLMGGDTVRLHKECNHAQGICQPSFWRLRTIASNGQISLVRIQDARLKTQIQSSGQWWSPMADALRKLGCEKVIIDTLGRPHVTSD

SEQ ID NO: 15700 - protein, 1052 aa, unidentified
  REGION 1..1052: note = Cas Enzyme sequence
MVRLNEANEPTQLLRAGVRIFEPAVEGNIEKGQDVSNAVARRQARLARRQLRRRAGRQKQLFKLLQHHGLLPQYEGQARDSALQRHEVLNALDRDLAAKWSNSADTDGSNFVELPLYVLRKAALGTQLEPFELGRIFYHLSQRRGFQSNRRASNSDKEEEQGKVKAGISQLEAEIEAADAETLGAYFATLDPHSQKVRRRWTHRRMFQKEFEIIWERQRSFHPTLLTEELRREISWILFFQRPIREQANLIGHCELEPDQRRASWATLEAQQFRLIQKVNDLEIIYPGQILGTPLTDAERLGLYEFLDAEGDQKFEAVRKHLGLEKNIGFNLQRGGETKLRGNVVNKIMRKAFAARWEEMDEEGKRLAVDEWRTIEGEQSLRRRFVEHWGLDGPAASALAEQTPPKGHCQLSRKAIRRLFPLMMLGQRFMAARQEIPEYRLQLKEPLERIPPVRETLNNLRNPAIERALTELRKVVNAMVGEYGKPAEVRIELARDLKKSRAERAKTTDIMRKREKERITAKERLLKELGPAFDHPSRADVEKALLWEECGGICPYTGRSIEFASLFGQAPQFDIEHILPLSRVPDDSFQNKTLCYHEENRNRKGNRTPFEAYGADPETYGQIIGRVKAWKIGNPGKLRRFELRTLEEIEGFSSRQLNDTRYSSRLAMQLLATLYGGDRIPQQDGSNRQIVFASSGSVTATLRKVWGLEEILREAVPSANGQSKGKPRTDHRHHAIDATVIALTRQGTIQAMSRAAEQAPSWMRTGRAYRGLQQPWKDFVPSIRPAIHGLLVSHRPEHRLTGELHDATNYGAPRKVNGKEVVHVRKPVSSLGVKDVESIVDPAVREAVRSKASEFDGDLSKCNPKEGVEDWPLLRTGHGKAIPIKRVRIQKTLEVETVAKGSARERYVALSSNHHVAIFAELDEHGKERRWEPIVVSLYEAMNRRRRGLPIVQQAYPGAEDCVFKFSLMGGDTVLLHRDCDHAKDICIPRAWRIRTITQTGRVALVPINDARMKVEIKSSKDWWEPGIDALRKLGCEKVVIDTLGRPHVTSD

SEQ ID NO: 15701 - protein, 1080 aa, unidentified
  REGION 1..1080: note = Cas Enzyme sequence
MEMETVHSELPRYVLGLDLGSASVGWAMIQLNEADEPIAVLRAGVRIFDSAVEGNIEKGQDVSNAVARRTARLMRRQLRRRAGRQKQLFKLLQKSGLLPAYESSAEDAAIQRHEILNLLDRELASKWLIAVGNRGMNFTELPLYVLRKAALDSQLEVFELGRVLYHFSQRRGYQSNRRASNKDKVKDEEQGKVLSGISQLETEMKASGARTLGEYFAGLDPHTQKVRRRWTHRRMFEDEFGRIWEAQRVFYPALLTEDVRREICEMLFFQRPIREQTNLIGKCDLEPDQRRAHWATLEAQRFRLLQKVNDLEIILPGQILGIPLTDAQRLSVYEFLDEEGDQKFDAIRKHLGIEKNIGFNLQRGGETKLRGNLINKIMRKAFGNRWEEMDEEQKRLAVDEWRTIQNEDGLCRRFMQHWGLNDLAASTLAAQAPPSGYCQLSRKAIRRLFPLMLLGKRFMAARQEVPEYRPQLQEPMDRIPPVRETLKNLRNPAIERSLTELRKVINAMVGEYGKPTEIRIELARDLKKSRSERAKGIDTSRKRERERAAVKEKLLRELGLGFTHPSRADIEKALLWEECGGICPYTGRSIEFASLFGQAPQFDVEHILPLSRIPDDSFGNKTLCYHEENRHCKGNKTPFEAYGSDPEVYDQIIIRIKAWKSPNSGKLRRFEMRTLQEMEGFSTRQLNDTRYSSRLAMQLVAALYGGDKIPQEDGSNRQVVFASSGMVTATLRKTWGMEEILREAAPSANGQTKGKPRTDHRHHAIDAIAIALTRQATIQTMSRTAALAPSWMRSGRAFRGLQQPWKNFIPSIRPAIDSLLISHRPEHRLTGALHDETNYGKPRKVNGKQVVHVRKPVSGLSVKEIESIVDPAIRDAVRAKAQELGDDLKKCNPKEGVEDWPLLVTKSGKFVPIKRVRIQKTLEVESIAGGTVKERYVALSSNHHVAIFAELDEHGKERRWEPIIVSLYEAMNRKRSGLPVVQRACAGTENYTFKFSLMGGDTVRLHKECDHSAGICKPSFWRLRTIASNGQMSLVRIQDARLKTEIQSSKQWWSPVADSLRKQDCEKITIDTLGNPHTSS

SEQ ID NO: 15702 - protein, 1145 aa, unidentified
  REGION 1..1145: note = Cas Enzyme sequence
MEAVMAGDDYVLGLDLGTRSLGWAVVTADKKQLKRIGVRVFDAGANPARFAEGRPDSSNTAERRRARLQRRQIRRRAARHAELFALLQFKGLLPGPITGKRTGAALRHEILHGPPHGGERGLDQQLQARVSSWYPGESTPQVDHLMPYLLRARALDHRLEREELGRALYSLGQRRGYWSNRKAARLAEMDAAQESPVPEKKTKPKTQTRPDAEEKKREVLEGIANLERRMKEKDARTLAEYFAKWDPRERPRIRTEYTARDMFQQEFEKIWAKQAEFHEILRDERFKQRVYRLLFYQRSVATNKHLIGHCRLEPSERRAPMSCLEAQRFRLLQKVNDTTVIEGLTERELTHEEKQKLAEELEQRTEMSCRQVRHHLNIISDAAHLNLERAAGKLNPDRKVKGNRTAAHMWNVLGDTWKALSPAQQDEIVRQWMDEQDGAKLSAWAQQHLCISEEQARRFASKEPEDGYSKLSLKALRKILPIMEQGIPFKTAEERVYGNKLSGGQVFELLPPLDEVLPHVPNPAVKRALTELRKTVNAIIRERKKKPLEIRIELARDLKRNMEQRRHDTDRMEREATERKKLKKLIAIKLGIDEEKVSPQDIEKVRLWKECGAEVEKLKLWEECRGTCPYTGQSISFSDLFGSHPRFDVEHILPKRRFADDSFQNKTLCEAEFNRRYKAGNTPSEACGKSEQWEEILTRVRKMGNAEKLRRFQITSEEELAAFSSRALNDTRYASVLAAEYLGALYGGRDEEVTDPALGQKGKVRRVYASTGIATAALRRAWQLEAIVRNLFPRPKLNQPAKRTDHRHHAVDALIIALTSQAVVQRMSAAAAAYGSARGVERVTSRYVEAPWQDFVPDVQGKIAAVIVSHRVKHRLFGNLHDANAYGVTTGPKGQEIHKRRPVWELTKEQIDSEKAIVDPAIARFVKEKLAEVGDPKKFKDAPPQLRTKTGKTVPIYKVRVKVRAKVVSIGNEIRERNVSLGENHHISIFIVRNSKRQETWDSPGIVSRKDAMDLWSALKKRGRIENLVRREWPHSTAEDRPLESEFLFSLMPGDMVEMSDPLHPPKNLFLVRTISQETSGEVEIDLVRHTEARQIEDLKRISFKDFRAGKPGEWIRIRSVDQLRLADCRKVLIDVLGGVRYVHD

SEQ ID NO: 15703 - protein, 1072 aa, unidentified
  REGION 1..1072: note = Cas Enzyme sequence
MESPQKYVLGLDLGSASLGWALIALDDADDPTSLIRAGVRIFEPGVDGTSMEIEQGKDQSKAVERRTARLHRRQLRRRAARQRDLFRLLQRHSLLPAPGVLSGSPEEQRHSILNELDQHLTHKWQSAFPDNRFAQLPLYYLRKRALDESLEAPEIGRILFHLIQRRGFLSNRKENKQNPEQKKELGQVKAEIHSLEQDILSAGARTLGEFFAGLDPHAQRVRRRWTARKMFQDEFEKIWEAQAIHRLELLTPELHDKIAHLLFFQRPIAAQTHLVGKCELESGKQRAPWAAMEAQRFRILQKVNDLKLINPGSLISDPLTEDERQRLYDLLDWEGDQTFKAIKKYLSFPAEAQFNLEKGDEKRLRGNRTQAVMRKVFGDRWDGFSAGKQHQIIENWRNSESDEALIREAVEQWLLDAAAASSLSEQIPEPGYCAVSLTAIAKLLPLMQCGKSFKEAETEVYGARFSGGVVFDTLPEVRKQLESLRNPAVERALTELRKVVNAIVREYGKPYEIRVELARELKKPRQERIDATKKNRNRQREREDIAVKILRECGLSNPSRKDIEKALLHEECGGYCPYTGRHIPFSTLFDNSEFDVEHIIPRSRYPDDSFQNKTLCYLPENRDIKKGQTPWEAYGKDEQRWAEIMTRVSSWKNRGKMVRFSIQTEDALGDFSARQLNDTRYVSVLSARFLGALYGGRDVMDGEKVRQVIFASSGSVTATLRSSWGLEAILHELVPTEPGESRGKPRTDHRHHAIDAITIALTRPKVIQSMARAASMEPWQKDARAWRKIELPWKNFVPSIRPRIEEMLVSHRPEHKMSGELHKGTNYSAPSNYKGKPTVHTRCSLSALSASDIADDEVIVDIAVRDAVRMKLVELGGNPKLFDRPENAPCLSARDGRLIPIRKVRIRETKNPLRVGHGARERFVAPGGIHHVALFVVRDERRREKWDSDVAQVTEVYRLCPKNDHRKGRPRSAVKEPPISRQLKADPEAQFLFSLMKDDTIKVTDANGTHILRVKKFSDNKQMWFVPVNDAHDDAQQKKLCITWSRTPNSLKELHPRKVVIDLLGKVHPAND

SEQ ID NO: 15704 - protein, 1076 aa, unidentified
  REGION 1..1076: note = Cas Enzyme sequence
MSSALERPQKYVLGLDLGSASLGWALIALNDADNPTSLIRAGVRIFEPGVDGTSMEIEQGKDQSKAVERRTARLHRRQLRRRAARQRDLFRLLQRHSLLPAPETLGGSPEEQRHSILNGLDQALARKWQSAFPDNRFAQLPLYYLRKRALDEPLEAHEIGRILFHLIQRRGFLSNRRENKQNPDQKKELGQVKAEIHSLEQEIQNAGARTLGEFFAGLDPHAQKVRRRWTARKMFQNEFEKIWEAQVIHCPNLLMPELHDKIAHLLFFQRPIATQSHLVGKCELEPGKQRAPWAAMEAQRFRILQKVNDLRLVNPGSLISDPLTEEDRQRLNSLLDREGDQTFKAIKKYLSFPADVQFNLEKGDEKRLRGNRTQAAMRKVFGDRWDRMSAGKQHQIVENWRNSESDEALIREAEEQWALDDTAATLLSEQIPEPGYCAVSLTAISKLLPLMQCGKSFKEAETVVYGARFSGGVVFDTLPEVRKQLESLRNPAVERALTELRKVVNAIVREYGKPYEIRIELARELKKPRQERLEATKKNRTRQREREDIAGKILRECGLSNPSRKDIEKARLHEECGGICPYTGRHIPFSTLFDNSEFDVEHIIPRSRYPDDSFQNKTLCYLPENRDVKKGQTPWEAYGKDEQRWAEIMTRVGSWKNRGKMARFSIQTEEALGEFSARQMNDTRYASVLAARFLGSLYGGRDVVDGDNARQVIFASSGAVTATLRSSWGLEAILHEIVPAESGESRGKPRTDHRHHAIDAITIALTRSKVIQSMARTASLEPWQIDSRAWRKIELPWRDFVPSIRPHIEQMLVSHRPEHKMSGELHKGTNYSTPYNYKGKPTVHTRCLLSALSAADIAGDEVIVDTAVRDAVRKKLAELGGNPKLFDRPENAPCLSARDGRLIPIRKVRVRETKNPVKVGKGVRERFTSSGGIHHVALFVTRDEKRREKWDSEVAQVTEIYRRCPRNDHRKGRSQPVVTESPISRQLKSDPEAQFLFSVMKDDTIEVTDPNGIHILRVKKFSDNKQMWFVPVNDAHDDTQQMKLGITWSKTPNSLKELRPRKVVVDLLGKVHPAND

SEQ ID NO: 15705 - protein, 1076 aa, unidentified
  REGION 1..1076: note = Cas Enzyme sequence
MSSALERPQKYVLGLDLGSASLGWALIALNDADNPTSLIRAGVRIFEPGVDGTSMEIEQGKDQSKAVERRTARLHRRQLRRRAARQRDLFRLLQRHSLLPAPETLGGSPEEQRHSILNGLDQALASKWQSAFPDNRFAQLPLYYLRKRALDEPLEAHEIGRILFHLIQRRGFLSNRRENKQNPDQKKELGQVKAEIHSLEQEIQNAGARTLGEFFAGLDPHAQKVRRRWTARKMFQNEFEKIWEAQVIHCPNLLMPELHDKIAHLLFFQRPIATQSHLVGKCELEPGKQRAPWAAMEAQRFRILQKVNDLRLVNPGSLISDPLTEEDRQRLYSLLDREGDQTFKAIKKYLSFPADVQFNLEKGDEKRLRGNRTQAAMRKVFGDRWDRMSAGKQHQIVENWRNSESDEALIREAEEQWALDDTAATLLSEQIPEPGYCAVSLTAISKLLPLMQCGKSFKEAETVVYGARFSGGVVFDTLPEVRKQLESLRNPAVERALTELRKVVNAIVREYGKPYEIRIELARELKKPRQERLEATKKNRTRQREREDIAGKILRECGLSNPSRKDIEKARLHEECGGICPYTGRHIPFSTLFDNSEFDVEHIIPRSRYPDDSFQNKTLCYLPENRDVKKGQTPWEAYGKDEQRWAEIMTRVGSWKNRGKMARFSIQTEEALGEFSARQMNDTRYASVLAARFLGSLYGGRDVVDGDNARQVIFASSGAVTATLRSSWGLEAILHEIVPAESGESRGKPRTDHRHHAIDAITIALTRSKVIQSMARTASLEPWQIDSRAWRKIELPWRDFVPSIRPHIEQMLVSHRPEHKMSGELHKGTNYSTPYNYKGKPTVHTRCLLSALSAADIAGDEVIVDTAVRDAVRKKLAELGGNPKLFDRPENAPCLSARDGRLIPIRKVRIRETKNPVKVGKGVRERFTSSGGIHHVALFVTRDEKRREKWDSEVAQVTEIYRRCPRNDHRKGRSQPVVTESPISRQLKSDPEAQFLFSVMKDDTIEVTDPNGIHILRVKKFSDNKQMWFVPVNDAHDDTQQMKLGITWSKTPNSLKELRPRKVVVDLLGKVHPAND

SEQ ID NO: 15706 - protein, 1075 aa, unidentified
  REGION 1..1075: note = Cas Enzyme sequence
MPAKNSTPYILGLDLGSASLGWALVGLNRDGEPSRLLRTGVRVFDPGVQAANIDVVQQGKDEPKAAKRRQMRLQRRQLRRHAARQRGLFELLQQNSLMPPYPAKIPAGAPHVTNAQRSAARHEILTRLDLHLRDKWKPQGARSNAAVPAPDHVLPYFLRAQSLCQRLEPYELGRALYHLGQRRGFKSNRREAKSAEEMEEKSKVYAGISEIKEQMRAAGAPTLGHFFAGIDPTAGKRIRGRWTARSMFEQEFEAIWNAQQPHHPETLTTELHEQIHQLLFFQRPIARQAHLIGECELEPGRKRAPIACLDAQRFRLLQKVNDLKIRYADFTERYLTAPERTTLLEALQRQGDLTFAEVRRLLGLPKRGVWFNLEKGGEKRLPGNRTVAKMVAAFGDRWFQLLAQDQMAIVEDWRTAESEEWLVRRGMARWGLDEQHARKWAEAPVEDGYLHLSHKALSKLLPMMDDGFPFKEVEKEVYGVHFSGGRVHEQLPPVRKALAALRNPAVERSLTELRKVVNAIVREYGKPAEIHLELARDLKQPREIRKKTWSDMRDRQKLREETRTKIPVPAPSRADIEKALLWEECGGICPYTGKPIPFNELFGDNPQFDVEHILPFSRCPDNSFANKTLCYQEENRTVKRGRTPWEAYGADPERWEEILGRARRFKNAGKVKRFLVKTQDELAEFTSRQLNDTRYASKLSAKYLGLLYGGRDVPRGDGPARQVIFASPGKLTADLRRNWGLEAILREPEPAETSEKTAKPRGDHHHHAIDALVIALSSPAAVKALSDAAERNARRGRTSFKGTEAPWPDFVESIRPHIESLVVSHRPEHKLSGQLHDETLYSEPYESGNKTYVHVRKPVDALTKGEVEEIVDPAVRAAVQKRLQELGDLKKLQTAGAEPPHLESTKVGKIPIRRVRIRKALSPTPVGEGLRQRQVAPGNNHHVEIVAELDADGKEISWQGFVVSRLEATQRAARNQPIVQRDHGEGYLFKFSLTGKDALEMDDSKGGRILFVVRTVSQDKHGYIKVEVVRHADARRKEEIKAAGDWLTRSPNELRKLSCRKVRVDLLGRVHPAND

SEQ ID NO: 15707 - protein, 1108 aa, unidentified
  REGION 1..1108: note = Cas Enzyme sequence
MSEIGVSTQPYVLGLDLGSASLGWALVGIDAMERPSSLIRAGVRIFEPGVDGSALDIQQGKDQSKAVDRREARLRRRQLRRRVARQRELFGVLQGAGLLPTGDTQGTGIGSEQRHRILNNLDVTLSNRYRNGADQEIFAQMPLYALRKKALYEPLALDELGRVFFHLSQRRGFQSNRKDVKKKTKDSEDQGQVKSAIHELEQAIEAAGAQTLGEYLAGLDPHEQKVRRQWTGRKMFEKEFQMIWDKQKEYHTDLLTPELHDRIWNLLFFQRPVAAQKHLVGKCELEPDKRRAPWAALLAQQFRLLQKVNDLRLIEEDGNELPLNEDGRAAVFDLLENHGTQSFAKIKQHLGLPKTAQFNLERGAGKSPQLKGNLTAQSMRKVFGERWKEFSAGKQNQIIENWRNSEKDEELKREAMEHLGLDEAGANALVNEKAPGDYCSLSLVALGKILPLMRAGKSFKEAETEIYGNRFSGAAVHSLIPVLRPNRKHFRNGTPPPQDPLMASIANGLRNPAVERSITEMRKVVNAIVREYGKPCEIRIELARELKKPRSKRLDETARNRKREAENKALAERMHNECGTPQNPSRNDLEKAKLWVEQQGECPYTGRSLPFSRLFDDNNGFDVDHILPRSRHPDDSYQNKVLCWGDTNRMVKRNQTPYEAFAEQDPENWHQILARVARWKNPGKSRKFEIRSTDELADFSSRQLNDTRYTSLLAARLLSTLYGGRDLAENGRKRQIIFASTGAVTATLRRNWGFEQILRNMIPPEPTESTGKPRTDHRHHAIDAIVIALTRNDVIQSMARASALEPWQPGTRSWRHVPQPWRTPDFFCSVEEQVREMLTSHRPEHKVSGELHQGSNYARPYMYKGKSIVHSRTLVSELKVEQIEADDVIVDRAVRDILRAKLKEIGGTLKGSDNVKAFEKPENTPYILTPAGKRIPIRKVRIRETKNPLLVGAGSNERYVASGGIHHVDLFVTRDEKRRETWDSKVIQTTEMYDRFPKHDRRPGRPHTESKNFSRLRQNDDDDESRFLFSLMKSDTIQLEQDGHRQIFKVKKFEATGKMTFIPINNAMPDKLQYSTGAAWSKMPATLKSMSPQKVVVDLLGRVHPAND

SEQ ID NO: 15708 - protein, 1106 aa, unidentified
  REGION 1..1106: note = Cas Enzyme sequence
MSESGVSTQPYVLGLDLGSASLGWALVGIDAMERPSSLIRAGVRIFEPGVDGSALDIQQGKDQSKAVDRREARLRRRQLRRRVARQRELFGVLQGAGLLPTDDTQGTGIGSEQRHRILNNLDVTLSNRYRNGADQEIFAQMPLYALRKKALYEPLALDELGRVFFHLSQRRGFQSNRKDVKKKTKDSEDQGQVKSAIHELEQAIEAAGAQTLGEYLAGLDPHEQKVRRQWTGRKMFEKEFQMIWDKQKEYHTDLLTPELHDRIWNLLFFQRPVAAQKHLVGKCELEPDKRRAPWAALLAQQFRLLQKVNDLRLIGEDGNELPLNEDGRAAVFDLLENHGTQSFAKIKQHLGLPKTAQFNLERGKAKELKGNVTAQSMRKVFGERWKEFSEGKQNQIIENWRNSEKDEELKREAMEHWGLDEAGANALVNEKAPGDYCSLSLVALGKILPLMRAGKSFKEAETEIYGNRFSGAAVHSIIPVLRPNRKHFRNGTPPPQDPLMASIANGLRNPAVERSITEMRKVVNAIVREYGKPCEIRIELARELKKPRSKRLDETARNRKREAENKALAERMHNECGTPQNPSRNDLEKAKLWVEQQGECPYTGRSLPFSRLFDDNNGFDVDHILPRSRHPDDSYQNKVLCWGDTNRMVKRNQTPYEAFAEQDPENWHQILARVARWKNPGKLRKFEIRSTDDLAEFSSRQLNDTRYTSLLAARLLSTLYGGRDVAENGGKRQIIFASTGAVTATLRRNWGFEQILRNIIPPEPSESTGKPRTDHRHHAIDAIVIALTRNDVIQSMARASALEPWQPGTRSWRHVPQPWCTPDFFRSVEEQVREMLTSHRPEHKVSGELHQGSNYARPYMYKGKSIVHSRTLVSELKVEQIEADDVIVDRAVRDILRAKLKEIGGTLKGSDKVKTFEKPENTPYILTPAGKRIPIRKVRIRETKNPLLVGAGSNERFVASGGIHHVDLFVTRDEKRRETWDSKVIQTTEMYDRFPKHDRRPGRPHTESKNLSRLRQNDDDDESRFLFSLMKSDTIQLEQDGHRQIFKVKKFEATGKMTFIPINNAMPDKLQYSTGAAWSKMPATLKSMSPQKVVVDLLGRVHPAND

SEQ ID NO: 15709 - protein, 1106 aa, unidentified
  REGION 1..1106: note = Cas Enzyme sequence
MSESGVSTQPYVLGLDLGSASLGWALIGIDAMEKPSTLIRAGVRIFEPGVDGSALDIQQGKDQSKAVDRREARLRRRQLRRRVARQRELFGVLQGAGLLPTDDTQGTGIGSEQRHRILNNLDVTLTNRYRNGADQETFAQMPLYALRKKALYEPLALDELGRIFFHLSQRRGFQSNRKDVKKKTKDSEDQGQVKSAIHELEQAIEAAGAQTLGEYHAGLDPHEQKVRRQWTGRKMFEKEFQMIWDKQNEYHTAPLTPELHDRIWSLLFFQRPVAAQKHLVGKCELEPDKRRAPWAALLAQQFRLLQKVNDLRLIGEDGNELPLNEDGRAAVFDLLENHGTQSFAKIKQHLGLPKTAQFNLERGKAKELKGNVTAQSMRKVFGERWKEFSEGKQNQIIENWRNSEKDEELKREAMEHWGLDEAGANALVNEKAPGDYCSLSLVALGKILPLMRAGKSFKEAETEIYGNRFSGAAVHSIIPVLRPNRKHFRNGTPPPQDPLMASIANGLRNPAVERSITEMRKVVNAIVREYGKPCEIRIELARELKKPRSKRLDETARNRKREAENKALAERMHNECGTPQNPSRNDLEKAKLWVEQQGECPYTGRSLPFSRLFDDNNGFDVDHILPRSRHPDDSYQNKVLCWGDTNRMVKRNQTPYEAFAEQDPENWHQILARVARWKNPGKLRKFEIRSTDDLAEFSSRQLNDTRYTSLLAARLLSTLYGGRDVAENGGKRQIIFASTGAVTATLRRNWGFEQILRNIIPPEPSESTGKPRTDHRHHAIDAIVIALTRNDVIQSMARASALEPWQPGTRSWRHVPQPWCTPDFFRSVEEQVREMLTSHRPEHKVSGELHQGSNYARPYMYKGKSIVHSRTLVSELKVEQIEADDVIVDRAVRDILRAKLKEIGGTLKGSDKVKTFEKPENTPYILTPAGKRIPIRKVRIRETKNPLLVGAGSNERFVASGGIHHVDLFVTRDEKRRETWDSKVIQTTEMYDRFPKHDRRPGRPHTESKNLSRLRQNDDDDESRFLFSLMKSDTIQLEQDGHRQIFKVKKFEATGKMTFIPINNAMPDKLQYSTGAAWSKMPATLKSMSPQKVVVDLLGRVHPAND

SEQ ID NO: 15710 - protein, 945 aa, unidentified
  REGION 1..945: note = Cas Enzyme sequence
LKSLDASLLASGGDPIRLPYALRAKALVEPLEPFALGRALYHLAQRRGFKSNRKAARKEGEEETGKVRGGIESLRQRMTSEAAPTLGSLFSRHNPEDHSASPNHRIRGRYTSRDMIETEFEAIWAEQSKHHSKLLTPSLKVKVHKCVFFQRPLKSAEDLVGWCSLEQGRWVKIRKTHRRDGRPLEKPSWVPVYKAPRRMPMAHPQAQRFRLLQKVNDLKILWNDGTTTELDAAQRKWLIGELERGSVSFAAMKTQWGIGRRGKLNLAEGPAKSLPGDLTFARIEKAVPGLWGRLDSVRRESLVHALRHAEDPTLFATALQRDWQLSPKEAVALADTSLEDGYLSISRKAVEKLLPWLEQGIPYSSVVKQVYGDESAPRPVDKLPRVVEAFPALRNPMVSRTLTELRKVVHAVIREWGKPVAIRIELARDLKKSRDARSAISKKIADRTRDRDKAREAIRPLKAEPKARDIEKYLLWQECGGPMALCPYTGKPITLHELFQESSPWDVEHIIPFSKSLDDSFANKTLCWAEHNRNVKRNRAPMEAYTPEILADILGRIENWREGPGKAVKLQRFRQTELDGDFISSQLNDTAHASRLACQYLSLLYGGLWDEEGRRIYASKGQVTSMLRGLWHLNPLLGGGEKNREDHRHHALDALVIAVTSPAALKALSDASKTGWESHRSRFARFALPWVDFEKDAAAALDAITISRRVRRKLQGRIHKETSYGVDGESLVQRVRVEELSTKDVARIIDPEVRRRVESRLEDLGVTDPKKAFKEPKDHPYLLSKDGRRIPIHRVRIKVSGTVMPVGQDHRLRHVESDANHHMTIHEAKDAKGRTIWKADVVSQFEALRRHAAGEPVIKREEGFVMSLRSGDTVQYMEDGQLKAAWVRTVTIEPRIGLVSHRDARLKQEQEKDGDYLRVVISKAKELRIQKTQVDPLGRTRISHD

SEQ ID NO: 15711 - protein, 1062 aa, unidentified
  REGION 1..1062: note = Cas Enzyme sequence
MSAALEQQKYVLGLDLGSASLGWALIALNDADDPVSLIRAGVRIFEPGVDGTSIEIEQGKDQSKAVERRTARLHRRQLRRRAARQRDLFRVLQRHSLLPAPETLVGSPEEQRHSVLNELDQELAQKWQSTYQGKRFAELPLYYLRKMALDERLEAHEIGRILFHLIQRRGFLSNRRENKQNPDQKKELGQVKAEIHSLEQEIQNAGARTLGEFFAGLDPHAQKVRRRWTARKMFQDEFEKIWEAQKAHRPELLTQELHDKIAHLLFFQRPIAAQTHLIGKCELETGKQRAPWAAMEAQRFRILQKVNDLRLINPGSLISDPLTEEGRQRLYHLLDREGDQTFKAIRKYLSFSAEVQFNLEKGDEKRLRGNRTQAAMRKVFGERWDTIGEGKQHQIIENWRNSESDDVLIREAMEQWSLDAAAATLLSEQTPEPGYCAVSLAAISKLLPLMASGKSFKEAETELYGARFSGGTIFETLPEVRKQLESLRNPAVERSLTELRKVVNAIVREYGKPHEIRIELARELKKPRQERIEATKKNRNRQREREDVAVRILRECGLSNPSRRDIEKARLHEECGGYCPYTGRHIPFSTLFDNSEFDVEHIIPRSRYPDDSFQNKTLCYLPENRDVKKGQTPWEAYGKDEQRWAEIMTRVSSWKNRGKMARFAIQTEEALGDFSARQMNDTRYASVLASRFLGALYGGRDLVDAEKVRQVIFASSGAVTATLRSSWGLEAILREIVPTEPGESRGKPRTDHRHHAIDAITIALTRPKVIQSMALAASLEPWQRDSRAWRKIESPWRDFVLSIRPHIEQMLVSHRPEHKMSGELHKGTNYPPPHNYKGKPTVHTRCALSALSAADIADDEVIVDPAVRDAVRAKLEKLGGNPKLFDRPENAPCLESRDGRFIPIRKVRIREAKKPILVGTGVRERYVASGGIHHIGLFVVRDARRREVWESEVVQITDAYERHREHLPVVCRTHDAEEAAFLFSLMKDDTVELEKDGTRGIYRVKKFEATGKITFVPVNNAMLDKMQYTTGAAWSRMPATLKPMSPRKIVIDLLGKVHPAND

SEQ ID NO: 15712 - protein, 1238 aa, unidentified
  REGION 1..1238: note = Cas Enzyme sequence
MSPALDSSQKYILGLDLGSASIGWAAIRLNDQLEPTEVFDAGVRIFDPGVEVTAKISTEEAIMRGIDRSKAVGRRLARQARRQSGRKRARQNKLFKLLQANDWLPTYEEFRDEPLFAQKHLTFNRLDKELADALSGSRRRRGADAVMLDIDQALPYVLRKEALERELKPCELGKITYHLSQRRGYRPSAVDENDREESAEEEETASSSKKGKKKRETEDDGDEQSTGKVEKGISDLNTKMQAAYQTGTIKAPLIGPYFGTFIAHNPHDERIRHRWTAREMFEDEFDLVWAKQDEFYRTSHPGLTPEELEKREKLRQEIRKLLFFQRPLASTAHLIGFCDLEPEERRAPWASLEAQQFRLLQKVNNLRYFDRTDMLEKQLSEEKSAKLVMKLQEEGDQTFPAIRKLLDMPDAEFNLQKKRKPDDEPKKKINEGKIEGNRVNAVMLRVFGAERWDSFTWDEKVAIVESWRTTEGLKERERIAADQWSLDKFHAHIWAENRPPADYCKLSRKAILNLLDPAKGGMWNGVPFMTARLKVYPNPLAGKKPLDYVPEVTGPNGSIRSLTNPAVIRALTEVRKVVNAVIRKHDKPYEIRIELARELRKNRKQRKDTEEANEKNHERRLEAARRILQECKSYDPQGLDAEGLVRAKRDDVTKMLLLMECHCTCPYTGQSIGYSQLFGGEVEIEHIIPQSMMVDNSFDNLTLTFRGTNHEKLDRTPWQHFGGNQDDWENILKRVEKFGNKRKLALFQLLTPEQARKFGARRLNDTRFTSKLAGRLLMTLYGGRDVLPDAGVEVDEQDEFKDSTGRRAIFVSSGMVTALLRDAWMLNLHELIGDSATKTAETAHEKREKNKESKKKDRSDHRHHALDAVVIGLTTESLIRKINTLSASYYVQHQNDRYISLGYRELLKLVRREARPECLNGERLERLRDTFKGIVTSHRVNHRLRGELHKAGYFGKERGRTPKNDTPIRHKRISIRDLSKMEKPEDIESTIAHIVEGKNKDGSPNTTIKQIVREFGETIRGKNKKGEEVRGYRMWKEAEHRYPTLPGKRLGKPVPIKKFTTWFTKHTTSLGMENRGKGYPERNVETGEIAYVSFFNVQNRRGTKWKWDVVKLFDAAQSIQSVPKRERARTNIFALPSDEFKKSLRDDDEVTYRFSLMKGDLVEMENGEIVIVRRFESDGRIWISAVNAAGTDKMLNETNSLHRIGLSDFLKKRPKDSDSPQPIRIDPIGNKSRIELGA

SEQ ID NO: 15713 - protein, 1063 aa, unidentified
  REGION 1..1063: note = Cas Enzyme sequence
MSSAPERPQKYVLGLDLGSASLGWALIGLDDSDDPLSLIRAGVRIFEPGVDGTSMDIEQGKDQSKAVERRTARLHRRQLRRRAARQRDLFRLLQRYSLLPSPEAIIGSPEEQRHSILNRLDQQLTHKWQSAFPVNRFAQLPVYFLRKTALDQPLETHEVGRILFHLIQRRGFLSNRRENKQNPDQKKELGQVKAEIHSLEQEIQNAGARTLGEFLAGLDPHAQKVRRRWTARKMFQDEFEKIWEAQAIHRPALLTPELHDKIAHLLFYQRPIAAQTHLIGKCELEPGKQRAPWAAMEAQRFRILQKVNDLRLINPGSLISDPLTEEERQRLYHLLDREGDQTFKAIRKYLSFSAEVQFNLEKGDEKRLRGNRTQAAMRKVFGERWDTIGEGKQHQIIENWRNSESDEVLIREAMEQWSLDAAAATLLSEQTPEPGYCAVSLAAISKLLPLMASGKSFKVAETELYGARFSGGTIFETLPEVRKQLESLRNPAVERSLTELRKVVNAIVREYGKPHEIRIELARELKKPRQERIEATKKNRNRQREREDVAVRILRECGLSNPSRRDIEKARLHEECGGYCPYTGRHIPFSTLFDNSEFDVEHIIPRSRYPDDSFQNKTLCYLPENRDVKKGQTPWEAYGKDEQRWAEIMTRVSSWKNRGKMARFAIQTEEALGDFSARQMNDTRYASVLASRFLGALYGGRDLVDAEKVRQVIFASSGAVTATLRSSWGLEAILREIVPTEPGELRGKPRTDHRHHAIDAITIALTRPKVIQSMALAASLEPWQRDSRAWRKIESPWRDFVLSIRPHIEQMLVSHRPEHKMSGELHKGTNYPAPHNYKGKPTVHTRCALSALSAADIADDEVIVDPAVRDAVRAKLEKLGGNPKLFDRPENAPCLESRDGRFIPIRKVRIREAKKPILVGTGVRERYVASGGIHHIGLFVVRDARRREVWESEVVQITDAYERHREHLPVVCRTHDAEEAAFLFSLMKDDTVELEKDGTRGIYRVKKFEATGKITFVPVNNAMLDKMQYTTGAAWSRMPATLKPMSPRKIVIDLLGKVHPAND

SEQ ID NO: 15714 - protein, 1006 aa, unidentified
  REGION 1..1006: note = Cas Enzyme sequence
RQLRRRAARQRELFQELQKAGLLPTNANGAGASSEQRHQLLNELDRSLTSKFLKPNDDSFAQKPLYLLRKIALDHALEPFELGRVLFHLSQRRGFKSNRRETKKSAKENEDLGQVKADIHSLELAIQEAGARTIGEYFAGLDPHTEKVRRRWTARKMFEHEFALIWTAQLPHHAPLLTQELHDRVHELLFFQRPISAQKHLVGTCELERGDDKHPPKRRAPWATMAAQRFRMLQKINDLVVIDSKSQTSRTLTHEERGKLYQLLDREGTQSFTSIRKYLDFKGTTFNLEAGGDKDLPGNRTQKSMRKVFGIFWDEFTEGKQNQIIENWRNSESDESLMEEAIAHLGLDTEAAAVLVKESPQADYCSLSLTAITKLLPLMMSGRSFKDAETEIYGSRFSGFAVHETLPPVREALPTLRNPAVERAMTELRKVVNAIVREYGKPYEIRIELARELKKPRQERVKATTANRKREADNKGIAAKILSECGIANPSRTDLEKAKLFVECGGICPYTGRSIPFSQLFQDSEFDVEHIIPRSRYPDDSFQNKTLCYLPENREHKRNQTPFEAYSNNPDVWAQILLRVTKWSNPGKLSRFKIQSESELADFSARQMNDTRYTSVLAARLLAMLYGGRDVESDNGNRQVIFASSGAVTATLRRAWGFERILQAIVSPEPGETRGKPRTDHRHHAVDAITIALTRQSVIQAMANASAFEPWQPGTRSWRRVPEPWTTPDFIRSLTEQIEKMVVSHRPEHKISGELHKGSNFSIPYLYKGKSTVHTRCALSELKPADIAADDAIVDKAILALIRAKLNEVGGNPKAFEDPNNLPCFTTANGRKIPIRKVRIRQVKEPKVAAKGERERFVDSGGIHHVALFVARNETRQEQWLSEVAQVTDVYQRCPRRDKRSGRPKAIANEPAVSRKLKDNPEAEFLFSLMKDDTVELDYNGAREVFRVKKFYAAGPIWFTGVNNAQMDADQKKNRTTWSKNPNGLRTLNPRKVVVDLLGRVHPAND

SEQ ID NO: 15715 - protein, 1095 aa, unidentified
  REGION 1..1095: note = Cas Enzyme sequence
MSSTLEAPQKYVLGLDLGSASLGWALIALDESDNPVSLIRAGVRIFEPGVDGAKPGTPASAQEIQFGKDQSTAVARRQERLRRRQLRRRVARQRELFGVLQGAGLLPTGDVLGAGIGSEQRHRVLNNLDADLMNRYRSSADKANFGQMPLYALRKKALYEPLALDELGRVFFHLSQRRGFQSNRKDVQKKTKGSEDQGQVKSAIHELEQAIQVAGAQTLGEYLAGLDPHEQKVRRQWTGRKMFEKEFQMIWDKQKEYHTDLLTSELHGRIWDLLFFQRPVAAQKHLVGKCELEPDKRRAPWAALLAQQFRLLQKVNDLRLIEEDGNELPLNEDGRIAVFNLLENHGTQTFAKIKQHLGLPKTAEFNLERGKAKELKGNITAQSMRKVFGERWTQFSAGKQNQIIENWRNSEKDEELRREAMEHWGLDEAGANAVVNEKAPGDYCSLSLMALGKILPLMRAGKSFKEAETEIYGNRFSGAAVHSLIPVLRPNRKHFRNSTPPPQDPLMASIANGLRNPAVERSITEMRKVVNAIVREYGKPCEIRIELARELKKPRSKRLDETARNRKREAENKALAERMHNECGMPQNSSRNDLEKAKLWVEQQGQCPYTGRSLPFSRLFDDNNGFDVDHILPRSRHPDDSYQNKVLCWGDTNRMVKRNQTPYEAFAEQDPENWHQILARVARWKNPGKSRKFEIRSTDELAEFSSRQLNDTRYTSLLAARLLSTLYGGRDLAENGRKRQIIFASSGAVTATLRRNWGFEQILRNIIPPEPNESSGKPRTDHRHHAIDAIVIALTRNDVIQAMARASALEPWQPGTRSWRHVPQPWHTPNFFRSVEEQVREMLTSHRPEHKVSGELHKGSNYGRPYLYNGKPTVHSRVSISALRSQDIEDDDVIVDRRVRDILRTKLAEIGGNPKAFEKPENTPYILTPAGKRISIRKVRIRETKNPLRVGEGSSERYVAPGGIHHVELFVTRDEKRRETWDSRVVQITEAYERRREKKPVVARTLEEDPEAQFLFSISNDDTIEIKDGDRHKIVRIKKSAENKQIFYVPVNDAHTDTDQMKLAIVKSKTPSTLKSLDPRKVVIDLLGKVHPAND

SEQ ID NO: 15716 - protein, 1070 aa, unidentified
  REGION 1..1070: note = Cas Enzyme sequence
MSSAMETPQKYVLGLDLGSTSLGWAMIALNQADEPTSLIRAGVRIFEPGVDGTALDIEQGKDQSKAVERRTARLHRRQLRRRAARQRELFQELQKTGLLPTNAAGTGASSEQRHELLNDLDRSLTLKFLKPDDDSFAQKPLYLLRKLALDQALEPFELGRVLFHLSQRRGFKSNRKETKKSAKENEDLGQVKADIHALELAIQEAGARTIGEYFAGLNPHTENVRRRWTARKMFEQEFALIWTAQSIHHGSLLTQELHDRVYELLFFQRPISAQKHLVGTCELERGDDKHPPKRRAPWATLAAQRFRMLQKINDLVVIDARNQTSRKLTEEERGKLYQLLDREGTQSFTAIRKHLDLKGTTFNLEAGGDKDLPGNRTQKSMRKVFGIFWDEFTEGKQNQIIENWRNSESDEALMQEAIEHLGLDTEAAAVLVKESPQADYCSLSLTAIAKLMPLMLSGRSFKDAETEIYGSRFSGLAVHDTLPPVRDALPTLRNPAVERAMTELRKVVNAIVREYGKPYEIRIELARELKKPRQERVKATTANRKREADNKGIAAKILNECGLANPSRADLEKAKLFVECGGICPYTGRSIPFSQLFQDSEFDVEHIIPRSRFPDDSFQNKTLCYLPENREHKRNQTPFEAYSNTPDVWAQILLRVTKWSNPGKLSRFKLQSARELSDFSARQMNDTRYTSVLAGRLLAMLYGGRDVETDNGNRQVIFASSGAVTATLRRSWGFERILQAIVVPDPGESRGKPRMDHRHHAVDAITIALTRQSVIQAMANASAFEPWQSGTRSWRRVPEPWTGPDFVRSLTEQIENMVVSHRPEHKVSGELHKGSNFSRPYIYKGKPTVHTRCLLAALSVADIEADDVIVDSAVRAAVRLKLNEIGGDPKQFENPANVPVLKTVNGRMIPIRKVRTRETKNPLKVGHGMNERFVDSGGIHHVSLFVVRDESRKENWESAFVQITEAYDRRRKKLPVISRELGTTPEADFLFSLQKDDTVELDFNGRRAIARVKKFFATGQIWFTDANNAQMDAEQKKQKTTWSKRANSLKDLNPRKVVVDLLGRVHTAND

SEQ ID NO: 15717 - protein, 1126 aa, unidentified
  REGION 1..1126: note = Cas Enzyme sequence
LRQGGIEMSAALETPQKYVLGLDLGVTSIGWALADIEAQEIVSTGVRIFEAPMDVAKFEAGEPGGSHAAARRKSRLQRRQTNRRQARHRDLYLALQSAGMLPFAGKKAEDRHKELTTLDVRLMNKWRPRIHSEAPEIGDPDQVLCYYLRSKAASEKMELEDLGRALYHLGQRRGFKSNRREGRSGLGSSEAKKEEAERSQIKSSIKSLQSELDANELTLGQRLAFVNPHRVAIRNRKRADIAPIWTARRMYEEEFERIWTTQAFHYPALLTQNFKNRIERLMFKQRDVSAGKPGTCELERKPALPRAPRSSLLAQHFRVVQTVNNLRVDYASEKPMDIETWRTKQKELITTLSTLIFERKGKRSNQPLFGIPFAQLKALLGLSKRAKLNLDDDETNSYLRGNRTNAIMSRAFGTDRWKNMDEQEKIRIVRRWITESSPEKLSRIAKTQWELPHDAAEQLASLEPEEGYAALSHVAMLKLLPHMEKGLTYSEAIKEVYGNVLSNKEEHKYLPPVDDEDSALPRIPNPVVKRALSELRKVVNAVIRKHGRPDRIRIELARDLKRNAEQRERLHENIKLRTRERAAAKKWIEERGERPTDRAMEKVLLYRRCKDCVYCTKPLGPCEALFSDSSGIEVEHVLPRRCNDNSFSNKVLAHRACNSTKGDQTPRQRWDPSPEWDEMLKLVRSLKDKALLDRFTISTEEELQAFTNRHLSDTRYISKLATEYVELLYGGRDAAIPWEDRNRRCVYASSGALTAEIRKRWGLQAVLNPSTERTSSVVKSRDDHRHHAVDAIVIALTTESVIQRAAFEAQRHDRASGHLLPRYFSPPWPAQGDIEERISQFRSEIKRVVNSMNVSHRPKHKMSGELHDATNYGKPYKVGKKDVVHIRKGVAGLSENDIENIVDSNVREAVKAKALEPGGLADCEKKKEWPVLHAPNGTKIPIRKVRLKKVLDVTPVGDEIRRRYVAESSNHHMVIYAQLDAHGKDKRWDSIVVSLQEAYDRVAAYKRTDAWKQHHRITPIILHSPSGSEGLHFRFSLMGGDTIETQKDYNERGKLYRAGIYRVRTIATNGQVSLVRIEDSRMKKTIKDAKEWWSPGVDALRKLGCHKVVVDLLGGIHYAKESAFTQ

SEQ ID NO: 15718 - protein, 1090 aa, unidentified
  REGION 1..1090: note = Cas Enzyme sequence
MSPAMESSQKYVLGLDLGSASLGWAMIALDPVNDPIGIIRTGVRIFEPGVDGTSLDIEQGKDQSKAVDRRTARLHRRQLRRRVARQRELFQELQKAGLLPVSEIGTSASSEQRHQLLNDLDQELARKFALSVDDSTFAQMPLYLLRKRALDHPLGPYELGRVLFHLIQRRGFKSNRKETKKSPKETEDQGQVKDATHSLELEMRAAGARTLGEFFAGLNPHDSKQKVRRRWTARWMFENEFKEMWDKQAPYHPSILTPELHDRVAHLLFYYRPISAQKHLIGTCELERGDATHPPQRRASWASMAAQRFRILDKINNLRIINPVTDSARKLTEEEHAKLYSFLDREGTQKFAKIRSHLGLGKEISFNLERGGDKDLPGNRTQQSMLKVFGPRWYEFADGKQNQIIENWCNHDDDALTQEAANLGLDAECAALLVKENPQADYCRFSLKAIRKLMPGLMKGLSTTEAQIEVYGNPLAGLTVHDKLPQIREVLPTLRNPAVERAMTELRKVVNAIVREHGKPHEIRIELARELKKPRSERQKETDRAKKRERERTEIVKRILLECGNANPSRSDIEKGLLHRECGGICPYTGKSISFRGLYTDSEFDIEHIIPRSRFPANSFQNKTLCHQSMNQLKGNRTPYEMYRGNPEEYEKVLDRIRAWPIKNRGKLDRFRVGEPGVKEDNTLEGFSSRQLNDTRYTSKAAAKLLATLYGGLIRETSAGNEQAVFATSGAITATLRSTWGLEEILRELVPPQPGDDRGKPRTDHRHHAIDAIAIAATRQSVIQAMARDSALAIDPRTRPKVLQPWKDFVPSIRPHIEQLLVSHRPEHKLSGELHDETNYGRPYQENKKTMVHVRKRVSGLSPKDIPNIVDPEIRHAVMQKAEELGGDLTVCDLKETWPVLPTRNGATIPIKKVRLKKVLDVTPVGNDTRRRYVAESSNHHIAIYSQVDAHGKEKRWEGVIVSLLEAYQRVSAAKRTEAYKQRRRVTPIIQRSLPGAEDHQFRFSLMGGDTVELHRACDHAASICAPDTYRIRTIAASGQLSLVKITDARMKKDIIATKDWWQPGVDALRKLGCRKVVIDLQGRKRYAND

SEQ ID NO: 15719 - protein, 1065 aa, unidentified
  REGION 1..1065: note = Cas Enzyme sequence
LSSATEALQKYVLGLDLGSASLGWAMVALDSANEPTALIRAGVRIFEPGVDGTSLDIEQGKDQSKAVDRRTARLHRRQLRRRVARQRELFQLLQRSDLLPVPESGCGASSEQRHKLLNELDQVIARRFKELGESASFGQMPLYLLRKRALDHPLEATELGRILFHLSQRRGFKSNRKEVKKSAKENEDLGQVKADIHALEKEMCDAGARTLGEYFAGLDPHIQKVRRRWTARKMFEEEFAAIWTAQQPHHISLLTDELREKIARLLFYQRPIAAQEHLIGKCELEPGKQRAPWATMAAQRFRILQKVNDLRLIESGNSISKPLDEEQRARLYRLLDREGTQTFAAIRKHLGIAKGIQLNLERGDEKDLRGNRTQKSMLKVFGDRWDTFSEGKQNQIIDNWRNSESDEALIREAVEHLGLDNDAATRLVAENPQSDYCSLSLTAIGKVIPLMQTGKSFKEAETEVYGSRFSGLKVHDTLPTVRQHLVSLRNPAVERALTEMRKVVNAIIREHGKPYEIRIELARELKKPRQERVQATKSNRKREVENKRVATMMVTECGLPPDPPRKDLEKAKLFLECGGICPYTGRSIPFSQLFQNSEFDVEHIIPRSRYPDDSFQNKTLCYLPENRENKRNRTPFEAYGGDEDRWAQILARVAKWSNPGKRDRFLLQDTQQLVAFSARQMNDTRYTSVLAGRLLETLYGGRDVIESGGTRQVIFASSGAVTATLRRSWGLEGILQELIPAESGQSRGKPRTDHRHHAIDAITIALTRSSVIQAMAQAASLEPWQEDSRAWRRITSPWKDFVGSIRPHIEQMVVSHRPEHKISGELHKGSNYARPYIYQGKATVHTRCSIASLKVADIEADDTIVDPAVRNAIRSKLEELGGNPKLFEKPEDAPCLQSVDGRTIPIRKVRIRETRNPVKVGQGMRERFVASGGIHHVAFFVVRGPNRKEKWDSRVVQITDAYERRRRKLPVVSRELATIPDAEFLFSVMKDDTVEVSDPKGTRVLRVKKFNDQKQMWFVPVNDAHDDGQQMKLGIAWSKKPSGLKDLCPRKVVVDLLGKVHAAND

SEQ ID NO: 15720 - protein, 1100 aa, unidentified
  REGION 1..1100: note = Cas Enzyme sequence
MSAAMDSSQKYVLGLDLGSASLGWAMIALDDADKPTSLLHAGVRIFEPGVEGTSADIQEGKDQSKAVDRRTARLHRRQLRRRAARQRELFHTLQATGLLPVGESGAKAGALERQALLNELDQSLVLKFSPSTDNAADATLFAQMPLYLLRKRALDHALEPFELGRILFHLIQRRGFKSNRKETKKSPKENEDQGAVKAEIHSLEQEMRAADVRTLGEYLAGLDPHTQKVRRRWTARWMFEKEFKEIWVKQAPHHPSILTPELHDRVAYLLFFQRPIAAQKHLIGECELECGDATHPPQRRAPWASMAAQRFRILQKVNDLKVIHPDSDIATPLSPEDRMKLYHLLDTEGTQTFKAIRKHLGISKECFFNFEKSDQNKDGEKTLLGNRTQHSMLKVFGRFWYEFTEGKQNQIIENWRNSESDEILMQEAVQHLGLTPEEAQLLVNEKAASDYCALSLKAINQLMPLMLEGASFKTAETTIYGDRFSGLTVHETVPEMRKILPTLRNPAVERAMTELRKVVNALVREYGKPHEIRIELARELKKPRGERLKETDKIRKREKERADIVKKILTECGNSNPSRADIEKGLLHRECGGICPYTKKVINFSSLYNDSEFDIEHIIPRSRFPDNSFQNKTLCHQSMNQLKGGRTPYEMYKGTPEEYEKLLDRVRSWPIKNRGKLDRFRVGEPGVKEDNTLEGFSERQLNDTRYTSVAAAKLLATLYGGRERINPDGSKEQAVYATSGSITAALRSTWGLEEILRELVPPQPGDTRGKPRIDHRHHAIDAITIAATRPAVIAAMARDSSRAIDPRTRPKIEQPWKNFIPSIRPHIEQLLVSHRPEHKLSGELHDETNYGRPYQENQKTLVHIRKRVAGLSTKDVANIVDLEVKKAVERKAAELGGNLAACELKNDWPVLSTRNGSTIPIKKVRLKKVLDATPVGNETRRRYVAESSNHHVAVYAQLDAAGKEKRWDGVIVSLLEAYQRISEAKRSEAYKKHRRSIPVIQRSITGAEDLQFKFSLMGGDTVELHRNCDHISEVCNPEIYRVRTIAANGQLSLVKITDARMKKDIQAAKEWWSPTADTLRKLGCRKVIVDLQGRRRYAND

SEQ ID NO: 15721 - protein, 1129 aa, unidentified
  REGION 1..1129: note = Cas Enzyme sequence
MDFRKYTLGLDLGSASLGWALVELDDKDNPVRLMDAGVRIFDPGVVGGEAEIQKGRDKSKASERRSARQTRKQTHRRSLRQKKLFRLLQEHGLLPSAENRAQQKFSIQRHEILNALDQQLTSAWRGKATLPGSSMDMADQSLVYLLRQNAVDRKLEPFELGRILYHFAQRRGYRSNRLDADDAGESGNADTGEATESSEGATKKAKRAKEPTEKTLGEVAKGISTLRSEMDAKGTRYLGSYFAMVNPHEKRIRHRWTERAMFEEEFTAIWDKQREFHSELLTDQLEKEVRYWLFFQRPLASSNHLVGFCELEKGERRAPWATLEAQRFRLLQKVNDLRVIERGMQNERRLKKEEREHILDHLETKGDLTFKALKELLAPSIIDGANMERGIKDKIEGNRVNIHMLRVFGDRWNALSREDRQKAVEQWRTIESPETLKRVGREQWQLDENAAERWGDARLARPPKDYCNLSRLAISKVLPMMETGCPFKTVEREIYDSRFSGAEPMKLVPRVTDYLPSITNPAVMRALTELRKVANAIIREYGKPYQIRIELARELRRNRRDREKQFLDNKARQEKREKGARWILAQQSKPDPSAQDIRDVPGHMVDKWLLAEECGWKCPYTSDPARAQINYSKLFVYPEFEVEHIIPLSRCTDNSLANKTLCHRDENQRKGGRTPWEAYHEDEDRWAQILKRVSQFANGPKLREHPKLRRFKLRSLEEIEGFTRRQLTDTRYTSKLASRLLMALYGGRDTTVSADDDTAEFFDKTGRRIFASTGGVTHLLRDAWVLHPDVVLNMSSMNDGEKRKGKDRSDHRHHAVDALVIALTNEQQVKAVSLHAASKQEKKWPLDYRDLVRGLKTPWNNRDQFLGDVFHRMLVSHKPEHKLGGKLHIDTIYPEPLRDPNDGKHYVSLRRSIVGITDKQIKAIQGDNIRIAVEQKLQEHGGNSKKFDPDNLATLPVLKSRDGRLIPIKKVRVRESKSPESLMSFPGSRQVESESIHHFEFFARRDRKNREEWTHIPVSIIEAHVRYGRKNPVIARAHSEDQNAEFVFSLMKGDTVEMDYNGSRDVFKVKKFYSSGQIWFTQINNAQKDEEQKKDKTAWSVNPNPLRLLNPQKVTIDPLGRKYGVNRAT

SEQ ID NO: 15722 - protein, 1065 aa, unidentified
  REGION 1..1065: note = Cas Enzyme sequence
MSSATEASQKYVLGLDLGSASLGWAMVALDSANDPTALIRAGVRIFEPGVDGTSLDIEQGKDQSKAVDRRTARLHRRQLRRRVARQRELFQLLQRSGLLPIPESGCGASSEQRHKLLNELDQVIARRFNEPGESASFGQMPLYLLRKRALDHSLEPAELGRVLFHLSQRRGFKSNRKEVKKSVKENEDLGQVKTDIHSLEKEMCDAGARTLGEYFAGLDPHIQKVRRRWTARKMFEEEFAAIWTAQQPHHISILTDELREKIAHLLFYQRPIAAQEHLIGKCELEPGKRRAPWATMAAQRFRILQKVNDLRLIEPGNSISIPLDEEQRTKLYGLLDREGTQTFAAIKKYLGIAKGVQFNLERGDEKDLRGNRTQKSMLKVFGDRWDTFSEGKQSQIIDNWRNSESDEALIREAVEHLGLDNGAAARLVAENPQSDYCSLSLAAIGKVMPLMQTGKSFKEAETEVYGSRFSGLKVHDTLPTVRQHLVSLRNPAVERALTEMRKVVNAIVREHGKPYEIRIELARELKKPRQERVQATKSNRKRAVENKRVATMMVAECGLPSDPPRKDLEKAKLFLECGGICPYTGRSIPFSQLFQNSEFDVEHIIPRSRYPDDSFQNKTLCYLPENRENKRNRTPFEAYGGDEDRWAQILARVAKWSNPGKRDRFLLQDTQQLLAFSTRQMNDTRYTSVLAGRLLETLYGGRDVIELGGARQVIFASSGAVTATLRRSWGLEGILQELIPPESGQSRGKPRTDHRHHAIDAITIALTRSSVIQAMAQAASLEPWQEDSRAWRRITSPWKDFVGSIRPHIEQMVVSHRPEHKISGELHKGSNYARPYIYQGKATVHTRCSLASLTVSDIQADDTIVDPAVRRAIRSKLEELGGNPKLFEKPEDAPCLHTADGRAIPIRKVRIRETRSPVKVGQGMRERFVASGGIHHVAFFVVRGPNRKEKWDSTVVQITDAYERRRRKLPVVSRELATIPDAEFLFSVMKDDTVEVTDPNGTRVLRVKKFNDQKQMWFVPVNDAHDDGQQMKLGIAWSKKPSGLKDLCPRKVVVDLLGKVHAAND

SEQ ID NO: 15723 - protein, 1091 aa, unidentified
  REGION 1..1091: note = Cas Enzyme sequence
MYCLPLARVKEDVVPSERSSPFVLGLDLGVSSLGWALLDPRNQSFAAAGVRIFNSGMDENKFERGEQGASNNVERRKARLHRRQLRRRAARQRDLFLALQEAGLLPAEPRGDSPENRHCVLENLDRRLTYTWAERIQAENPLIVAPQHVMPYFLRARALDYPLELHELGRALYHLGQRRGYRSNRREVRSLQDEEAGKSKKPKLPADDDDKQVLAEIAGLEVELASSGTRTIGEFLSRKDPALARIRTLHTARKMFEEEFEKIWAAQLPHHPGCLSTELKRVLHKLLFDQRAISAGKRGMCELERNCQRADMYTLAAQRFRLLQKLNDLAVIHLDDEKRPLSSDERLLLMQRLEEDGDITFEQARLMLRLPKRTRFNLAVEGDKRIPGNRTNAVMLQAFGDRWKTFGDSERKHMVRVWAEAEQAETLANIATQEWGLDAIAARKLANAEPEYGYCALSIHAISKLLPAMEQGEHFKTAETNVYGNRFSGNDAKDFLPPVEDVLPQIPNPAVMRALTELRKVVNAIVREHGKPAQVRVELARDLKRSARDRQRLADIAEDNRKRRARMVARIQAETGLRREPSGRDIEKGLLFEDLQECAYCGKPINFQTLFSDTPQFDVDHILPLSRFPDNSYANKILACNTCNATKTNKTPVEAFGPDAEMWDKIVMRVSRTRKTGKQERFALGEDKRRRFLLQNDDEVAEFSARHLADTRYISKLAARYLEELYGGRDRQVPWEDQRRRCVFASSGMVTYTLRKAWGLNSLLADAGSNHNEAEKNRGDHRHHAIDAMVIALSNQAVIQRLSSAAAMGDGRIVGRISSRTAPPPWGAFVDSLRPLFQGINISHRPDHKLNGALHDDTNYGWRKEGGKDCARLREAVSKAAGHANRIADPKVREAVMQKLEELGGKAEKLATNLPMLITRTGKQVPIKKVRVTVKNKPQVIAEGARQRYVALNANHHVCIFETKNSKGGVVWDSPGVVSRYEAMQRWKRQPIVQRNLSKGEEGRFLFSLMNGDVVEMDDVRAARSLYVVRGISDGEIDFVRHNDARKKDGLKKASDLSGDFVRARSIDRLREWNCRKVIIDVLGRIRNAND

SEQ ID NO: 15724 - protein, 1061 aa, unidentified
  REGION 1..1061: note = Cas Enzyme sequence
MDWTTDVPEYTLGLDLGSASVGWALIALDSLHKPQGLLRAGVRIFEPGVEGSTMDIERGKDQSKAVARREARLHRRQLRRRAARQRDMFLLLQEKSLLPLAADASANLSDQRHQVLNDLDRELISDLCRTAKTDDLRPVKESLPYFLRKSALDRKLSAFELGRVLYHLIQRRGFKSNRKEGKERKDDELGKVKAGISELAAQMTSAGVRTLGEYFAGLNAHERRIRGRWTARSMYEKEFEKIWQSQHQYWADVLDDGFKSKVGWLLFFQRPIAAQEHLIGFCELEPEERRAPWAFLEAQRFRLLQKVNDLEVIEFGKLDERPLTQEERDAVFAKLENDGDQSFAELRKLLGLKKSTFNLERGGEKRLRGNRTNSFMRSVFGVFWDEMPEEEKHKAVTLWYRTESEEKLAARARELWALDENAASRFAEIRPEDGYCNLSLKALNRLLPLMQDGISYGAIRPKLYPELLHEPKNLLPLVREAVPSLRNPAVERALTEVRKVVNAIVRQYGKPYEIRIEMARELRKSRKEREESTRHNRSRQREREGAKARILKDCGIQNPSRSDVEKALLFEECGGICPYTGRTIEFSSLFGDSQFDIEHIIPLSRCPDDSFLNKTLCYHHENRSVKGGRTPWEAYGADDERWAQILERVKKFSNPAKFRHFELRSEEELREFTERQMNDTRYTTHLAVDLLSTLYGGRDIPRGDGTSRRVIHATTGMVTATLRRSWGVEAILREAVPSYNGESKGKPRTDHRHHSVDAIVIALTSQAMVQRMSAAAANAPSWQSGRRSFQSMQSPWPNFVDSIRPHVQNMTVSHRPEHKMSGPLHKETIYGQPYVFEGRSVVNLRRPVQGITPAQILEIPDVAVRQAVEAKLLEYGGDSSKFNPEDMSTLPYLVTNRGERIPIRKVRVRETKNADALIELRGNRFVQSDEIHHVELFVQREGRKEVWTHYPVTLMEAYSRHGRNRPVVSKELEDAPSAEFLFSLMKGDMVEMNYNGQREVFRVKKFYSAGPIWFAGANNAQPDKDQQRDGTRWSKNPNALRQLRPRKVAVDLLGAIHPAND

SEQ ID NO: 15725 - protein, 1398 aa, unidentified
  REGION 1..1398: note = Cas Enzyme sequence
MCLWHIKTLCYHEENRSVKRGRTPWETYGADEESWAQILERVKKFGNQAKFRRFELRGEEELREFTERQMNDTRYTTRLGVDLLSTLYGGRDIPRADGTNRRVIHATTGMVTATLRRAWGVEAILREAVPSHNGESKGKPRTDHRHHAVDAIVIALTSQAMVQRMSAAAASAPSWQTGRRSFQSMESPWPDFVDSIRPHVTGMIVSHRPEHKMSGALHKETIYGRPYRFEGRSVVNLRRSVQGITPAQVMDIPDPAVRQAVEAKLSEYGGDSTKFNPEDARTLPSLVTNRGEHIPIRKVRVRETKNADALLELPGKRFVQSDEIHHVELFVQREGRKEVWTHRPVTLMEAYSRHRRNLSVVSRELEDDPSAEFLFSLMKGDMVELDYNGQRGVYRVKKFYTAGHIWFAHANNAQPDPSVPDAFVLKRGGGEWRTSHNHYEFIQRIPQNDEQFFRRWQGRCKDRLSDGADARTVGQLASEGLIHGAPEIIGGRIASGNTVGAARAFRDFMLRNSRTYSAIEMESAGFLKACVEDGGERDRIVLKAITDFGDERKERLDKLPRNAVRAWAMSNVFDLVSVLSPRLVHAVDPHGRAIVPMHDRQPLLAQSFELAQRHFKKQHQARAERLRNVLPAYGALFRCVLSSPRMSFGEDKDLFETLAAHIAVSDHPHPVRIDGKPGTGKTTFLTLLFHALHRLASTDDSVPIPIYINLKRYATPDRGGEEECDAGCLMEHDLRLLEEMPDKPVVILIDGIDEYVRYNESVEYRLMELIDRCPRARKIVGVGLNHFSDKDLYTRNTPILLEPQVTITLGDVQRTSAESQTFLRAFLDANRFDGHMSVDDLMLQAKRFRLHSIDLQTASMLFDSFDVQKYAKASSLSEFFYMFCQRFLRGHETLDDAAKLAFDYVVKGERVDVRGLAKKRAWKLLHIHITIVDYLIAYYVCSVVREAGRNPNTELSDLNWVYPYRINRFSKDIVNLSLKSQIDVRRGAQLIFEKGDQKAKPHACYLVGRLENANEKEKAKEWLTKSCKSYIEKLRQEKKEHLDRDELLLARTVYISLAYLGDTNASDTYISLLVSRKDWNDVNRGFHLEYYDDIPFDPEQQLSHRDPLAAFPRTFETLRERLEQHISDFDYGLFNIEVVTLYSLAQHRHAHRNLNPEVWMNLRDFIPKLMESEFLSEPVREYLMMLLRVFRKPYFAQGQVAMNLYRLKRVKRQGWVERKLGLARVESVADHTFGACLLAMLYLPDEGPTDWAGYDKSEIITTLLAHDLPEAFTGDITWKKQSEQTQRREQVVFGCLSMASTYANIADVTEYHRLYMNFENGTTLNGRIAKEIDRIENLFQMYLYGQKVQIHDFEVWRRSLVDSVRTDAGKCVLKIIQDMFPQRNVNPFRPPTGTKRKR

SEQ ID NO: 15726 - protein, 1034 aa, unidentified
  REGION 1..1034: note = Cas Enzyme sequence
MDVRIFGFDIGTTSIGFAVIDHDPLRETGDILRLGVRIFPEARDPDGTPLNQTRRTKRMVRRQLRRRRTRRRALNEQLAGLGLLPRFGSKEWDRVMAEEPLALRARGLNEALSAFEVGRALYHLAQRRHFSGRDGDEDAREVAADEKKAAESRESALKLLKQSGQTLGEFLHAIEPHVRKRGVHVIRSTVEDEFERLWAAQALHHAVLRDPEVKAKIKDTTFAQRPVFWRKSTLGNCRFMPGESLCPKGSWLSQQRRMLEKVNNLAIAGGNMRPLDADERAAILDRLQTQGSMTWGGVRAALKSIFAAKGDSGGEKRLRFNLEAGGDPTLPGNGLEAKLADIFGEEWSGLQHRQAIRDAVQQRLWDADYREIGTQRVVIRTEQQRSERRVEFGRRLIEEFGITEQQAAAFSTMKLPSGWEPYSVKALELFLPHLEAGVRFGALVSGPEWEEWRRTTFPDRDQPTGEELMRLPSPADKEEQRRLTDLRNPTVIRSQNELRKVVNNLIGMFGKPGLIRVELARDVGKSKKEREEKQKGQRLQEIRRKEATKDLRANGIEPSHDDIEKWLLWKESQCRCPYTGDQICFDALFRRGEYEVEHTWPRSRSLDDSFANKTLCRRDVNAAKGNKTPFEFFAHDPEEWVAIIRRVEGMEASKSGVGMSRGKIKRFLAREIPEGFAARQLNDTRFAARQAVGFLKRLWPDVGIEAPVTVQAVTGRVTAQLRKRWELNYILGDDGEKTRGDHRHHAVDALVVACTHQGMIQRLSAYWQGKEDPRAEHPHLSPPWPGIRADAARAIQGIVVSHRVRKKISGPLHKETVYGDTRHDIMNGKIVYREFVTRKKLEALSKGEVDDIRDSAVKEIVRKWVADHGGDPKRAFGTYPRVSADGPEIRKVRLLSKQQLKLMAEVSTGYADLGSNHHIAIYRLPNGKADFEVVSLFEASRRLAKHEPIVRRIRGDGSGFVMSLATGDALEFPAGDNLGIWIVNGAWGSGQIVLERANDAAHSTTTRPKPSTLLAESVRKISIDPIGRIRPAHD

SEQ ID NO: 15727 - protein, 1060 aa, unidentified
  REGION 1..1060: note = Cas Enzyme sequence
MPLIFGLDIGTTSIGFAAIDYDAERDSGHIIRLGTRIFPEARDPKGTPLNQTRRQKRLMRRQLRRRKQRRRELNTLLADLALLPPFRSAAWAAVMRMSNDNDPYTLRVRGLTEKLEPFELGRAIYHLAKRRHFKGRDAVEGEEKAAGTETDADEAKKEKAAQSEREMTLVHLKDTGQTLGQWLAGRGPHERRRVVHAIRAVVADELDRLLAKQAEHHPVLRDPSTLERLKDTILYQRPVFWRFNTLGSCRLDREAEPAPRASWASQQKRMLEKLNNLALAGGNARPLDAEERRAILEVLQSRPSMTWAQVRKSLEPIWKAQGHDPKSLKQQKFNLEYGGERSIPGNLVEAKLAEIFATKWNDRTDRDRLRRLAPELWWTASYTRLGQRVVVRPEGERRQAREENARRYASEFSIAPDKARSLAEITLPPGWDAYSEAALEKVLPRLEEGHRFGALMTGPEWEDWRNRTFPSRVAATGEVLDRLPSPGNADEQKRLSSLRNPTVVRVSNELRKVVNNLINFCGRKPDLIRIELAREVGLSKREREERQTGIDKNERRRRDAKKDLQGNGILEPSREDIEKWLLWDECGRFDPYSGKPICFDDLFRNNVFQVEHIWPRPISGDNSFANKTLCHRDFNARKGNRTPFQAFGHDADWDAMKQRMWERVNARAMSKRKAERFCSDQPIPEDFASRQLNDTGWAARAAMAQLKRLWPDVGPEAPVTVQAVSGRVTGHLRRLWGLNNVLAEDGEKTRADHRHHAIDALVVACTHPGITQRLSRYWQAKDQDHVREPPLDPPWRTIRADAEKAVAEVVVSHRVRKKVSGALHKETTYRDTERNASMHNEATVNGKYRVFATRIPVEKLAANCLLETPPPREKYRVVDDRVRETLRAWVAKHGGEPKKAFAAYPRLTPDGPEIRKVRVHIKQQLELMARLNPRIKGYADLGDNHHVAIWQNADGSLGYRVTSLLEAARRLARREPIVQCPKDARRVMSLAKGETIDIPDGEKKGLWVVTGAWANGQIVLDRIQDAIGNTTWRPNPNTLLSRGAKKVAVDPIGRVRPAND

SEQ ID NO: 15728 - protein, 1038 aa, unidentified
  REGION 1..1038: note = Cas Enzyme sequence
MALIFGFDIGTTSIGSAVIEHDARTSNGRILRLGVRIFPETRQPKSNAPLNQQRREKRMARRQLRRRRGRRRDLNDLLAANGLLPEFGGPEWDDLMGLDPYQLRARALNEKLNLKEIGRAIYHLAQRRHFKGRDLALSEDDESKAEEESMRDEARGLARELEQSGKTLGQWLSALPAGERRRGRHATRAIVEQEFDRIWESQASRHGNPFSAELRDAVWHAIFFQRPVFWRKNTLGECPLIPGAALCSRGDWISHQRRMLEKLNNLELIGAGARRLDDEERGAILSALQTQRQMTWAGVRRTLAPLYRQRGQAGEQKRLKFNLETGGERGLPGNPLEFTLAKLMGETWNEHTHQHAIRQTVHERLWNSDYSTVGDQRVVIRPLEERSYRRRTAAESIVKDFGLPDTFVDELAEISLPSGWEPFSRRALEKLLPELERGIRMGELLASPTFEDWRDQTFPERRQPAGRAHELLPSPADAGETKRLRAIRNPTVVRCQNELRKVVNNLIRLYGKPDLIRIELTRDVGRSKRDREEYTRAIRKRERERKAAENDLIQNGLRTPSRDDITKWLLWKECRKICPYTGDTIGFSNLFHDGEFDIEHIWPRSRCLDDSFLNKSLCRSDINKEKGNRTPWEYLGHDRDRWHAIQNRLTGMSRKKGGAGMSFGKVKRFLATEIPDGFVNRQLTDTGYAARESVSMLKQLWPDEGPQSPVRVQVVSGKITARLRKLWGLNNLLHTGAEKNRADHRHHAVDALVVACTRPGVVNELSRYWRHKEQSYGEAPTPLPPWDSIRTDASRVLPKVVVSHRPSRKITGALHEESHFSDTGVEIKRRGTVYRQFVRRKPVSELSLKEIGNIRDGAVREIITEWVQQHGGDPKKAFAEFPRLGPTGPEIRKVRVTEEKRPELVMPLNRGSVDKGKNHHLAIYQTTEGALHSICVSRNEAAHLQATSGSPVRRNLGNGEKLLFSVSPGDSLLVPSGSEDNPELWIVESTKANGQVTIKKAHEATESTKTQPMLTSLVKRGSRKVNVDPIGRVRPARD

SEQ ID NO: 15729 - protein, 1039 aa, unidentified
  REGION 1..1039: note = Cas Enzyme sequence
VVDHEPEQKGKILRLGVRIFPEARDPDGMPLNQTRRQKRMVRRQLRRRRSRRRLLNETLAAAGFLPDYHSPQWAEVMAMEPYGLRQRGLAGHLSAFELGRALYHLAQRRHFSGRAIEEAIEQSKEDADEKAASSRRDSTLKLLRSEGKTLGAWLSERNPHEMRRRGEHAHRSVVRGEFERLWAEQAKYAEQAKYDVSLRDDAFKAVVEDAIFAQRPVFWRKNTLGQCRFMPGEELCPKGAWLSQQRRMLEKLNNLAVAGGNARPLDAAERAAILDKLQTQESMTWGGVRAALKPLYKEQSEPGAEKRLRFNLELGGENKLLGNPLEAKLAKIFGKTWSNHRHKQAIRDAIHERLWKADYGTIGGQRVVILSDHERQRNRERVRQSFIDDFAVAPEQAEELTKLKLPAGWEPFSIKALQAFLPQLEAGKRFGALTNGPECEQWRDETFPARDKPTGEVRDRLQSPKHKEERDRLAKIRNPTVVRVQNELRKVVNNLIGMFGKPDQIRIEVARDIGLSKREREEKQSGIRKNEKRRKDAVKDLESQGIQQPSRDAVEKWLLWKESRERCPYTGDQIGFDALFREKLFEVEHIWPRWRSFDDSFRNKTLCRRDINLAKGNRTPFEYIGHDSQKWAEIKKRLDSMIATKGGDGMSPGKVRRFLAETLPDDFASRQLNDTGYAAREAVAFLKRLWPDVGERAPVNVQAVTGRVTAQLRKLWELNNILADDGEKTRADHRHHAIDALTVACTHPGMTNKLSRYWQAKDDPRAVAPNLPPPWPTIRADATAAVEQIVVSHRVRKKVSGPLHDDTIYGDTREDIETASGTYRLFVTRKKLEALSTEQLEKIRDDRVRAIVKAWVAARGGDPKKAFPPYPRLGTDGPEIRKVRLLTKQQTKLMAEMKNGYADLGSNHHMAIYRRADGKADFEVVSLLGAARRLARREPVVRRSRDDGATFVMSLAPGDAIEFERGAERGRWLVQGISAAGRPTLSRLTDARPTTQSEAKRLGMDGKRKDFEPRFGGFMSRHPTKLSIDPVGRIRKAND

SEQ ID NO: 15730 - protein, 1036 aa, unidentified
  REGION 1..1036: note = Cas Enzyme sequence
MARIFGFDIGTTSIGFAVIDYDRHKETGTIHRLGVRIFPEARDPDGTPLNQQRRQKRMVRRQVRRRRARRRLLNETLSSMGLLPAFASDDWPAVMAMDPYELRTRGLGEKLAEHEVGRAFYHLAKRRHFKGRDIAEVEDEADEAADEKEAKTDREATLRALKKEGVTLGAWLAKRAPHERKRHVHANRTTVEDEFEKLWAEQAKDHPKLGDEAFKARVKDAIFAQRPVFWRKNTLGQCRFMPGEPLCPRGSWLSAQKRMLEKLNNLSLAGGNQRPLEPDERAAILAVLQTQASMSWSAVRTALKPLFKAKGEVGAEKSLRFNLEVGGDSKLPGNAVEARLARIFGDAWATHPQKQAIRDAFHQRLWAADYGVIGDQRVVILAERERRQRRASAAQSFIDEFGVTADQAEALRELSFPGGWEPFSIRALQAFLPKLDAGVRFGALLHALEWEKWREETFPDRDQPTGEVWDRLPSPAKKEERERIAKLRNPTVARTQNELRKVVNNLIGLFGKPDLIRVELARDVGLSKRQREEKQKGIRDNERRRKKAKSNLESNGIADPSHDDIEKWMLWEESQHRCPYTGDCIGFDALFREGRYQVEHIWPRSRSLDNSFRNKTLCRKDINIAKGNRTPYEYLKHDPDQWAAIKSRLDGMMARKGGTGMPPGKVRRFLAEQLTDDFASRQLNDTGYAAREAVAFLNRLWPDIGPEAPKTVQAVTGKVTAQLRRLWGLNNILADDGEKTRADHRHHAIDALTVACTHGGLTQKLSQYWQAKDHPSATAPHLPPPWPTIRADADKAVAAIVVSHRVRKKVSGPLHKETTYGDTEEDVVTNGVTYRSFVTRKKVEALTKGDLEDIRDPRVRSIVQEWVAAHGGDPKKAFPPYPRLGDDGQEIRKVRLVRKQQLDLMAAVSTGFADLGDNHHIAIFKRPDGKADYEVVSLFEAARRLVRREAVVRRTAKDGAKFVMSLAPGDALQLVAGSKKGVWVVTGVWANGQVILEGHTDAQSTSTTRPNPNTLLRDGAAKISVDPIGRVFMAND

SEQ ID NO: 15731 - protein, 1037 aa, unidentified
  REGION 1..1037: note = Cas Enzyme sequence
LERIFGFDIGTTSIGFAVIDHNPDQSTGNILRLGVRIFPEARDPKGMPLNQQRRQKRMARRQLRRRRMRRKALNEALHQAGLLPAYGSLYWPIVMGADPYDLRKRGLDEGLSAYEFGRAIYHLAQNRHFRGRELEDSDSPGSDADDEKEAQNEREATLKALKNEQATLGEWLSRRVPPERKRGVHAHRTVVEDEFEALWTAQSEHHLTLQDEALKSKIKDTIFAQRPVFWRKNTLGDCRFMPGEALCPKGSWLSQQRRMLEKLNNLAIAGGNARPLDDEERSAILFKLQQQASMSWPGVRRALKTVYMQRGEPGAEKRIKFNLELGGESKLLGNALEAKLANILGADWPSHPHAYEIRNAVHKRLWAADYGETPDKKRVLILSEEERKLRRGEAAKSFITDFGVNEQQAAELQALKLPTGWEPYSISALNSFLPELEKGEKFGALVNGPDWENWRREVFPNREQPTGEILNKLPSPASKEERERISQLRNPTVVRTQNELRKVVNNLISLYGKPDRIRLEVGREVGMSKRERQEMTGGMRKAETRRGNAAKDLRSKGILNPSRNDVEKWLLWKETQERCPYTGDQIGFDALFREGRYEVEHIWPRSRSFDDSLRNKTLCRKDVNIEKGNRTPFEAFGHDEDQWSAIQVRLQGMVSAKGGACMAPGKLKRFLATEMPDDFASRQLNDTRYAAKQILAQLKRLWPDMGPEAPIKVEAVTGKVTAQLRKLWTLNNVLSDTGEKTRADHRHHAVDALIVACAHPGITNKLSRYWQMRDDPRVKKPTLMPPWDTVRADAEKAVNEIVVSHRVRKKVSGPLHKETTYGDTGEDVKTKSGTYRQFVTRKNVENLSKGEMGRIRDPRIREIIKEHVASQGGEPKKAFPPYARVSPSGPEIRKVRLTTKQQLGLMAPVGNGFADIGSNHHIAIYRMPDGMIQFEIVSLYEASHRLATRRPIVNKSSLDDANFVMSLSAGEAIQFPGGNKKGIWIVQGVWDSGQIVLKRDNDASDATTTRPRPNSILREAAVKISIDPIGRIRPASD

SEQ ID NO: 15732 - protein, 1035 aa, unidentified
  REGION 1..1035: note = Cas Enzyme sequence
VRTPKKYRLGLDLGTNSLGWCVVELDDENAPTRFLRMGVRIFPDGRNPKDGSSLAAARRLARSMRRRRDRFLKRRARLLRLMVEHGFMPAEREDREALRSLDPYELRRRGLDAPLTPFEFGRALFHLNQRRGFKSNRKVDRADDKERGKIATAVGKVREQMAAEGARTIGEWLAKRHETRASVRARLNGQGARCEYELYVQRSMIADEFDSLWAVQSRFNPAVFTPIARAGLRDTLLFQRRLRPATPGKCTFEETENRAPLALPSVQRFRILQDANNLRILQAGQPERALTRQERDRVVQALLHSAKRSFDQLRKLLDLPETAAFNLESAKRKDLRGDTTGAELARATAFGPRWLALPLEKQDEVVRFLLDTEEEETVTSALREQYGLSVEQAAQAARVRLVDGYGSLSRKAILKILPHLESDVVTYDVAARAAGYDHTGHRGLGGEMVHLPRYCELLSQYTGAGSGERRDRPEKRFGRIANPTVHVALNQLRAVVNAIIDKFGLPHQVVIEMAREMKLSQKRKKEVEQEQRERQDENEGYRRMLEEHGLPSNGGNLLRVRLWTELARSPTDRRCPYTGEMISFGRLFSEEVEIEHILPFSSTLDDSVSNKTVAMRRANRDKGNRSPFEAFGHSPPGYDWEQILNRAALMPSNKKRRFAPGALERYQTEGDFLARHLTDTAFVSRVAREYLTAVCPPNQVWSIPGRMTALLRRRWGLNTLLSDTDWKNRSDQRHHVIDAAVVAVTDRSLLQRISTLAARGAEREVHRVLEGLDEPWDGYRRGLEFGLGKVIVSYKPDHGAAAGLHNDTAYGLVDASQSIEGKVKVVHRVPLISINAEKVELIRDPAIRRRVQEAISGKTGKAVTAALEALSVQTGIRRVRMVESLTVIPIRRADGTPYKAYKGDSNYCYQVFVSTKTGRWFERVVSSFEAAAAKLSAIEDPMVMQLCINDTVRFNEVGSPPSILRVVKFNSNGQIIFASHHEGGNLKNRDADHSDSFKYRYCSASSLQKLQAQQVVVDPIGQVWPVKVRHEGAHR

SEQ ID NO: 15733 - protein, 1041 aa, unidentified
  REGION 1..1041: note = Cas Enzyme sequence
MPLVFGFDIGTTSIGFAAIEYDANQATGQIRRLGVRIFPEARDPKGVPLNQYRRQARQRRRQLRRRRKRRRQLADTLFQAKLLPARDSPAWDEVMKSDPYELRRRAFEGKTLASHEIGRAIYHLAQRRHFKGRDLDEIADGAEPAGDDADDKKTASARDKTVRELKHGDKTLGAWLAERGPHDRKRGKHATRELVEDEFKKVWLPRIPGGFQSSVRDTIFFQRPVFWRLNTLGECRFVPGAQLCPRGSWLSQQRRMLEKLNNLSLAGGNQRRLDGDERQAILAKLQVQKSMTWAGVRRALASVYRARGVAGEEKGLKFNLQEGGENKLVGNAIEAKLKGIFGTGWQDHPSKQEIRDSLPRRIWQADYEEVGGQRVVILPAPERKARRAAVARRFADEFSLSDAQAVAIESMKLPPGWEPYSIKALQAMLPHLEVGVRFGEIVNGPDWEPWRTETFPDREQPTGEVLHRLPSSADPDERKRVAGLRNPTVARTRNELRKVVNNLIDMFGKPDLIRVEVARDVGNSKREREEKATGIRRQERRRSRARKQLEKNGIIEPSRADVEKWMLWEECRHRCPYTGDSICFNDLFRRGKFEVEHIWPQSLSLDNSFRNKTLCRTDVNADKGNQIPYDFFRNDPDEWVTVANRLDKMKKASKVGIGMSFGKIRRFLADSIPDDFVSRQLNDTSYAAREAVSQLKMLWPDAGPEGPVKVQAVSGRVTAHLRRLWGLNNILADDGEKTRADHRHHAVDALTVACCHPGVTQRLARYWQDENNPGAAKPQLPPPWAAIRINAQQAVADIVVSHRVRKKLSGALHKDTVYGDTQEIVSGPRGEIYRVFVSRRNVEDLSQRDLSEKNKELWPDQKLRETILAWVNKHGDGDPKKAFPPYPKRGRKGPKIRRVRLRKKQKIDLMAKVSTGYAGLGNNHHIAIYRLPDGKVEHEVVSLMEASRRLAQREPVIRCDRGDNAQFLMSLSPGDSLRLTRNDATNVQVVSSVWGNGQVVMTEHNDAVRATEFRPNPNTIVSSGGTKISVDPVGRIRSAND

SEQ ID NO: 15734 - protein, 1041 aa, unidentified; identical to SEQ ID NO: 15733
  REGION 1..1041: note = Cas Enzyme sequence

SEQ ID NO: 15735 - protein, 1116 aa, unidentified
  REGION 1..1116: note = Cas Enzyme sequence
MMMSTTMMKISVMGAIMSGQKAKFRYRLGVDVGVASLGLAILDLDNTTNTGNGSASGSATGEAGFKIVGGSVVTWPLPTGAEERRLKRAMRRNIERKERRLDRLSDLLAAHEIGTVRKQMPKDILDQSPIKIRAKATHQRVELAELARAILHLAKHRGSSAFREDDIKDENEARQTALGMDNLRREMAAKGFKTYGQYLRWREKQDMPTRINPNKMADAKDGYAFYPSREMLQEEFGLIWDRQARCSPTVLTNALKKQVEDELFFQRAITTPPPGDCPYTEGEKRLARASRLFQMRRIYEDANHLRFSGRQGQVIPYGKAERDKIVARLMAGEDLGINDLKTTIGQKTSIRVSVEDVKAKKGIDGYPFDRRLGAIDVLGAHWRNADPDTQDQILDILNTEHDQNAAKAALADLMDGDVDAAQRALKTSLPSGWGHMGLTATVKVLDQLKADVIPVILAIEQAGLVHVSTATGDVRGRLPYYGEILVGYTVPPMWVSRYRLETDRPPHTDPLEQKFGRIPNPVVHQALRVIQKAVNAVIKKYGLPESIHIELARDLNKSAEAREEIERRNEKNRKASDKAAEDIRAIGETVNRLNIQKYKLWKEQAGLCLYTGEALALVDLFNGTSNVDHILPRSKTFDDALSNKVICTRAANADKGNKAPYAAFADNSNYDWAAIMRRVEKLSSAKRWRFDANAMQQFEDQDRFRARYGTDNAYIARITRQYLTCLYREPHHVVAVSSHIVGLLRGKWGLHGILGSKSNGKKARDDHRHHFVDALVTACATRAMVGRIQHEAARTERDGLETFVDTIAPPFGTAKMFFNAAREATLERVSLSRKPDHATTGQLHEDTLLGIVDGPDAKGFYVCRKRKKLTDYDTLAALEKSSLKDTLPDLAEIEEAKASLDDIRRSIRHHSVQAEEDLETQRRADIAAGKKGKKVSDRAIYSKALTLHENANGKLSFTLFEKNKLVNIRRAKDGNRPTGGYISGRNHHMDFYVDAKGKIRWQLINMIEANDKNFVPDSARPGHQLLWSAHKEDLLLIDNPDAPEQRIRVIVAKISEGKLGVVPEADARESKDRIMWEKGLLFFTTRSAQRIVTDALGDITWHFPALPKSGKQAPPS

SEQ ID NO: 15736 - protein, 999 aa, unidentified
  REGION 1..999: note = Cas Enzyme sequence
MREFTLGIDLGTTSIGWAVVADEPVEGEANVLAGVRIFPEGVDRDTKGLEKSKMAQRRDSRHMRRQHDRKARRKQKLSITLREVGFLPPQGPEWQLLRAASPYQLRRRGLDAPLTPHELGRVLIHLNQRRGFKSARKATNKKEDSKLAGKISELRAKIDAAGARTLGEYLAGLEGKERIRNLGEDHSHHAGREMLAEEFEKLWTAQAPHHPGRLTDKLKDGIAQAIFHQRPLKLDPNKIGKCEFLTDLRRAPRACWLAQQVRVLQDVNHMLLVMANGERRGLATSERTKVLDLLAKSKAVDMEKIRATLGLTEGDRLNLEGQKRKKLPGNGAEATLRKQFKTAFDAKPDFYRLEVWDSLIDDGEEEFTRKAQAWGFTEKQIEELLGADWPDGHASLSREAMKRLLPHLEEGKAYAEAVEAAKLKPEPPPALELLPPSSRDIANPIVRQALVEVRRVVNALIQEHGKPTNIVVEMARETKGSADDRNKMLRKNREREKERDEIKQRIRDEFQVMPSGGTALKYRLWKQQQELMAGACPYCGERIDETALMAGNPDYHVDHILPYRRSLDDSQNNKIVCHTRCNSEKGDELPAVKWPAETERGAAILARVAGLPGPKRSRFLRKEIDVDTVIARQLNDTRYICRVVREFLQQLFGPGQKHLVKVTRGQVTSELRYRWGLNSILSPDGNEKKNRLDHRHHAVDAVVIALTTAKHVHNLAHREDFRLRGQDFPPPAGWRNKEAFREEIGRVIDAIKVSWKPLRHVRGELHEATNYGQITGKAARGEENVFIRRKPLDAKFSKASAEKIQDERIRELVLNRLAEHGDDPKKAFVDPLFLPNRRGAPVLIRRVRVREVMTTAAPLARRGESQPYRWVKPGSNHHIAIFEKSNGKRFGVVVTMHEAAQRVLRGQLVIERTCLDMPQAKFCYSLSLNEVFRLEEQANSGLYRVQQISASPRVVLRPITLAVLGRKDAEPLLVRRSPSTLIGRKVVIDPLGREFPAHD

SEQ ID NO: 15737 - protein, 1061 aa, unidentified
  REGION 1..1061: note = Cas Enzyme sequence
MLRLGLDIGKNSIGWWLYNIAADQPSQILDGGARIFSDGRVAKTGASLAVDRRNARAMRRRRDRYLQRRAMLMKRLAGAGLMPADPVQARALEVLDPFALRATGLDNPLPLTHLGRALFHLDQRRGFKSNRKTDGGDNEGGKIKDGSARLDQAMMAAGARTYGEFLHKRRAAAPDPRHVPAVRTRLTLRQNVDGDKPESGYDFYPDRHHLEEEFQKLWLAQSRHHVELTEELGALLFETIFYQRPLAPVKVGRCLFNAEPRLPKSHPLTQQRVLYETVNNLRIAAPGQAARPLRRDERDTIILALNSKEPLKSPGGTKITLKSLAKTLKLRDGEGFTLETTARDAIACDPVRASLAHPDRFGPRWSALPETDQLVLVDRLRNDADREALVAWVREAHGFDADRAGAVADAPLPEGYSRLGETATRAILVALKSDVLTYDKAVAACGLRHSDLRTGEVLDALPYYGKILDRHIIPGSQDPAHDDITRYGRITNPTVHIGLNQLRRLVNKIIGVHGKPDQIVVELARELKQSEDQKLEDSKKNAQNLRAAQLRSEKLGQLGQPDTGANRLILRLWEELNPNDAAHRFCPYTGEQISAGMLFSGKCDVDHILPYSRTLDDSTSNRTLCMREANREKRNQSPWEAWSGTAKWAQIEDNLKYLPDAKRWRFAPDAMAKYEGERDFLNRALVDTQYLSRIAREYLDALYNGQDGKRHVWVVPGRLTEMLRRHWGLNSLLTDKARGAGKSKNRLDHRHHAIDAAVIAATDQGLVQKISTLSGQNRENGLEEFAASVPPPWETFRVDIGTQLARIIVSHRADHGRIDPAARAKGRDSTTGQLHNDTAYGLTGETLKGVPLVVTRKPIDSLTPAMLEKIRDPQLVQGLSIATKGKDGKDLSAAVRAFSDRPGPYQGIRRVRIIEPVEIIGIKDRDGVVYKGYKGDSNQCYEVWKLPDGKFLPWVISTFDAHHGDTGRPHPAAKRILKLHKNDMVRLDSRKFGPVTATVERFDANGGIALVAHNESNADQRYRKEKDDVYIRLTATSLMASGARRVIVDEMGRVNDPGPPK

SEQ ID NO: 15738 - protein, 1008 aa, unidentified
  REGION 1..1008: note = Cas Enzyme sequence
MARTLGLDLGTNSVGWALIEEDGGRPTAIVATGVRIFQEAVDAKTRLPKNQQRRAARALRRILDRRRRRKQKLRAILLRAGLLPENLLKSATPETVFNELGDPYALRKRGLDHALRPHEFGRVLTALCARRGFQSNRKSLLGALAVEFEDLIDAAKHLGGISATDSTARQEIEKEEGIVLAAIQTLRDDMQRTAARTLGEYLADRPAGERRRGRFTDRAMFREEFDLLWERQREHITALADDGLRARVFDAIFFQRPLKSSKALVGRCSLEPSRRRAAVARLESQRFRLLQDVNHLAVRNPVTGLFRDLDTPERQALVGLLARQRTMGWGAARKALGLRKDELFNHEEGDRDELKGDTTSAALAGILGSTWEQMDPETRRALVEDLLTIADKAHLVRRLREHWRFPREQQYQLAVLELEPGYMAHSVKAINRMLPTLELGAKYFEAKQLAGYKLQETRKTSERLPPPPMVRNPVVQKALGETRKVLNALLQAYGKPDTIRIEMAREVRMSARQLAAFNKQQRANEKSNERALEQLASVGLAAPRRDDLIKYRLWEECGGECPYTGRAIGIHQLFSADVDVEHIIPYSRRPDDSYMNKTLCFADENRMVKRGQTPWEAYGADAARWGAILQRIRRLPPPKQHRFAMAEVATLDEFISRQLNDTRYVAVQVKNFVAALGSDIQVTKGLPTAMLRRYWDLNRILSQDPASKTRTDHLHHAVDAIVIACTNRSVYQRLASSAASSFEAVAGSRTNSAISPWPTFTEDVRRSLETVVVSHTPSRRLAGALHEETAYGYRPATGLYHYRKRLDALFSTKALDRIADPVIKKLVRDRLAEHGDDAKKAFSQPLFHSDGATPIRRVRLTKTANRASVVGVRNLAGEEYKFHDLRNNHHVEIFESADGTQKFGKVVSTLEAARRTRADAVPEVSREGGRGARFVMSLMINDMVEIIAPSGIDYYRVQKLSNDGRITLRHHRAATLDLNHECLLARPSTLKGRKVTVDPIGRVQNAGD

SEQ ID NO: 15739 - protein, 1052 aa, unidentified
  REGION 1..1052: note = Cas Enzyme sequence
MWRLALDMGTNSLGWAVFALNAAGQVEGLKDAGVRIFPDGREPSSKDRVGDSLAVERRLARGARRNRRRQLSRKQRLTDRLVQFDLLPQDAAARAEIIKLDPYALRATGVERVLTPHELGRVLFHMGQRRGFLSNRKSDGNDEETGKIKPRISELRRLLDKKTLGQWLHEQKEQGKPIRFRGEEGDFFADRAMYLHEFDAIRAKQQPHHSLSAQDWDNIRNGNRDQQFDGLFFQRKLKPVERGRCEFFIDEYRAHKDLPIAHEFRILQEVGNLQYYDENQQKHALDEQQRNIVIDLLNQQKTVSFGALRKLKHADGRFVFPRGCLFNLESGPRDKLNGNATACDMRKAELLGDHWDALTADDQNDLLEMLHEAEDDHQLIEDLVDRFGISAEQAEAVSKFKLSSATTHLSRKFMTRCAAIMREDHLGYDAAVREVYDDDGVFFHHSRYVVDQLLPKLPYYGEVLKGSMIGGQPDKHDPKKNPEQHFGKINNPTVHVALNQLRKLVNCLIERFGPPAEIHVELVRDLKKSTKARDDIAKQNKKFAKANEKRADLFQGLHGGQAPSGLDLKKMRLWEELGPDQLTRHCPFSGRIISAQMLFNGEAEIEHILPFSRTLDNSTANLTVAVRQANRLKGNRTPYEAFAHGQHEGQGMVWQDIAARAKLLPQNKRWRFDADAMDRFEREGGFLARQLTDNAYISRLTKRYLSHVCDQNKIATIPGGLTAMMRGKWYLNSLLGDHNFKERNDHRHHAVDAFVVGLTDRSMLQRVSSQANRRADDRVQIDLPDITPLRNQLKARLDNMIISYKPDHGTNGKMYKETAYGIVPPEQQDPELKGYGLVTRKKLASLTDKEILAIRNPGWRERIFEHVAGAKANGVKLDKALADFGQDNNIKTIRILVSNQSAVPIPSAPYKAYAPDSFVCVDIWQVPKGRQGKWKKGEFDWKGAFWSYADCKGQSPDKNQGQIDGKPIHPAAKFITRLFKNDMIEIEENGVQQIMRVAGFSTTDNRIDLRPQYETQEARKYYSINVLKTLSLHKLSIREDGTMGVRHGHTGC

SEQ ID NO: 15740 - protein, 1051 aa, unidentified
  REGION 1..1051: note = Cas Enzyme sequence
MVWRLALDMGTNSLGWAAFSLDNSSHIRGLTDAGVRIFSDGREPSSKDRVGESLAVERRLARGARRNRDRRLRRKQDLMQRLIELRVMPKDPADRKALEDLNPYQLRADALNRPLRPDELGRVLFHINQRRGFLSNRKSDGDDEETGKIKPKITALRAALNGQTLGQWLNARLIAGQSIRFRGEDGDYYADRAMYLDEFDRIRAVQQAHHSLSVDNWDDLRNGNKDQGFDGIFFQRKLKPVERGRCEFFIDELRAHKDLPIAQEFRILQEVNNLQYYGDDHEKFTLNEAQRSKMIEVLNSQKTLSFGAIRKFKKPDGSFLFPRGCFFNLETGPRDKLNGNATAVDMRKPGLFGDAWDALSVDDQNDAVEMLHDAEDDDQLIADLKTRFDLNDGQAREISKFKLSAATTHLSRKLMIRCADIMRETGQRYDEAVANVWDDDGVLLHHSHRTVDELLARLPYYGEVLRASVMGGKPGQYEAKEHPEQHYGKINNPTVHVALNQLRKLLNCLTGRFGPPAEIHVEVGRDLKKTAKARNDIAKQNKAFAKANERRAKLFGEIMNGAQPSGLDLKKMRLWEELGKDQLSRLCPFSGQPISAAMLFNGEAEIEHILPFSRTLDNGAANLTVAMRQANRVKGNSTPFEAFATDQHADKGMVWADIAARAKSLPQNKRWRFDGDAMEKFEKDGGFIARQLTDTAYIARVTKRYLGHICDQNKIHTVPGGLTAMMRGKWHLNSLLGDHNFKERNDHRHHIIDAFVVGLTDRGTLNAVSRQTARGADDRVRIDLPDISPLRKQLDDRLQTIVVSYKPDHGTTGKMFKETAYGVVAKDKQDPDLKGYDLVTRKAIAALTDKEINAIRNKGWRSLVQDHVARAKVAGTKLDKNGLAKVLGAFGKAHNIKTIRILLSNQSATVISSAPYKAYAPDSFVCVDIWQVPKGKPGKWKKGEFEWQGAFWSYAACKGEMPDKNAGHIGDHPIHPAAKFITRLFKNDLVELREGEQAVIMRVAGFSTTNNRIDLRRQYETEGKQKYFSINTLQRSFIRRLRVSEDGTIKG

SEQ ID NO: 15741 - protein, 1049 aa, unidentified
  REGION 1..1049: note = Cas Enzyme sequence
MGTNSLGWSAFSLVKQGEVNNLLDAGVRIFSDGREPSSNDRVGESLAVQRRLARGARRNRDRRIKRKNQLINRLVKLGLMPDSKEERKSIEKLDPYYLRATAVNQQLPPFELGRALFHINQRRGFLSNRKSDGDDESGVIKPKITTLRNALGKQTLGQWLYARVASGRSVRFKGEEGDFYADRAMCIDEFDKIRSQQAQYHSLAENDWDDLRNGNKVQGFDGIFFQRKLKPVERGRCEFFINEYRAHKDLPISQEFRILQEVANLQYYGDNHTKHSLDDSQRALVLEILNEQKTISFNALRKKKFPDGSLVFPRECLFNLENSPRDILKGNATAIDMRKLEMAGSNWDKLSPSQRNDILELLHDAEDDQIIVGDLISQFGFNEKHAKAICKFKLSPATSHLSRKFMERCSAIMRDEKIGYDAAVREVYDDDGVFLHHSKYQVDQLIDKLPYYGELLRGSVIGGKPTDFDARLQPEQYYGKINNPTVHVALNQLRKLINALIERFGPPDEIHVELVRDLKKTAKARDDIAKENTKFAKANEKRADLFSELNNGAKPTGLDLKKIRLWEELGSGQLTRHCPFSNKPISAAMLFNGEAEIEHILPFSRTLDNGTNNLTVAIRQANRLKGNRTPYEAFSGGQYESQGMVWDKIAESAKCFPKNKRWRFDSDAMERFDKEGGFLARQLTDNAYISRLTKKYLSHICDQNKITTVPGGLTAMMRGKWHLNSLIGDHNYKERNDHRHHIIDSFVVGLTDRGMLQKVSAQTKRGADDVVRIELPDITDLRSQLEDRLSSVIVSYKPNHGINGKMYKETAYGVLPKEKQNADLPGYGLVTRKKISALSEKEIGAIRNAGWRSRIQHCVTEAKASGPKFDRSRLAKVLNEFGENNNIKTIRILVSNQSALTIASAPFKAYAPDSFVCVDIWQVPKGKPGNWKNGEFEWKGAFWSYAQCKGNTPNKNAGLINGQHIHPAAKFITRLFKNDLIAMQEGVETIISRVAGFSTTNNRIDLRPQYETAGAKKYLSINVLKDKFKKRLGVSEDGLRRGGNGYTDC

SEQ ID NO: 15742 - protein, 1018 aa, unidentified
  REGION 1..1018: note = Cas Enzyme sequence
MRIIGIDVGINSVGYSYVDMANCQILEMGSRVFEAAENPKNGSSLALPRREARGTRRRLSRKAKKVSRLRTLLRDHDLPIKKHIKLSKHDLSPWQLRKQGLERLLTDEEFARVLVHFAKHPGFQTNRKSAPPNEETTFTKAGNDLYQAMQADGGKTMGSWLADKPKQRNDHGDYGRTIIRDHLREEIKILFKAQSDFGQCKATDRLCKDVIKFAFYRRELQSSLGMVGNCAVYENELRAAKKAYHAELFVALSRLVNLKILSRHGVGRTLTIDEIALFEKTVLTNNSITFAQARKLLSLHDDETFNLASYTYKPDEDITHDEIKLRAEKACLVEMKGFHDLRKGLEKLSKMDWHAIASRPDDLDQIAYALSFFESEDDIRFQLASLNLSEQQIVALLKIPDFSKTIDISIRAAKDIIPYLRCGKTYMTAVLDLCPDHLKRSGDQALLPPLSQSTKNPIVDRSLSQIRKVVNALIRKHSMPDYFHVETARELGRNFKDRKKIEAENNERKKFKDKTRKHALEIFGYEPNGDELARFRLWKEQKMYCPYSGEQIKPHHLSNGTDTQIDHILPYSRSFDDSWSNKILCFSAENQAKQNLTAWEYMDQKNMTSALEAFAKGQNQHRSKKLLIQDFNTDKEKEWKSRHLNDTRYVARALAAYLEQNLLPNKGVKKIVRTRKGALTSKLRHLWGLPEKDRDNDHRHHGVDAVVIACATQSMVGRVARWNRYQRKTKNDPGFFADAPWENFRKQVLAKRDEMFVTRQPSRKTKGQLHDATIKSLRENDDDTWRAVKRIKLPSLKLGDLKNIIDVDFECGNAIGRNAVLYNVLHERLTAFDNDPKKAFAEPIYMPLKAGKTGPNGENHGPEIKRVRVYDNAKAGFRLPHKSIADNSEMAWTEVYEKDGKFYLLPIYTWQVATKKWPKALITAGKDEANWPLVDETYDYHFSLYKNDFVRVEKKSEIIEGFFKGTHRGTAAIRIEEHKGSKTDEPGTKTLKSFKKYNVGIFGDRTEVKESAPWRGEP

SEQ ID NO: 15743 - protein, 1049 aa, unidentified
  REGION 1..1049: note = Cas Enzyme sequence
MAWRLALDMGTNSLGWVALKLSHSGEITQLIDAGVRIFHDGREPAAKGRVGDSLAVERRLARGMRRNRDRRNERKQNLLKRLKDLNLLPLSRQENDALIALDPYALRAKAADDVLRPYELGRVLMQLSQRRGFKSNRKSDDDEESGTIKPKISGLRKALDGQTLGQWMHQRLLSGKSIRFRGEDGDYYADRAMYLQEFDAIQKMQKNHHTLSSGDWKDLRNGNRDQAFDGIFYQRPLKPVERGRCQFFMEEFRAHKDLPIAQEFRILQEIANLHYYDGHEKFSLNDQQRDALIQALDKQKTMSFGAVRKLKTPDGTLLFPKNGLFNLEEGKKDKLKGNATAIDMRKPELFGTAWDNLNEDDQNDIVEMLHDATDDDDLIRELMARFDLDQAHAKAVSNFKLTAATSSLSRKFMSRCTDIMRDEKIGYVEATPKIYDDDGVFLHHSHSVVDQLLDRLPYYGKILQGRVIGGKPTRFDAETHPEQHYGKINNPTVHVALNQLRKLVNVLSAHYGPPDEIHVELGRDLKKSAKVRNDLSKENATFAKANDKRADLFRELNGGQNPSGLDLKKMRLWEELGKDELTRLCPFSGKNISAAMLFNGDAEIEHILPFSRTLDNGPANLTVAMRNANRLKSNRTPYEAFANGQYAAQDMIWSDIMDRAKALPKNKRWRFDQDAMEKFNKNGGFIARQLTDNAHISKVTKQYLGHICDQNKIVTIPGGLTAMMRGKWYLNNLLGDHNFKERNDHRHHIIDAFVVGLTDRGLLQSVSSQTARGADDIVRIKLPDITELRHQLGDRLGDIIVSYKPDHGTVGKLFNETAYGIVPDDKQDKNLKGYNLVTRKKIDALSEKEIHAIRNPGWRNLIIDHVEQARARLGKLDKNALAKTLAEFGTAHNIKTIRILVSNQSATVIKSAPYKAYAPSSFVCVDIWQLPKGKPGKWKTGEFEWHGAYWSYDQCGGKSPDKNKGLIKGKPIHPAAKFITRLFKNDLIEIRNGTETEIMKVAGFSTTDNKIDLRPQYLTESDRKFFSINGLRQAYIRKILFDESGTRKG

SEQ ID NO: 15744 - protein, 1050 aa, unidentified
  REGION 1..1050: note = Cas Enzyme sequence
MAWRLALDMGTNSLGWAAFTLTHSGEVEQLLDAGVRIFHDGREPAAKGRVGDSLAVERRLARGIRRNRDRTNLRKQKLLKRLIKLGLIPGDKNAQQETITQNDPYCLRAKAVDSALQPYELGRVLMQLSQRRGFKSNRKSDGDDETGTIKPKISELKKALGEQTLGQWMHQRLIAGKSIRFRGEDGDFFANRDMYLQEFDIIQKTQQPHHRLSDDDWNDLRNGNKAQAFDGLFYQRPLKPVERGRCQFFTQEFRAHKDLPIAQDFRILNETANLQYYDDSDKYILNDEQRSALLEALDAQKTMSFGSVRKLKNPDGTLLFPRGCLFNLEEGPRDKLKGNATAIDMRKPELFGDRWDGLDEDDQNDVVEMLHDAEENDELINQLMTRFELDKNHAKAVSKFKLSPATSSLSRKFMSRCADVMHDKKIGYVDATTHVYDDDGVFLHHSHTTVDQLMEKLPYYGELLQGSIIGGKPTQFDAVTHPEQHYGKINNPTVHVALNQLRKLVNVLSKRFGPPAEIHVELGRDLKKSAKVRNELAQENSKFAKANEKRADIYRELNGGQNPSGLDLKKIRLWEELGKDELARQCPYTGKIISAAMLFNGEAEIEHILPFSKTLDNGASNLTISMPNANQLKGDRTPYDAFSSDQYADQSMVWSEIADRAKSLPKNKRWRFDKDAMERFNKDNGFIARQLTDNAHIAKTTKRYLGHICDQNKIVTIPGGLTAMMRGKWYLNTLLNDHNFKERNDHRHHIIDAFVVGLTDRGLLQKISTHSARGADDRVHIKLPDITALRNQLEERLGTIIVSYKPDHGTTGKLFNETAYGIVAKNKQDADLKGYNLVTRKKIDALSEEEIHAIRNPGWRNLIVQQVEQARIRLGKLDKNALAKVLAEFGAANNIKTIRILVSNQSATVIPSAPYKAYAPSSFVCVDIWQLPKGKVGQWKTGEYEWHGAYWSYDQCGGKSPDKNKGLIKGQPIHPAAKFITRLFKNDLIEIIEGDQTIIMKVAGFSTTNNKIDLRPQYHTEGKRKFVSINVLWQHSPRKLMFDESGKRKG

SEQ ID NO: 15745 - protein, 1010 aa, unidentified
  REGION 1..1010: note = Cas Enzyme sequence
MRGKMRYRLGLDLGTNSIGWAMIRLDVSGAPCAVIRAGVRIFSDGRNPKSGASLAVDRRLARSMRRRRDRLLKRKARMMRMLVDYRFFPSDNNECKRLEQTNPYELRAKGLDHPLTPAEFARAVFHINQRRGFKSNRKTDKKEATGSALKDAIKGVRSALEGGGARTVGEFLYQRMLSGEPVRARYRESRTQNAEGKTRILKSYDLYIDRAMVEAEFDALWASQKRFNAQQYNDKAYTDIKDTLLFQRPLKPVKPGRCTLLPDEERAPLALPSVQRFRMLQEVNNLRVTSADLTDRLLTKSERDLVIEALESNAKRTFIQIRRLLQLPASTSFNLEDEKRPELKGNATAASLRREGLFGEAWDRLTRSQQDEIVERLITEESEAKLIDWLKLGFGFDDERAESIASAGMPEGFGNLSRKALTRLLPHLESDVITYDKAVQAAGFEHHSQLSAAVTGEVLDSLPYYGRVLQRHVGFGSGDPKDPEEKQFGKIANPTVHIGLNQTRLIINTLIKKYGHPAEVIVELARDLKQSKAHKDEEQKRQAENQRRNDRHRETIAEILGVSTHQVRREDIQKVVLWEELHRDPLERRCPYSGEMISIQQLLSASIEIEHILPFSQTLDDSLNNKTVSLRSANRIKGNQTPYEAFGKHNVQGFDYAAILTRAASMPKGKAYRFAPDGMQRWLKEDQGFLARALNDTRYLSRIAREYVSLICPDETRVIPGQLTAMLRAKFGLNAVLGHEGEKNREDHRHHAVDACVVAVTDRKLLQRFASASASARARQLDRLVEDMPLPWASYREHVARAVHAIKVSHRPDHGFEGAMHNDTAYGLGESGQVHHRVDVNGKRELRLETIRVIPMNKTTNLNRHGTSVDGKPKAYKGYKGDSNYCMDIIQDPKGKWIGKVVSTFEAYQLAKVFGVKAVITGSGVSDVEKAVARIRINDTLTILDGDEYVLLRIATLSSSGTVSLIQLHEANVDARVRRKELSYIYKTAGSLQKAKAKPVTVDCIGNVSS

SEQ ID NO: 15746 - protein, 1148 aa, unidentified
  REGION 1..1148: note = Cas Enzyme sequence
MAGKQKNLGALTFGLDIGIASVGWAVLAENRIVDLGVRCFDKAETAKEGESLNLARRAARLLRRRLRRRAWRLTKLARSLKREGLIADGDFFKKQQPFTQSLWQLRVEALDRRLSDEEWARVIYHLCKHRGFHWISRAEEKAAEGDSKGEGGAVKKGLAGTKKLMQEKSYRTAAEMVIHEFPDAQRNKRGDYSKALSRELLNEEAKKLFQRQRELGNTHASTELETAFLGNGDKKSGLFWAQKPALAGKDLLKMLGHCTFEKEEYRAPKASFTAERHVWLTRLNNLRIVVDGETRPLNEQERLAALPLPYSQASDLTYKQLRNALVKSGYLPDSFRFAGLSYPSKRQEEAEKAKDPEAERLIKLPAWQTLRKTLKDAGLEAEWQQISVAALDGKPELLDQIARVLSVYKDDAEVEAELNKLPMPNAARIVDALLDIRFDKFSNLSLKALRKIVPHMETGLRYDEACLRADYHHSQLHKVGEGEHKYLPPFYAGRDKDGRLKFNEDMDIPRNPVVLRALNQARKVVNALIREYGSPHEVHIEMARDLSRPFDERREVKKAQDEFRERNDKDKAIFASEFSIVGAVKGKDFEKFQLYREQQGKCTYSLDAMDINRLFEQGYVEIDHALPYSRSFDDSKNNRVLVLARENRNKGNMTPYEYLGGKENSERWHQYENFVNTNKTYRQAKRNRLLRKDFGEMEARDFMERNLNDTRYICRFFKNYVEQYLQLHEASEAKRCVVLSGQMTAFLRARWGLMKVRSDSDRHHALDAAVVAACSHGMVKRLSDYSRRKELEQVRKGFVDMETGKIVNPAMFDQLEQHFPRPWDHFHQELEARLKIDEPALLRTEMERLGSYSPEALAGLRPLFVSRAPQRRNSGAAHKETIYAQPESLKAQGGVTQKVAVTSLKPADVDKLIDPHRNEKLYAALRDWLQKRDEREKRAKEIEASAGRGKDKRPLTADEHAEIERLRALPRKPDKNGNPTGPIVRTVTMVIDKLSGIPIRGGIAKNDTMLRVDVFTKAGKFYLVPIYVYHAVAKELPNRAATANTPRDAWTLIDSNYQFYFSLYPNDLIRLKNKGADYFGYFAGVGVTTASLSIKSHDNNQAIATGKAWQGTWVNLGVKTGIQCFQKFNVDVLGNIYPAPPEQRHDLA

SEQ ID NO: 15747 - protein, 1148 aa, unidentified
  REGION 1..1148: note = Cas Enzyme sequence
MAGKQKNLGALTFGLDIGIASVGWAVLAENRIVDLGVRCFDKAETAKEGESLNLARRAARLLRRRLRRRAWRLTKLARSLKREGLIADGDFFKKQQPFTQSLWQLRVEALDRRLSDEEWARVIYHLCKHRGFHWISRAEEKAAEGDSKGEGGAVKKGLAGTKKLMQEKSYRTAAEMVIHEFPDAQRNKRGDYSKALSRELLNEEAKKLFQRQRELGNTHASTELETAFLGNGDKKSGLFWAQKPALAGKDLLKMLGHCTFEKEEYRAPKASFTAERHVWLTRLNNLRIVVDGETRPLNEQERLAALPLPYSQASDLTYKQLRNALVKSGYLPDSFRFAGLSYPSKRQEEAEKAKDPEAERLIKLPAWQTLRKTLKDAGLEAEWQQISVAALDGKPELLDQIARVLSVYKDDAEVEAELNKLPMPNAARIVDALLDIRFDKFSNLSLKALRKIVPHMETGLRYDEACLRADYHHSQLHKVGEGEHKYLPPFYAGRDKDGRLKFNEDIDIPRNPVVLRALNQARKVVNALIREYGSPHEVHIEMARDLSRPFDERREVKKAQDEFRERNDKDKAIFASEFSIVGAVKGKDFEKFQLYREQQGKCTYSLDAMDINRLFEQGYVEIDHALPYSRSFDDSKNNRVLVLARENRNKGNMTPYEYLGGKENSERWHQYENFVNTNKTYRQAKRNRLLRKDFGEMEARDFMERNLNDTRYICRFFKNYVEQYLQLHEASEAKRCVVLSGQMTAFLRARWGLMKVRSDSDRHHALDAAVVAACSHGMVKRLSDYSRRKELEQVRKGFVDMETGKIVNPAMFDQLEQHFPRPWDHFHQELEARLKIDEPALLRTEMERLGSYSPEALAGLRPLFVSRAPQRRNSGAAHKETIYAQPESLKAQGGVTQKVAVTSLKPADVDKLIDPHRNEKLYAALRDWLQKRDEREKRAKEIEASAGRGKDKRPLTADEHAEIERLRALPRKPDKNGNPTGPIVRTVTMVIDKLSGIPIRGGIAKNDTMLRVDVFTKAGKFYLVPIYVYHAVAKELPNRAATANTPRDAWTLIDSNYQFYFSLYPNDLIRLKNKGADYFGYFAGVGVTTASLSIKSHDNNQAIATGKAWQGTWVNLGVKTGIQCFQKFNVDVLGNIYPAPPEQRHDLA

SEQ ID NO: 15748 - protein, 977 aa, unidentified
  REGION 1..977: note = Cas Enzyme sequence
EGDKGEGGKVKQGLAGTKKLMAEKSYRTAAEMVLTEFPEAQRNKQGDYSKALSRILLGDEFKTLFEHQRKLGSFFATEKLEAAILGNGDRKSGLFWAQNPALAGSDLLKMLGHCTFEKSEYRAPKASFTAERHVWLTKLNNLRIIVDGTTRSLNESERRVALPLPYLQAGDFKYEKLRRALVEEGCLAKDSFKFSGLPYTTKQASEEKTKDPEAAVLAKLPAWQTLRKTLKDAGLETEWQKISTDALESRPQLLDEIAWVLSVYKDDAEVEAELRKLNLPNAEKMIDALLDIRFDKFSNLSLKALRQIVPFMEQGQRYDEAVANIPEYGHHSQLHKVGAGEHKYLPPFYKERDKTGRMVFNDDMDIPRNPVVLRALNQARKVVNALIKKYGSPHEVHIEMARDLSRPIDERREVEKLQKEFRDNNEKGKAQFAQDFNIVGAVKGKEFEKYQLYREQQGKCAYSIEPIDLHRLFETGYVEVDHALPYSRSFDDSKNNRVLVFASENRNKANRTPFEYLDGKFDSPQWRSFVGFVEGNKTYRLAKRSRLLRKDFGEKESKEFRERNLNDTRYICKFFKNYVEQYLQLHEDTEAKRCVVLSGQMTSFLRARWGLVKVRGDSDRHHALDAAVVAACSHGMVKRLSDYSRRKEMEQVRDGFVDVDTGEIINPAIFDKLEKHFPKPWENFRNELEARLKLDDPFLLREEMQRIGSYSEEALQAVHPLFVSRAPQRRNSGAAHKDTIYSQPERFVAQGGVTQKVALASLTLKDLDKLIDPHRNEKLYAAIRTRLEAHGGKGDKAFSTNNPLRKPDSEGNPTGPIVRGVTMVIDKLSGIPIRGGIAKNDSMLRVDVFTKTGKFHLVPVYVHHAVAKALPNRAIVAFKDENEWTLIDESFAFYFSLYPNDLVQVTLKKETRLGYYASTHRGTGCINLWAHDRNLNVGKDGSIEGIGVKTALGIEKFNVDVLGNRYPAPPEKRRDLA

SEQ ID NO: 15749 - protein, 1145 aa, unidentified
  REGION 1..1145: note = Cas Enzyme sequence
MYYNGFIIAENNMSSKQNNWGALTFGLDIGIASVGWAVLSENRIIDLGVRCFDKAETAKEGESLNLARRTARLMRRRLRRRAWRLTKLARLLKREGLIADTNLFKQPPTKGQRTVSAWQLRVAGLDRLLSNEEWARVIYHLSKHRGFHWISRAEAKAAEDGKSESGKVKIGLAGTRKLMQEKNYRSAAEMVLAEFPEAQRNKQGDYSKALSRELLADELKKLFKCQRSFGNAHAGTELEAAILGNGDKKSGLFWAQNPALAGSDLLKMLGHCTFEKAEYRAPKASFTAERHVWLARLNNLRIVVDGSTRPLNEMERRVALPLPYQQAGDLTYKQLGSALIKEGFLNKDAFKFAGLPYPVQRTGEEKVKDPETAVLAKFPAWQTLHKTLKDAALETEWQKISIDAREGKPQLLDQIAWVLSVYKDDAEVEAELRKLDLPNTDRMVESLLDIRFDKFSNLSLKALYNILPHMEAGLRYDEACIKTGYHHSQLHKIGEGDHKYLPPFYSGRDKDGRMVFNDDMDIPRNPVVLRALNQARKVVNALIKQYGSPHEVHIEMARDLSRPFDERNKVTKAQNEFRERNDKDKAQFAQDFNIAGAVKGKEFEKYQLYREQQGKCAYSIEAMDINRLFEQGYVEIDHALPYSRSFDDSKNNRVLVLSRENRNKGNRTPYEYLGGKDDSERWIKFLRNVEGNKAYRLAKRSRLLRKDFGEEESKSFRERNLNDTRYICKFFKNYVEQYLQLHTDSEAKRCVVLSGQMTSFLRMCWGLSKVRSESDRHHALDAAVVAACSHGMVKRLSDYSRRKEIEKASAGFVDVTTGEIADPAMFDQLEQHFPSPWPNFRNELEARLKLDDPALLREELQRLGSYPAEALEAVKPLFVSRAPQRRNSGAAHKDTIYGQRDSLKAQGGVTQKVSLTSLTLKDIEKLVDPHRNEKLYAAIRARLEQHGGKGDKAFPASNPLRKPDSEGNPTGPIVRGVTMVIDKLSGIPIRGGIAKNDSMLRVDVFTKANKFHLVPVYVHHSVAKEMPNRAIVAFKDESEWTLIDESFAFCFSLHPNDLVRITQKGKSAILGYYASTHRGTAAISIWSHDRNKQVGKEGQIEGVGVKLAQSIEKFNVDVLGNIYPAPPEPRRLYNAQRNGAEHDLA

SEQ ID NO: 15750 - protein, 1144 aa, unidentified
  REGION 1..1144: note = Cas Enzyme sequence
MTSKQEKHGALTFGLDIGIASVGWAVLGESRIVDLGVRCFDKAETAKEGESLNLTRRMARLLRRRLRRRAWRLTKLARLLKREGLIADANLFKHKIEKNTPVPKSSWQLRVDGLDRQLNAEEWARVIYHLCKHRGFHWISRAEEKAAEGDSKGEGGKVKQGLAGTKKLMQEKSYRTAAEMVLAEFPDAQRNKQGDYSKALSRILLGDELKALFEHQRKLGNPVATEKLEAAILGNGDKKCGLFWAQNPALAGNKLLEMLGRCTFEKTGGDDGKGEYRAPKASFSAERHVWLTHLNNLRIVVDGTTRPLNEAERRVALPMPYQQAGDLSYKQLGGALIKEGFLQKDGFKFAGLPYPTKQASEEKAKDPETSVLCKLPAWHTLRKTLEKHGLESEWQKLSTDALDGKPQLLDNIAWVLSVYKDDDEVKTELGKLNLPNTEKMIDALLDIRFDKFSNLSLKALSKIVPFMEQGQRYDEAVANIPEYGHHSQLHKVGAGEHKYLPPFYKERDKTGRMVFNDDMDIPRNPVVLRALNQARKVVNALIKEYGSPHEVHIEMARDLSRPLDERRDIEKLQKEFGERNKKDKELFAQDFNIVGTVKGKQFEKYQLYREQQGKCIYPSMDEKQGICCYSLKPLDLHRVLYEEGYAEIDHALPYSRSFDDSKNNRVLVLAKENRDKGNRTPFEYLGDKDNSEPWRQFVAFVEGNKAYRLAKRSRLLRKDFGDKEAKEFRERNLNDTRYICKFFKNYVEQYLQLHEDSEAKRCVVLSGQMTSFLRARWGLVKVRGDSDRHHALDAAVVAACSHGMVKRLSDYSRRKELEQVREGFVDVDTGEIVNPAMFQQVQEHFPNPWPHFRDEVKLRLSIDDPTLLRSEMEKFGTYTPESLEALRPLFVSRAPQRRNSGAAHKDTIYAQPKRLVAQGGVTQKVALSSLTLKDLDKLIDPHRNERLYAAIRARLEQHGGKGDKAFPASNPLRKPDSEGNPTGPIVRGVTMVIDKLSGIPIRGGIAKNDSMVRVDVFTKANKFHLVPVYVHHSVLGLPNQAIVGGKEESEWTQIDDSFDWHFSIYPNDLIRVTLKQEGRFGYYAGCDRSTAAIHLWAHDRNQQVGKDGLIRSIGVKTALSIEKFNVDVLGNRYPAPPEKRRDLA

SEQ ID NO: 15751 - protein, 1139 aa, unidentified
  REGION 1..1139: note = Cas Enzyme sequence
MNYYNGFIITENAMASKHENLGALTFGLDIGIASVGWAVLGENRIIDLGVRCFDKAETAKEGESLNLARRTARLLRRRLRRRAWRLTKLARLLKREGLIADTNVFQKPFNLKDANEKGLSFWQLRVDALDRKLSAEEWARVIYHLCKHRGFHWISRAEEKAAEGDSKSEGGKVKQGLAGTKKLMQEKNYRTAAEMVLTEFPEAQRNKQGDYSKALSRILLGDEMTQLFKHQRELGNPHATEKLEAAILGNGDHKSGLFWAQNPALAGNDLLKMLGHCTFEKAEYRVPKASFTAERHVWLTRLNNLRIVVDGTTRPLNEAERHLALLMPYQQAGDLTYKQLRTALTKAGYLPESFRYTGLAYASGQKADEKAKDPESAPLVKLPAWHELRKTLEKKELASEWQKISSDALDGKPQLLDQIAWVLSVYKDDTEVEAELCKLNLPNAEKMIDALLDIRFDKFSNLSLKALRQIVPLMEQGQRYDEAVANIPEYGHHSQLHEVGAGEHKYLPPFYKERDKTGRMVFNDDMDIPRNPVVLRALNQARKVVNALIKEYGSPHEVHIEMARDLSRPLDERRDVEKLQKEFRDRNEKDKALFAQDFNIVGAVKGKEFEKYQLYREQQGKCAYSIEPMDIHRLFEQGYVEIDHALPYSRSFDDSKNNRVLVLAKENRDKGNRTPFEYLGGKDNSERWRQFVAFVEGNKSYRLAKRSRLLRKDFGKDEAKGFRERNLNDTRYICRFFKNYVEQYLQLHEDSDAKRCVVLSGQMTSFLRARWGLVKVRGDSDRHHALDGAIVAACSHSMVKRLSDYSRRKELEQVRAGFVDVDTGEIVNPAMFQQVQEHFPNPWPHFRDEVKLRLNVDDPALLHSEMNRFGTYSPEALKALRPLFISRAPQRRNSGAAHKDTIYAQPERLVAQGGVTQKVPLTSLTLKDLDKLIDPHRNEKLYSAIRIRLEQHGGKGDKAFPASNPLRKPDSEGNPTGPIVRGVTMVIDKLSGIPIRGGIAKNDSMVRVDVFTKAGKFHLVPVYVHHAVAKVLPNRAVVAYKDETEWTLIDDGFDFCFSMYPNDLLRIKLRNASHLGYYASCNRSTGAINLWSHDRNQQVGKDGMIESIGVKTALNVEKLNIDVLGNRYPAPPEKRRDLA

SEQ ID NO: 15752 - protein, 1166 aa, unidentified
  REGION 1..1166: note = Cas Enzyme sequence
MNYYNGFIITENAMTSKQDNLGALTFGLDIGIASVGWAVLGENRIIDLGVRCFDKAETAKEGESLNLARRTARLLRRRLRRRAWRLTKLARLLKREGLIADANLFKLKIEKNTPVPKSAWQLRVDALDRPLSAEEWARVIYHLCKHRGFHWISRAEEKAAESDSKSEGGKVKQGLAGTKRLMAEKGYRTAAEMVITEFFTQRVDEDGKPALTKKTSEPILDGAARNKQGDYSKALSRILLGDELKKLFEHQRQLGNPFATEKLEAAILGNGDRKSGLFWAQNPALAGNDLLKMLGHCTFEKSEYRAPKASFTAERHVWLTRLNNLRIVVDGTTRPLNEVERRIALMPYQQAGDFTYKQLRTALTKAGYLPGSFRYTGLSYASGQKTDEKTKDPESATLVKLPAWQELRKTLEKKELASEWQKISTDALEGRPQLLDDIAWVLSVYKDDDEVKAELSKLNLPNPEKMIDALLDIRFDKFSNLSLKALRQIVPLMEQGQRYDEAVANIPEYGHHSQLHKVGAGVHKYLPPFYKERDKTGRMVFNDDMDIPRNPVVLRALNQARKVVNALIKEYGSPHDVHIEMARDLSRPLDERRDIEKLQKEFRDNNEKGKAQFAQDFNIMGAVKGKEFEKYQLYREQQGKCAYSIEPIDIHRLFEQGYVEIDHALPRSRSFDYSKNNKVLVHIKENQNKGNRTPFEYLDGKDNSERWRQFVAFVEGNKAYRLAKCSRLLRKDFGEKEAKEFRERNLNDTRYICKFFKNYVEQYLQLHEDSEAKRCVVLSGQMTSFLRARWGLVKVRSDSDRHHALDAAVVAACSHGMVKRLSDYSRCKELKQVREGFVDVTTGEIPNPAMFDQLEQHFPKPWENFRNELEARLKIDDIALLREEMQRLGTYSEEALEATRPLFVSRAPQRRNSGAAHKDTIYAQAPSSDKPNRVTQKVALTNLTLSDLGKIDDSDTCKLIDPHRNKKLYDAIRMRLEQHGGKGDKAFPASNPLRKPDHEGNPSGPIVRGVTMVIDKLSGIPIRGGIAKNDSMVRVDIFTKANKFHLVPVYVHHTVAKTLPNRAVVAFKDEDEWTLIDDSFQFCFSMYPNDLLRVKLKNASHLGYYAGCNRSTGAINLWSHDRNHLVGKDGMIESIGLKTALSIEKFNVDVLGNLFSAPPEKRRDLA

SEQ ID NO: 15753 - protein, 1026 aa, unidentified
  REGION 1..1026: note = Cas Enzyme sequence
MAGDPKGILGLGTRIFSAGVDGDIETGKEESRSVARRGARMQRRQLDRRARRMRNVFNELRRCGLLPGAGHAESEEIHQALELLDRELAESWITTGDHRAAQLLPYLLRAAAADRHLKPYEVGRALYHLAQRRGFASNRKESVKQTDEKELGPVKEGIKTLEALLAGQTLGQYFSTLDPHQHRIRSRWTSRQMYRNEFDRIRTSQEGGPAALDKDAWARIERAIFHQRPLKSQKGKVGRCEFMIGERRAPKWLPEFQRFRMLSVVNNLRVRTPVDEGAALTPETRRGFSERALTTDERAEVLALLDASASVRLTSLRAKLKLKGTTFNLEEGGEKEIRGNVTGARLRGVFGQRWDAMGDGDRRRVITDVLSMEQDRALERRARETWGLEDDAVAAFVALRLEEGYATLSRLALSRLLPHLEAGLSVQEARQREFPVHFVAGDRAGSLPPVRKSLFHLRNPTVERSLTETRRIVNELIRAYGIPEQVHIELARDIKKSRKDRQDLAKANRNRQGERESAAERLRELGLANPSRADIERVLLHEECGGKCPYTGRSIALAELFSKSSPWDVEHIIPFSRSLDDSFANKTLCLAEENRNGKRNRTPFEAYSGDSDRYAQILSRVGQFQGKDARRKLDRFRVKDLGDDLRDEFCSRQLNDTRYASRLACGYLEELYGGASDEDGVRRVFASAGQVTAIVRRELGIEGLLGSPTDGRKNRDDHRHHGLDALAIALTSPGMVKRLADAAEGARSAGRRRFAALPAPWVTFADEAIARAAEMVVSHRGSRTIGGELHNAANYSRPIGGDPKVRHVRKPVSWFVLRGDVEDIVDSAVRQAVKAHIAARGGDKRCLANDRDPPRLPAKDGTLGNPIRRVRIRVSNSVVPVGVGARQRFVAPDSNHHMAIVSLLGPDGNPVKWEGHVVTRLEAARRAVRGEPVIQRDWGSGRRFCFSLASGDMVKLTVNCREGLYLVRAVSASELEFSMATEARPVSVIKREKLKRFRFRPSQLIADVKCSRVDVTASGVVRQCNA

SEQ ID NO: 15754 - protein, 1145 aa, unidentified
  REGION 1..1145: note = Cas Enzyme sequence
MGVRYRLGLDVGTASVGAAAVSLDKANQPEALIWHHVRIFSEPLENAQGTLVSKKAGRRRARMQRRQIDRRASRLRRIAYLASLLGLKREEISSDGGSTLPFLRAQAAVEKIELGGLLRIFLRLSKRRGYKGEFKAKKKGEVAEGSSELKLEMRALATERGIELKDENDIGITLGQFLLHRMESGLPTKLKVKEISDEAKKKEEGTNGPKNLYALRSMVEHEFNAIWDEQAKHYAALNGAHDGKTKREHFYEALFYQRPLKSGADMVAQCSLEPTLPRAPRAQMAFQRFRIEKTLADLRWGAGKRAEPPNRDQKQIIRELLDKNDKVTFETIYDALEEAGHPKPQSKGLNLERASREELSGNSTLAALRKLDKHSAKHHPDRATNLELAFRTLEEKTQIAVINFLAELGSPEQLDDPQWHTSFVKRDGSQRKFSEPLITFIDHIKEHDKFDRLSKMGFDGGRASYSVKTLNNLAGWMQEPNWPCDWNNDEDGVRSMDEEGAVRACYRQRIKEQKIVVRLNRLPTPESTGNAVVDGALRQIRWTVNKMIDELGNPPDEIVVELSREMSLGITRRNERESENNKQQKARRVAEKEIRAHGQTPTPSKIRRYLLWVEQEKSFCPYCNKTISLADALSGSATEYEHIIPKSLTQVGMKRSEIVLAHHACNQEKGDITPWEKWGNTERWQSIEAAAVRFEAKKHYRKAKLLRLKDFEREVLTDESVNDFADRQFHQTSWIGKIAVQWLNCLCPNKISPSRGELTALQRRNWKLETVIPEVRIENNLPVLDREGKQIKPEDFAKLKKYLEGHPVRREDREVNPGFEFNRYPDKRLDHRHHLIDAITLALTSRALFQQMAKNYKRASEKLLPRDGETAEDRERRIKSETRLRLEIPEPPLRNVRTAALEAVRECRISIKPDRHPDGALFKDTAYGVAQRDGEDRLRLTLRHAVSGLGKVQGKASLEAARKAIANIVSDDVRRIISDAFEARINQGTEAGAALSQPILHPLYGKPIRKVRCFESYAEDAQPIGFSSRGGEHRKYLINAGYAYLNLFTDGSQKPRLVKVRDAMREKGKSATHNAMRIYKGDVVMDSKDGLLYRVCFFKAAGIIGLLPIWEPRSFKEANEKAEKGIKVGGTISFAPAAKRLKRIG

SEQ ID NO: 15755 - protein, 995 aa, unidentified
  REGION 1..995: note = Cas Enzyme sequence
MKKILGLDLGTTSVGWALIEKNGNNAGSLIDGNVRIFPTVTEDKTNNLKNQKRREKRAQRINIQRRSKRKTALKKALVNAKLLPKEILDAAQAPDLLNRISTQPYELRAKALDSPLADHELGRALLHLGMRRGFLSNRKSGDKSDSSVVQPAIDLLGLEIAKNKCRTLGEYLSKQPTQRGRYTHRSMFVKEFESIWDRQSKTNPNLTAQLRKDIEHFIFFQNPLKIQKYLVGQCSLEPNKRRAAKWQPAAQLFRNWQDVSRIKTTHDDKPLEWDQQKKLVDELQKKKSLKWNSVRRLLGLAAEIKFNLEESGSLKELKGNDTVISLNKALGKEAKKLSGADKEKILNWLDTSDNNEKLAEKIRRGFGFDDATIGALCKCSLAKGYFHLSVKACTKLVEIFETHLEPLTYPEAGEKADYAMGETGPAGKGVDQLPHPPEIRNPVVEKALVELRKVVNGVIRKHGKPDAIHLEIARDLKTPKKVRDEIQKRNRQQEKVREEARKTLQEDFQAFASTEPAREDIEKYLLWKECFEEGNGQCPYTGRVISGDMLFTNEIQVEHIIPYSRCFNNSFNNKTLCDVTENARKGNKTPYELYSGTAKYDEVLARTAKLPYPKRRRFTLKDIPENPDAQRTLNDTRYICKEAKRYLQQLGPRVQVSTGQFTAGLRRKWNLNGLLNSDGSNTKNREDHRHHFIDALVVASVNAGMINLISKFSADERMQRSLQGGIYSLKSIFKEPWQTFSKDVADHIKKIVVSHSPTRKVSGGLHKDTALGIVEVKGGIAFATRVELDKDFSSRKLNSIADNKIRELVSARLDKFDGDPKQAFADLENDPLLHVDGETQIQTVRIHTNDSPSSLAAIKQNGAVYAYYRKGNNYKIAIYEMPDGKWVGHYITAFDAKTKNTAPPKEFDSGRLIMELCKNDMLEMDWKGGRAFFRLQKMSAPIDTLSFRLHYTTQKSSSEPDTLKSVSSNPFKSTNPIRIEISPIGEVTYVGKPDS

SEQ ID NO: 15756 - protein, 939 aa, unidentified
  REGION 1..939: note = Cas Enzyme sequence
LLPEGERGGSEFQALDRSLVTKYGHAEKMPYQLRAIALEQKLEPMEVGRALYHLAQRRGFLSNRKAGGKADEEKGKVKGGISELEGRMSAAGARTVGEYFGLHVDPKEERIRSRYTHRSMYQTEFDAIWAAQHPHLPLLLNEKLRAELRVAFFHQRPLKDQSDKVGRCDLEQESKRAPMGSLVVQRFRFFSASNNLRLIDTNGVERGLTVEERSTLYELSLTGDKLKLSAIKKKLKLAAGTAFTMERGGEENLPGNPTAARMRKAMGREWDDRDGATQAAIVDLLLAEDGTEEEAAASLRQRFGLDEATAMAAAAVNFPEGYYSISRAAIEKLMPLLEQGVTYAEARDQVYGTVKRSEPVHLLPGLCDERVKRIVGDIRNPVVLRALSEFRKTVNAIVRKYGRPDFIHLELARDLKKGAEERSRLSAKNREREKERAEAATALAAHQGRPEMSISRRDIEKYLLWKECRHHCPYSGFPISLDGLFGQNAVFHVEHIVPFSVSLDDSFDNKTLCYHELNAVKRDRTPWEAFGGADDWERMVARVKGWENPRKLRRFTINETEKAKLLEEFSTKQLNDTRYASRLAAQYAGMLYGGTIDEGGTRRVQTCSGPVTAYLRGEWDLNRILNPNAPGKSRDDHRHHAVDAVAIAMCSQRMVQRLSAAASAAMSVGRRRFGVLEQPWLGFRDQVAEKVWATVVSLKPEYKLQGAMHDEKLYGRRREDGNGRVFAHLRRPVIEVKPEEIVDLRVREAVIAKVAEVGSVKKLEGNWPVLVQKGGRHVPIKRVRVRMRVTPERLSKGAKERWVLPKSTHHVEIVRNESGRRLRFDHYPVTTIEALRRKKEGAEVVRRDFGERSALICTLRAGDVLEASKDGRSAQLWLVRTVKSSGQMVLHLLADARAKSEIENDEATGLWYLNVNTGFSAGARKVAVSHLGEVLVSRD

SEQ ID NO: 15757 - protein, 1098 aa, unidentified
  REGION 1..1098: note = Cas Enzyme sequence
LDIGTASVGLVALELDGDGRPVKPVHRSVRIFDEPLLPGKGGGVGETKKSARRVHRSQRKLHMRRARRLQRIAQLARPLGLDPKTIPADKGQRVHKLRAQAAAVEIPLESLLLVFLKMAKRRGYHGEFRVKKSGEAGKDAGMVEAGISKLKAEMKTAGCRTLGEYLLHRIQNGQHLRLKEDGLFAHREMVEEEFDRIWEVQKEHHEALRGEHNGRPLREHFHKAIVLQRPLKSPAHMVGNCSLEPMLPRAPMAQPIVQAFRIEKQLADLRWGGTSRAKHLSPQQTQVIRGLLRVKKEVTFPACYKALEKAGCPAPQGLELNYAHGDRQAMTGDRTAAAMKWLELLDDWSALDAGHQISVINLLADMGSPEAFDDLQWDKKLVGANNTPRKIKPEVKRFIDQMVDSGKFDRLAKMGFDGGRASYSIKALNKLVPVMREEGVDEHYAVAAAYPGDVDDENLHAKRERELPPHRATGNTVIDVALGQVRREVNAAIKALGAPPAEIIVELSRDMKVGLKKRGEINRNMRKNEKRRREAAVAIEKHTRKAATESQIRRYLLWQEQGAKYCPYCERHINLSATLNGGETEYEHILPRSLTRIGKKRDFLVLAHKSCNQEKGNHTPWQAWGHDEARWSVIERRAAQFKDGYKVTVDGKERTFKHRGKARQLLMKDFEDEALSDDIIDNFTDRQFQETAWIAKACGKWLRSVCADVAFSRGLLTAHLRRNWKLDTVIPEVRYAEGMPVFDEDYRPNANESGQQDCTVSEADFDEYRAYWEGHHGDGVARTNRRLNKRIDHRHHLVDALVIALTTRGLYQRMARHYKQVTDDGESKLRLYAEPGLRDVRDCALAMVRECQPSHRPDRWLGGGFFKDNPSVVVEDGGQKFYAQRKTLVDLALDRGGKVLPADKARKRLDDILPEKTREHIRKEFNARAGQGIDSRQVLENILHPHWKTPIRRVLVRGHKADDAVLIKHGDPRRIQIKRKGGDADAKPGLHKYLEPDGYAYLEYTPGDSTVEPRLVRLHEAKPASCKTVRLYKNDTVRDSNDGRHYVVYQFSAHNTALYLAPVTEAIADIGKVRGKRRRKISGKQIAKRLTPVQDERA

SEQ ID NO: 15758 - protein, 1181 aa, unidentified
  REGION 1..1181: note = Cas Enzyme sequence
MVVKYRLGLDVGTASVGAAAASLDKDGQPDALIWHHVRIFNEPLENGQAGLFSKKAGRRKARMQRRQIDRRASRLRRIANLASLLGLKREEIAPDDGSTLPYLRAQAATGRVELDDLLRIFLRLSKRRGYKGEFKAKKKGEVAEGSSELSLVMRALATERGITLKDENDTGITLGQYLLQRMESGLPTKLKVKENSDEPKSKKGEESNTPKNLYALRKIHVEYEFNAIWDTQAKHHDILTDTHNGKPIREYFYEALFYQRPLKSAADLVAQCGLEPTLPRAPRAQMAFQRFRIEKTLADLRWGAGKRAASITPDQKRVIRNLLDSNDKVKFDEIYEALKNAGCAKPETKGLNLERASREELLGNSTLAALRKLDRYSSKKHPERAANLEQTFRALDDKTQIAVINFLAELGSPEQLDDPEWPNQIASKGNIKPYQLAFNNQKAYMDEFHNKPKNKRGANYIELIAFINHIKEHDNFDRLSKMDFDGGRASYSVKALNNLAGWMAEPSWPGDWQDDMKRIDEEAAIRVCYPKSFNREIKRMDQLPTPEPTGNAVVDGSLRQIRWTINKMINELAEMKPKYELAEIVVEMAREMSLGISRRNERESDINKQNKARREAEKEIRAHHQTPTPSKIRRYLLWVEQDKSFCPYCNKNISLAEALSGSATEYEHIIPKSLTQVGLKNSEIVLAHHGCNQEKGDITPWERWGNTDRWQSIEAAATRFETKKRYRKAKLLRLKDFEREVLTDESVNGFADRQFHQTSWIAKEAAKWLESLCPNKVSISRGELTAMLRRNWKLETVIPEVRYENNLPVLDTGGTLDEKGKPLPAKILLKEDFDKLRKYLEGHPVRSEDRNANPGFDFNRRPDKRLDHRHHLIDAITLALTSRSLFQQMAKNYKAAAERMRPRDGETPEERERRIKNETRLHLEVPEPPLRTVRTAALDAVRECRISIKTDRYQAGRLFQDFAYRVIYPEGDNPARLARKKSILDLAGDTAEQTRKNINDIVSTSVRKIVLEEFDRRKDMGNSIKEIFAVPFFHRDHRTEIKKVFCLQKIGRGYMSTDGTFTVQHPLPKPKHEKRLLHDGYAYLEMVLENGRFKSAHPVTHLEGQQATKPSVETVRFFRSDTVMDIQSERLYLVRQIKAQSGGMLVMAPITETLGVADMSSEYGLLTASGSALARFKVIDV

SEQ ID NO: 15759 - protein, 1169 aa, unidentified
  REGION 1..1169: note = Cas Enzyme sequence
MEVKYRLGLDVGTASVGAAAVSLDKDGQPEALIWHHVRIFNEPNVPGQGGLVSKKAGRRKARMQRRQIDRRASRLRHIAHLSGLLGLKREEITPDDGSTLPDLRAQAATKCVELDDLLRIFLRLSKRRGYKGEFKAKKKGPVAEGSSELSLAMRALATERGIALKDENDTGITLGQYLLHRMECGLPTRLKIKEDSDEPKNKKGEDTNAPKNLYALRKMVEHEFNTIWDTQSKHHDILNSTHEGKPIRELFYDALFHQRPLKSAADLAAQCGLEPTLPRAPRAQMAFQRFRIEKTLADLRWGAGKRAEQPSPQQKQVIRELLNNPRALDEGKNKKDQNGAITFEAIYEKLTEAGCPRPQGKGLNLDRASREELQGNKTLYALYKLDEHNEKKHPDFSAKIKHEFINLEEKTQIAAINFLADLGSPEQLDDPMWHTSFVKRDGTPRQFSEALIGFINLIKEHDNFDRLSKMDFDGGRASYSVKALNTLAEWLEEPNWPGDWQDSMKRMDEEASIRVCYPKSLNREIKRREKLPAPESTGNAVVDGSLRQIRWTLNKMIAKLGAPPEEIVVEMAREMSLGISRRNERESENTKLQKMRKNAEKAIRDRNAVPTPSRIRRYLLWEEQATHCPYCNLTIELGDALDGGATEYEHIIPKSLTQVGMKRSEIVIAHHSCNQAKGDRTPWEAWGEGRNDARWQSVEAAAARFDAKKNFRKAKLLRLKDFERKVLTDESVDGFADSQFHHTSWIAKEATQWLECLCPNKVSVSRGELTSMLRRSWKLETVIPEVRYENNLPVLDTGGKLDDKGKVLPAQPIAQDEFVTLKKYLEGHSVRSEDRKANPNFDFNRRPDKRLDHRHHLIDAITLALTSLRLFQQMAKNYKAAAEEMLPRNGESAEDRERRIKTHTRLRLEVPEPPLRNVRAAALEAVRECRISIKTDHYQAGRLFQDFAYRVIFPDGDTPARLARKKSVSDLAGDTAEQTRKNINDIVSSSVRKIILEEFDKRKDTGKSIKEIFAAPFFNREYRTEIKKVFCLQKIGRGYMSTDGTFIVQHPLPTPKYEKRLLHDGYAYLEMVLENGKFKSAHPATQLEGQQKTTTSSTVETVRFFRSDTVMDSKNGKIYLVRQIKAQSGGMLIMAPITETLGVADLSSEYGLLTASGSALARFRIINDV

SEQ ID NO: 15760 - protein, 1080 aa, unidentified
  REGION 1..1080: note = Cas Enzyme sequence
MTVKSEGPTAGPYVLGLDLGAASLGWAVVGLADGKPARHVAGGVRIFPEAVDNIEQGRDEPKSAQRRLARQMRRQTDRRARRVASVFRVLQRAGLLPPFPEADDPADPLARHRLINRLDEDLARTVPGLIDSAAEHISRSVFHYRLRALAIHQDLPPYAIGRAFLHLAQRRGFRSGRIEEAPKGREEKGQEAGAKKEKSQLKARIASLPAEFERLGARTIGEYWSKLDPHRKRIRGLGNWSDRQMHLDEFDFIWKRQAPCRAETMTAALYRMVKRRIFFQRPLKSAAGLIGHCELERESKRRRAPLAHLLYQRFRTLQTVNDLRIVGAARPSRPLTPEQRAKALDAFSNRQTVTFKPLRRKLGLLPGEAFSHEEGDRKDSPGNRTECKLREVFGERWAALTELERNVIAGYVRSMDDAAALARIAETRWGLDRLQAARLAAVQLEQGYGRLSLLALRKLLPLMEQGVPYMTAVERVYPDRSLTTVQELLPKVPDNVRNPAVVRALTELRKVVNAVIRAYGRPERIQIELARELKKSKEARKKIAAENRDREGQRRKTIEKIFKECGFGNPSRDDILKAILWEECRHECPYTGASINFHDLFGPDAKWEIEHIIPYSRSLDDSLSNKTLCSRETNRRKGNRTPFEAFGNTPEWETMVERVAKFQGDKRAMPGKLARFVMESGVEELFDEFTHRQLNDTKYASRLAMEFLGQLYGGVCDETGTRRVNAVSGGVTAQIRKGWRLHSILRDGPSQGDAKPRDDHRHHAIDALVVALTGPGAVQALSRASEQSRLDHRHGFRVDDPWSGFLDQVRSAIRGIRVSHRPDHRLRGALHAESLYSPPRSERGAAPRHRIRKWLSSLSAGQVADIVDTKVRETVQAKLAELRQTEPKEAFKIEANLPALGNRHGDPVPIRRVRVYVSGSSQQIGTGAAARYVMSKENHHLAIYRLPPDKKGVARWTGEVVSLLEALARKRQGRPAIAPASDSGAPLAMALYKGDVVEMTVPKSEPAERDLFVVRGFSIEKGGSPEIDLVRHNLAGEIGDLKKAGEWKRVRNWDEFRRLDPRTVALDALGRVMPNDGQPS

SEQ ID NO: 15761 - protein, 1009 aa, unidentified
  REGION 1..1009: note = Cas Enzyme sequence
MEKIIDLVLGLDLGTNSVGWALIEEKAGCPAAICAAGVRVFPSGMEINERSGKTESHAIERRTARLRRRMLDRQKRRRLEVLHILQRNGFLPGGKPDHQVPEWQDILAINPYLVRAEGLDRLLSPTEFGRAIFHIAHRRGFLSNRKQAAKPGEDGVVKRETGEQEAKMKAAGVRTFGEFLWKLRLNDDACRLRERYTMRSWYRDEFTALCQAQQKIGLARLDDKVVRELREAIFFQRPLKVRPSLIGRCKLEPQRQRAAMALLTSQRFRLLQDVNHARLVDEAGRETDLTGEQRRRLSDALDLQKKLTFAQARRVVGAPKKSVFNFEAGGREDFTGNSTAHRIIDAIGLVAWKEMPAITREQVVEALMSMEDRDALCRLAMRKWKLPADAADELADVSLEDGHVNHSTKAIKKLLPHLEAGLSYAEAVAKAYPDKPLDPTEERLSPVPSDLRNPIVTRSLTEMRRVVNAIVDKYGTPARIRVELARDLKKTTKARIAAYTSMREREKERSRVAERLSQEVGIQEAKPWDKEKALLFEECGGVCPYTGKGISFAALFGPNPTVHVEHIIPFSRSLNNSFANKTLCYADENVHVKHNQTPFEAYASQPEKWQAILTRVRDFRGDRDLCREKLRRFLLEDVQGELDSFTTTDLNNTRYASKYASQFLARLYPPVERRKRIQVSIGQTTAYLRSAWHLNELLSPTDKKTRDDHRHHAVDAIAIALTTPATTQMLATAASRSYRPGVFGDVELPWDSLRSDVAAVLAKMVVSHRVDHKVNGSLHKETFYGLITTEPGKCSAVLRKPIERLSDAELRKKKIVDGAVRAAVEKKLQELGAESAEVFTDPAKRPCMPNKKGRYIPIRRVRVLQDLEPIALGTDNCRNIATGDNHHAEFFEVTNAKGEKVWQERIVSRLAAMKRKKLRQPVVAPHDGDGNPLVLSLAIGDTVNLQWNDKPVIAVVRSLSKGDYEFRPVNNACKANELGNDRIRIRGYKDLLKSACRIVRVSPLGETDG

SEQ ID NO: 15762 - protein, 985 aa, unidentified
  REGION 1..985: note = Cas Enzyme sequence
VFSAGATGLEKGSDESNAAKRRVARLQRRQTDRRRRRIGKIYGIVAGYGMLPAAKSPQDRTVALTELDRTLSKKFHADEKLPYVLRALALGGSLEPFEIGRALFHLAQRRGFLSSRKSQRESDEERGKVKSAITTLSKEIANSGARTLGEFLASTDPSETRIRARYTSRPMYVHEFEAIWAAQREYHPELLNDERYKNLKQAIFFQRPLRDQSDLIGDCELETSEKRAPVWHPLAQRFRLLQEVNNMRLIDGTGTARALDQNERALVIARLEQRDMTLRELRKLLGLGRGVEVNLDRGGKKALIGDRTAEKMRAVFQHHWDSMTGPERMEAISDSAGDLDDHSLAEKAQRRWGLNELNAEEYSKTALETGKYLSFSLRAIERLLPHLEQGSDVTTARTKEYPETFRTEVRDLLPKVDDIKDIRNPAVHRSLSELRKVVNALIRRYGKPTEIHIELARELKSPRPEREQKWDRMRRLEDERKDAAAKLLKDVGIERPSGADIEKWRLADECNWRCPYSRRCFSKHQLFEAGEVQVEHIIPFALSLDDSFANKTLAYVSANALKANRTPWGAYADAPEWDEILQEVRQFKGSFGAHKLQRFQWTDEQVAEILDDFTKRQMNDTRYASRLAARYVACLYGGLSDESGRQRVFVSPGQVTAFLRRLWGIGGLLSDDGKKTREDHRHHMVDAITVALAGPKWVKALADAANLARAAGHRRFASIQAPWDGFAGDVRTMLDRTVISVRADRKVGGALHEETNYGVIDGGSKFVVRKPVHKLTIGEVERIVDDRVRDRVRLQLNILHQNIKKLENDPPTLPTRHGGEIKIKKVRIRVAEKPRVIGKGIRERRVVGGDYHHFEILKRTDPGTGRVKWDFAPVRVQEAMDRVKPPRTKSQQPLVNRDHGEAVAFVCSIAKDETLEVEKDGVKKLVRVRTLEADGRVGFSSLTDARPFMEKNKNRERLTVPKLMTELKCRKVSVSPLGEVRYSRD

SEQ ID NO: 15763 - protein, 997 aa, unidentified
  REGION 1..997: note = Cas Enzyme sequence
PVEVLRAGVRIFEAGVQGDLERGKEESRGADRRRARLQRRQTDRRRRRLKAVYSLLADYGLLPHGKSARERDSNLTALDAELARRFPEARALPYFLRARALDQRLEPPELGRALYHLAQRRGFESNRKARQRETDEERGEVLKGIQSLYGSMAETGARTLGEYFARFLPPAERRIRCRWTHRRMYQQEFETIWAAQREFYPELLTRERHDQLFEAVFFQRPLKSQEELIGDCELEPGEKRAPLWHPLAQRFRMLQVVNDLRLSEPSGVERALTPEERRQLLAELEIKGDLTFAKVRHLLHLPRGVSLNREEGGNDKLVGNRTEARMRSWFGVRWDEMAPEQRTEAIEDLVSKLTEEELFGKAVDVWKLDGTLARGYSQSGLEEGKYLGYSLKAVGRLLPLMEAGQAFMTARHSLYPETLRLGAAEDALRPVTECVPDLRNPAVARALTEVRKIVNAMIREYGKPDEIHIELARDLKSPRKERENRWKRMREQEARRKEAAEKLAKEDGNPRPSAADIEKMLLMMECGCQCPYTGRTISMAAIRNGLVQVEHIIPFSRSLDDSFVNKTLCFVDENARKRNHTPWEFYGRTGGEEWERILDRVGKFQSRVARAKLERFQMREEQVDALLGDFSTRALNDTRFASKLAAHYLAHLYGGLSDEGGRQRVFATSGMLTARLRRLWSLSRLAGLSESGEKVRDDHRQHTLDAIIIGLTELRWVKRMADAAEYGRSQGRSRISSIEAPWDGFAADVGKAIDSLLVSHRPERKISGALHKETLYAERRRRDGSQFIAVRKPVNALTKGELASIVDTVVRGRVKLAVARAGDDPGKLNDGNAPTMPSGVPIRSVRVEVRKPLRSVGSGERLRLITGGDNQHFEVFSVLDRRGSVKRWDCVIVSKAEAAERVRTKRPVVCREHGPNTCFAFTIAKGDTFEIERDGVPEVVVARVLEGDKRVSLFSIRDARRQEKRNALRCTVNELMKKYKLQKVAITVLGEKIACRD

SEQ ID NO: 15764 - protein, 1062 aa, unidentified
  REGION 1..1062: note = Cas Enzyme sequence
MKTKNGQVDYVLGIDLGVVSLGWAAIEIDNDGGQSLLGAGVRCWELSNASLEEVEKGKEEPPGQSRRQARRLRRQMFRRAQRLRRTYRVLQEMGLFLTGPRSSTARKAYLETLDQKAQEWLRTNVPDANDDGLLAHTFIYRLRAAALDHPLPPELLGRVFFHLAQRRGFLSNRRTLEKNKDEELGVVKQGISQLQDEIQKSGARTLGEFFSRLNPHEQRIRNRYTSRKMFQDEFEQIWNAQRSHHPNSLTDSKKARLYKAIFFQRPLKLQHGLVGRCPLEVLPRKRPNGQVEYIYPFRRAPMASLEAQRIRYMQRINDLEFTDPQGQRRVLSPEERQKLYDLAERNEDLSFTLIKKTLGIPTGKKGEGWECNLERGGEKKLPGNRASAQIRKVIDDATWEDLGRERQKALVDTLIAFLRADTLEEHLHRVWGFNREVASQLAGLPLEQGYHSFSRRAIRRLLPLLEQGERLNAAIQKVYGGTQRKINQHAELPPVRQVLPTVRNPLLIRALTELRKVVNAIIRKYGIPRCIRVEVARELKRSRKEREEISKRMREQQKRREEAAQRVLQELGRTAAPRDIEKYLLAEECNWICPYTGKQITTQALLGDHPEFDVEHIWPLHRSLDDSFMNKTLCYHQENRSVKAGRTPYEAYATDPVRWQEIITRVRNFRGPFARQKLVRFQAEEIPPDFALRQLSDTRWISKAAADYLGHLYGGRIDPTGQQRVFTVAGGLTGLFRRAWNLNAILGGSPEKNRYDHRHHAIDAIVVALTDPSMIQRFAHEASRLLKAWPRVAVRLDPPWSTFLSDVQRHVEGIVVSFRVSRRLSGALHDQTYYAPPTEQGKTKVRKPLREMSSHEVERIVDPTVRDLVKEKLKRLGTSDPKKAFATDANLPIIRGKNNTALPVKSARIWVSSSVIAVGDGPRQRYVVPGNNHHIEIYALLDGQGQEVRWKGKIVSLYEAYERKKRGEPVVCRDHGPNTRFKFSLAKSEYIEWINDDGQKQLLRVVGISDDNLELRLPHDARPITLIREQRERIRATYRQLFQRRARKVMVTPLGEVLPAND

SEQ ID NO: 15765 - protein, 1045 aa, unidentified
  REGION 1..1045: note = Cas Enzyme sequence
MMTAEAELEPYVLGLDLGVESVGWAVIDLDQDGTPCGIRRAGVRCFDSGVEGQIESGRDHPRNTKRRKARLQRRQLWRRARRHGKLFGVLQRAGLLPPGPGRSSEDRHKLLFDLDRSLAGRYPADEDRAAAQLLPYRIRAKALDEPLEPFALGRALYHLGQRRGFLSNRKAVKDADEEGQVKAAIGELRRKMQQAAARTLGEYFAGLDAEEERVRGRWTSRQMYEEEFEAIWSAQAPHHAALTPELKREVHDAIFRQRKLKSQKGLIGFCELEPDCRRAPWACLDAQRFRFLQRVNDLEVIAPDGEIRPLTAQERDKLINALDTGGDLTFAAIRKLLGLNKPRGYSFNLEEGGEKKLVGNRTAAKFVAAIGKGRWAELSEADRDRLVEDLLSFEKTDPLVQRLIRAWGFSEAEAVQIAEIQLEPDYCRLSRRALRRVVPLLERGEHYATTRKKLYGDRLAEAETVDLLPPVADASAELRNPVVKRALTELRKVVNALLRRYGKPALVRVELARDMKRSRAARKDASQRNRQNERAREEAKKKLLVELGNEHPGRADVEKLLLAEECDWDCPYTGKRMSMATLLGPSPQFDVEHIIPFSRSLDNSFRNKTLCYHEENRTRKRNRTPVEAYAGSAQWDEILGRVRKFKGSMAAAKLRQFQLKEIPEDFASRQLNDTRYISRLAGEYLGLLYGGWTDADGKLRVQVSSGPVTAYLRNQWGLNAILGEGPRKERTDHRHHAVDAIAIALTSPSTVKLLSDAAQRADAWGGRLFVPIDPPWDGFLDQARHAVDAICVSWRVDRRVAGALHKETLYGKSHPAPDARGRPVECRHLRKPLVDMSIGEIDSIVDDQVRWMVQGKLQQLGGTPKQAFADPANLPYFRTKDGRIIPIRKARIRQNVTTVELAGRGAPRFVAPGDNHHMEIVAATDAKGHTKWEGHLVTLMEAARRARSGEPVVRRDHGRGKKFLFSLANNDYVVMEHHPGEAQLYRVVGISEGELEFRLHTDARPTTVVKKIPGARVRRSPGKLLEAKARKVAVDPLGNILPAND

SEQ ID NO: 15766 - protein, 1033 aa, unidentified
  REGION 1..1033: note = Cas Enzyme sequence
VLETGGSASGILALGVRRFEAGVSGDIEQGKDESRATARRDARGPRRHAWRRQYRLRKVFRLLQRMELLPPSEDDSHDERHRVIAQLDRQLRAAASGRAPGVSQLLPYVVRARALDEKLSRHELGRAVYHLAQRRGFQSNLKAAKRDEDVGVVKKGITELEGQMQDAGSRTLGEYFASLDPEQYRIRSRWTARSMYQDEFEKIWAAQARYHPVLTDEHKQKLYDAIFYQRPLKSQKRLIGACDLEPYKRRAPAACLEFQEFRILDQVNRMNVIEPDGECRPPSAEERAKLLAELAEKGEVTFGRIRTLLKMRKSREYGRNYAFNLEEGGEKRLVGNRTAAKLGAILGQRWRELAPANRRTLVNEILSFESEDPLVNRLVSGWGFDAASARAVAQTRFEPGYASLSRKAISRLLPLMRKGIAYATARKQMYGEGRQEQEPLDLLPPKHECRLLRNLRNPAVERALSELRKVVNALVGKYGKPEEIHIELGRDLKHARKRRKQMADQNRENENARHAARKRILEAMKDESYCTPRNVLKIRLADECNWQCPYTGRTISMEALVGDNPQFDIEHIIPFSRSFDNSFLNKTLCYHEENRTQKRGRMPFEAYGHTDNWPEMVGRVRRFRADAQARKRKLELFQTEKLPDPSQFAQRLLNDMRYMSRLAADYLGLLYGGQIDARGKRRVQVSPGRVTAYLRDRWQLNSILGRPNDKQRHDHRHHAIDALVIALTGPSEVHRLSRAAEEAEAIGQTRLFPRGSFEPPCQGFLDEARQAVEGIHVSSRVSRKLSGKLHHDTIFSNPITCSDKRGRLAQVYHVRKPLDSLSPHEVGEIVDDRVRALVQEKLDGAGGDAKKAFAEQHNHPYFRTKDGRIIPIHKVRIRKHDKPVTVGEGSKRRYVVPGANHHMEIVAVLDEAGNEKRWEGHLVSMLDALARHRRGEPVIRREHGQGRRFKFSLAGGEHVVMEHEPGTAQLYRLVVISQGQVEFRLHTDARPDTLLRKREHSAGRVRRSPDSLRKAKARKVAVDPLGNVLPAND

SEQ ID NO: 15767 - protein, 1061 aa, unidentified
  REGION 1..1061: note = Cas Enzyme sequence
MSAECQVRANEKNYVLGIDLGVLSLGWAVVEYAGDKPVGILKTGARIWEYSDASTLTVQKGQETPPGQERRQARQQRRQIFRRAQRLRRTCSVLQAMGLLDPGRRNSRARKQLWETVDQQAKEWLKSNIPGLADDPQLDHKFVYHLRAAALDHPLPKILLARVFFHLAQRRGFQSNRRVVSRSEEEGEVKKAISLLEHEISESGCRTLGGYFATLDPYTTRIRGRWTSRKMYQDEFERIWSAQIAINPGILDLSQKSRLFKAIFYQRPLKSQKRLVGRCSLEVIVRRGPDGPREVRPRQAALASLEAQRIRYMQRINDLEFTDPEGERRTPTQLEREQLYQLAETVEEISFSQIRKALGIPTGKKGAEWECNLERGGETKIPGNKTAARLRKILGNKTWDGFSESDQKKLVDTILAYLSPEALQSHLENVWKFDSDTARQLSNIELEQGYHSFSRRAIRKLLPLMHQGKRLNEAIKAVYGHTGRLRSVQERLPPVWKVMPELRNPLLVRALTELRKVINNLIRKFGKPQYIRIELGRELKLGKKRRQELAKEMRKREAERERAAKVIEETLHRKARPNEILKYLLADECDWECPYTGKKISVLTLLGDQPQFDVEHIWPFDRTLDDSFGNKTLCYHEENRQVKGNKTPFEAYSDSPDRWREILERVKRFKGPFAKEKLRRFLAADIPQDFPMRHLSDTRWITTAAADYLGYLYGGRIDSEGRQRVFTVTGPLTALIRRGWNLDGILGGPEKNRFDYRQHAIDAIVIALIDQAIVQQISLLSSRLWGTDRPTAVQLPEPWPSFYHDAKNAILNIVVSHRISRRLSGALHEQTHYAPPDNNGRTKIRKPLAALSAKEVENIVDDTIRKYVQHALANAEKKSPKEFFGNPENLPVLKGKNNHVAVVKSVRVWVSAKPVAVGNGDRVRYVKPGNNHHIEIYAIVDEHGNPVKYDGRCVTLLEAVQRKRRGEPVVCRNHGPNTRFLFSLSKNECIEWTNENGEKELLRVVGIADNDIEFRLLYDARPSNLVREAKDRIRGGYSKLFERRARKVLVTPLGEVLPAHD

SEQ ID NO: 15768 - protein, 1048 aa, unidentified
  REGION 1..1048: note = Cas Enzyme sequence
MPDNQKSYILGIDLGVVSLGWAAIEVNGQGPKGLLAAGVRCWDTSDASPSNAEQGKKKPANQTRRESRQTRRQLFRRAQRLRRTYRTLQDMGLLPPGPRSSTVRKATFDAIDQQAKEWLKQNVPALTNDELLDHTFVYRLRAAALDYALPPQLLGRVFFHLAQRRGYLSNRRSAPKEEKHGEVEKGISELEQNIRASGARTLGEYFSRVNPLEQRIRARWTSRKMYQHEFELIWNAQRPHHPTVLTDENKEKLFKALFFQRPLKSQKGLVGRCTLECLTKDLGNGNVERIYPFRRAPMACLEAQRIRYMQRINDLTLIDPKGDMRSLTQEERQTLYALAETHAKLTFDAIKKVLGLTGEGWKFSMERGGEKELPGNKTAVRIRRIIGTKTWENLSESQRKELVDTIIAYLSPEALAARLQKVWHFAPEVADKLSKVTLESGYHKYSRRAIRKLLPLLEKGDSLNTAIQKIYGGTQRKTDVHDLLPPVQEVVKDVRNPLVVRALTELRKVVNALIRKYGKPQLIRIELARDLKNPRKVREKRAEEMRQREKQRKAAAAKIQEVLGREAKGADIEKYLLAEECNWECPYTGRPITLEALLGDQPQFDVEHIWPFSRSLDNSFANKTLCYHQENRDVKKNRTPFEAYGSKEQEWHEILARVERFKEPYKSEKLRRFKAESIPEDYPQRDLNDTRWISREAADYLGHLYGGRIDPSGKQRIFAIKGQLTAIVRQAWDLNTILGGGPEKERTDHRHHAIDAITIALADASLVQRISWAAARLPKTFSRITVQIDPPWEGFLNDVRQQIHNIVVSYRPNRRVSGPLHDETFYAPPLGEQKTKVRKQLQNLSPQEVSKIVDDRIRTLVQETLERHGGKEPKKVFNSPENLPVFNGRKVKSVRIWVTDRVMPVGQKHRIRYVIPGNNHHVEIYAVLDAAGREVKWEAQIVSLYEAYQRKMRGQPIVCRDFGPRTRFKFSLAKGDYIEWVNDESEVQLLRVVGISDKLEFRLPNDARPSTLVRKAKERIFAGYNTLLRRHARKVWVTPLGEVRPAND

SEQ ID NO: 15769 - protein, 1168 aa, unidentified
  REGION 1..1168: note = Cas Enzyme sequence
MSGEATELTTTPISYRLGLDIGANSVGWAALRLSDESADAGRVQGLLAAGVRIFEAGVEGSIEQGKDGSRAVARRLARQQRRQTWRRQFRKRQLFVLLQRHGLLPEAEDSSSAGRDAVLKPLDQELTGRWCSAGDLESHQKLPYLLRAAAAERILEPFELGRAIYHLGQRRGYKANRRTPEGDDEQQGAVSGGISLLDQARLRDPADPASLRTLAQTVVEEFRFSGGHFAIRSEAAESSRRGRVRGHYTSRQMYIQEFEAIRNFQLANGGPLSAKTWTLLEKVLFRQRPLKSQSHLVGRCTLEKDRFGRGRRRSLMALSDFQEFRLLQSLNHLMIVQDDRTEKPLMPGQKEILYDHLMREGDLKLRTRAARGKTAAASVISLLGLAKNTQFSLRSPEESEEDDVRLIGHRTNAKIRAVLGGEWDDMAESQQEKLILQLVYAADPERLSLWLTLHFGFNEPLARQVAGITLEEQHASLSRRAIRRLLPRLRAGESYAAARQAVYPDSLRATAAAEKLPPVTTWNREINNPAVIRALTEVRRVVNSLIQRFGKPAAIHVELARDLKRSRKERTQLWKQNEDNQKLRDRAKVEIVEQLGYSSPSRADVEKWLLAEECNWQCPYTGRPISAATLKHFDVEHIYPRQYLDDSFGNKTLSDPEFNRARKRNRLPSEVLEGAEWADVLTRVRHFKGRFAEAKLRRFQAESVPEDFVSRQLNDTRYNSRLAAQFVSLLYGGRNDADRQQRIVTPTGGLTWLIRRGFGLDRILSDGDYKERSDHRQHAVDAICVALSSQKVIQRLSGLAEQVSQSSQRFNAFLSEFAKELPWPTFHEDAVQAIQGIIVSHRPQRAIGGPLHAETYYSKPLPAPAPVESDGARGKGGRSKVTEHRVRKSIDSLKKKDIEGDAIVDLAVRAAVQRKYAELASAAGSASAADPKKLWGNRADTRRFPRLPPSRAKSGRSGEAGGSIIFKVRVRTSVNAKTVGKGVTQRYVAAGVDANFAAMVYEIASADGRSLRWVHEVVTRLDAHQKLVERRRLLRESSSKGEALGAIGQTVSESFGELILLPRTRDDFATMSNPPFAVKADDSIRFVCAFRKNDLLELDVSDGRLIYRVQNFSTGEIQLCEHFRQIVDKKDRNTSNRITATDALRRRRLRVVHVTPSGEIRNVETLQH

SEQ ID NO: 15770 - protein, 1138 aa, unidentified
  REGION 1..1138: note = Cas Enzyme sequence
LGLDIGANSVGWAAIRLDELEAEQHRPSGILAAGVRIFEAGVEGSIEQGKDSSRAVKRRNARQQRRQTWRRQYRKRRLFVFLQRQGLLPSSDDTTSVGRDAVLKQLDAELTALWCPAGDVDAHQKLPYALRAAAATRLVQPHELGRALYHLGQRRGYKANRRTPEAGDEQGGVVSGGISVLDQARLRDPEDSSSLRSLAQTVVEEFARENGTFAIRSEASNSPRRGRIRGHYTSREMYQQEFATIRDFQLANGGPLTTENWQVIQRILFTQRPLKSQSHLVGRCTLEKDRFGRGRRRCLMALPEYQEFRVLQMLNHLAICHPDGTEERLTEGQHAVLYDWLMREGDLKLTTRAGRGKAAAPSVVSLLNLPKGTRFSLKSAEESEEDDERLIGDRTNSKFRKILGQSWDRLSPEQKEKLILQVVYAADPEALAAWIARHFGFSGELAVAVSRISLEEQHGGLSRRAIRKLLPLLRVGKTYAAARKEVYPESFVATNAVDLLPPVTQWNREINNPAVIRALTEVRRVVNSVIRRFGKPETIHVELARDLKRSRQERKKLWSQNDENRRARERAKARILEKLGNSSPSHADIEKWLLAEECNWECPYTGRRFSATTLKDFDVEHIYPRKYLDDSFANKTLCDPDFNRMRKRNRLPSEILDGDEFEAVINRVRSFSGTHAESKLRRFLAESVPEEFVARQLNDTRYNSRLASEFLATLYGGRNDATQRQRIVNPTGGLTWLIRRGFGLDRILSSSDQKERGDHRQHAVDAICVALSTQKVIQRLSGLAEEFSRPGNRFNVFLSEFSRELPWPEFHTDAANAVLQMVVSHRPERSIGGALHGETLYSKPFAVSPSDDRQSRKKTSTSVEHRIRKSLDKLEKRDIEGDAIVDRAVRAAVQAKYAELVATASSPSAATPEKFWNNRALVDRFPRLQPAVTKRNVGSNSGGSIIYSVRLRARAKPAVVGRGPRQRYVAPATDSNFATMIYEIRTAEGTVVRWDHEVLSRLEAHQRLVSSDANLRSGGSLTTDHNPVPDPVEKILVPRSADEIRAMNDAPFRLKPTEQVAYIGSLRKNDMIELDGGMGDRMIYRVQSLSSTEIQLCEHQLQGISGKDRNTLNRITSVDSLRRRSMRFLNVSPAGDVR

SEQ ID NO: 15771 - protein, 1154 aa, unidentified
  REGION 1..1154: note = Cas Enzyme sequence
MQGEAATDEFPGGRYRLGLDIGANSVGWAAIRLDGVDAEQGHPCGILAAGVRIFEAGVDGSIEQGKDSSRAVTRRVARQQRRQTWRRQFRKRRLFVCLQRLGLLPASDDSTSVGRDLVLKQLDAELAIAWCPAGDVDAHQKLPYALRSAAAARLLEPCELGRAIYHLGQRRGYKANRRSPEAGNDEGAVSGGISVLNQARLRDPQDSGSLRSLARMVVEEFGQQDGVFAIRSEALDSPRRGRIRGHYTAREMYEQEFAAIRDFQLNNGGPLTAEDWAVIRGILFTQRPLKSQRHLVGRCTLEKDRGGRGRRRCLMALPEFQEFRVLQTLNHLAIRNADDTEERLTEGQRAVLYDWLMREGDLKLNTRAARGKPAAPSVVSLLNLPKNTRFSLRSADESEEDDERLIGDRTSAKFSRILGPLWDQLSAVQKEKLILQVVYAGDPERLAAWVARQFGFSDEMSSAVARLSLEDEHASLSRRAIRKLLPLLRAGETYAAARKAIYPESFLATKAVDLLPPVTRWNREINNPAVIRALTEVRRVVNSIIRRFGKPETIHVELARDLKRSRQERKTLWAQNDQNRKDRDRAKVRILQQLGNSSPSRADVEKWLLAEECNWTCPYTGRGFSAATLKDFDVEHIYPRQYLDDSFANKTLCDPDFNRMRKRNRLPSEILDGDELQAVISRVRSFNGRHAEAKLRRFLAESVPEGFVDRQLNDTRYNSRLASEFLGTLYGGRNDADRRQRIVTPTGGLTWLIRRGFGLDRILGSADQKERGDHRHHAVDAVCVALSTQKVIQRLSGLASEFSRPGNRFNEFLAEFSKELPWPEFQTDTASAVREIVVSHRPERSIAGGLHGETSYSKPFAVSPAAGGERRGGRRATGLPEHRVRKSLDKLKKDEIEGDGIVDPAVRAAVQAKFAELVAAASSPSAATPEKFWNNRALLDRFPRLLPSARKREGGSNSGGSIIFSVRMRARCRPATVGRGPRKRYVAPATDSNFATMIYELRGSDGTVIRWDHEVISRLDAHQRLVASRANVRIEADGTHAAKQSSGVEKILIPRTADEIRAIEEPPFRLKPGEQLFYVCTLRKNDMIELDGSSGDRTVYRVQNLSTAEIQLCEHHLQTMSGSDRNKTNRITAIDNLRKRSMRCLNVSPSGELG

SEQ ID NO: 15772 - protein, 1079 aa, unidentified
  REGION 1..1079: note = Cas Enzyme sequence
VVPHGTVARTLLWSASNRRSDTLVQLITESGRKVNLLEGIVAREGWILGLDLGTNSVGWAAVELRGGRPASFLGAGVRVFEAGLVGDLDRGRGEPRNRKRREARQRRRQTVRRARRLRRLFGTLQRGGLLPEGPRERVLREVDARLVERYVRPVADSRERRRRAHLLLYLLRARALDHRLEPWELGRALYHLGQRRGFRSNRKAPPRKDDAGLVMPAIADLERKIRESGARTLGEYLSGLDPERERVRARWTARRMYEREFDAIWEAQRRYHPELLTDELRAELRDVMFRQRPLRPPTGLSAACALEPGRRRALWARPEAQRFRVLQMLNNTRILIHETGEERPLTEDERRNLASYLEDHESLTFARAKGRLGFSEEGATFNWEHGGERRFLGNATYARLGRALGRRRWAALTDEGKAALVEDLISFEKETALRRRLERTYGLDPGTAEKVASIQLDPGRCSLSLKALRTILPYLEAGLSYSEARRRAYPDTQPRTPAPELPPVRTAFPTLRNPVVQRTLTEMRKVVNALVRRHGLPALVRVELARSLKANERQRRRAITMARANQRARERAARRLLEEAGVERPSRLDILKVLLLEECGEVCPYTGRPIAMRHLIGDTPEFEVEHILPFSRSFDNSFANLTLCHVDENRRKGNRTPWEAYGHDPDRFEAILSRVRRFQGPYAREKLRRFMVTEEDELGRFRSSQLSDTRYATRLALDYLALLYGGRTDAKGTLRVRSSTGFVTALLRRSWNLEGLLASEGLRQVQDHRRHAVDAAVVAVTDEGVIQAAARAAARQQRLRPSGVVALDDLAEPWPGFREELRETLAAVVVSHRPCRKARGALHEETIYGPPRPVPGGPYLPRHRKAVHELSPKEIGRIVDPGVRCAVEAQLAELGGVTDENIARLEEHPPWLVRRDGTLQPVRRVRLAKNVRTEVLGNPPRHVVPGANHHVEVFATVGRNGEPRWVGRMVTLLEVFRRRREGRPVVDRTPWGGMPFVVSLARGDMVLLEHPSGPGVFRVVQITLQNRDRIVFELRRHNDGRQRRDVERRGLRPSLDVLREWNCRKVEVTPLGEVRRAGG

SEQ ID NO: 15773 - protein, 1111 aa, unidentified
  REGION 1..1111: note = Cas Enzyme sequence
VDHLEVHVSDSAGGHVSEIPEYLLGIDLGVLSLGWAAVKLQDGRPIGLLDAGVRAWDLQNIAESDIAVGKEEPPSQTRRQMRQMRRQLFRRAQRLRRTWRALQQLGLFPPGSRHCAARKAFLDQLDGQAKAWLCQHRFGSADPPPHWEDTWIYHLRAAALDQPLPPELLGRVFFHLAQRRGFQSTAKTRSGGEQKDGEDRKNKKNKKGKKSEKSERERIRAAISQLQQAMQTSGARTLGEYFARLDPHQERIRGRWTSRRIYKEEFEAIWAAQAPFHPEWTAADKDRLFRALFFQRPLKSQRGLVGLCPLESKVLPPAQPGQKAKVLYRHRRAPLASLEAQRIRYMQRINDLEIIAPDGTHWVLRDPAYQLMRSKLYDLAEHHEELTFPAIRKALGIPTGKKGEDWKFNLEAGGEKKLPGNTTAARIRRILGDQRWDSLGPDGQKQLVDTLLAFLSEEALQQHLEAHWHLDPPTAQALAHLELEPGYHSYSRRAIRKLLPLLEQGLRLNEARRKLYPQKEADAGGWDRLPPVCQVLPQVRNPLLVRALTELRKVVNALLHKYGKPVQIRIELARDIKRSRREREALSRRMRKQEDRRKKAAQIAREHLGREPSPFEITKVLLAEECNWKCPYTGREKIELAALLGPEPQFDVEHIWPFDRSLDDSFANKTLCYHEENRLRKSNRTPWEAYGSDPHRWGEIIARVKQFKGEWAKEKLRRFLAQELPEDFPQRHLSDTRWISRTAADYLGLLYGGRIDPTGKQRIQTTAGRLTALLRRAWDLDSILGPGTEKNRADHRQHAIDAVVIALTDPAVVHRLSRWASHRPSWVRITPQLDSPWPGFFDQVKQRILSILVSFRQHRRLSGPLHDQTFYAPPVPSPEDPKKLRTKVRKKLSELSDNAVEDIVDPEVRRLVQEKLQALSQHDPKLADPKKAFASPENLPYLRSRRTGQIIPIKSVRIWVTAHLEKIGSGMRQRYVIPGTNHHLEIFAHLDAQGNETRWDGHVVSLLEAVRRKRLGQPVVCRDHGPNTRFKFTLAKGDYIQWTDDQGQPQILRVIGISHNNIEFRLPSDARPITIIKQEKQRIRARYQTLFQRRARKVAVSPLGEVYPAGD

SEQ ID NO: 15774 - protein, 1111 aa, unidentified
  REGION 1..1111: note = Cas Enzyme sequence
VDHLEVHVSDSAGGHVSEIPEYLLGIDLGVLSLGWAAVKLQDGRPIGLLDAGVRAWDLQNIAESDIAVGKEEPPSQTRRQMRQMRRQLFRRAQRLRRTWRALQQLGLFPPGSRHCAARKAFLDQLDGQAKAWLCQHRFGSADPPPHWEDTWIYHLRAAALDQPLPPELLGRVFFHLAQRRGFQSTAKTRSGGEQKDGEDRKNKKNKKGKKSEKSERERIRAAISQLQQAMQTSGARTLGEYFARLDPHQERIRGRWTSRRIYKEEFEAIWAAQAPFHPEWTAADKDRLFRALFFQRPLKSQRGLVGLCPLESKVLPPAQPGQKAKVLYRHRRAPLASLEAQRIRYMQRINDLEIIAPDGTHWVLRDPAYQLMRSKLYDLAEHHEELTFPAIRKALGIPTGKKGEDWKFNLEAGGEKKLPGNTTAARIRRILGDQRWDSLGPDGQKQLVDTLLAFLSEEALQQHLEAHWHLDPPTAQALAHLELEPGYHSYSRRAIRKLLPLLEQGLRLNEARRKLYPQKEADAGGWDRLPPVCQVLPQVRNPLLVRALTELRKVVNALLHKYGKPVQIRIELARDIKRSRREREALSRRMRKQEDSRKKAAQIAREHLGREPSPFEITKVLLAEECNWKCPYTGREKIELAALLGPEPQFDVEHIWPFDRSLDDSFANKTLCYHEENRLRKSNRTPWEAYGSDPHRWGEIIARVKQFKGEWAKEKLRRFLAQELPEDFPQRHLSDTRWISRTAADYLGLLYGGRIDPTGKQRIQTTAGRLTALLRRAWDLDSILGPGTEKNRADHRQHAIDAVVIALTDPAVVHRLSRWASHRPSWVRITPQLDSPWPGFFDQVKHRILSILVSFRQHRRLSGPLHDQTFYAPPVPSPEDPKKLRTKVRKKLSELSDNAVEDIVDPEVRRLVQEKLQALSQHDPKLADPKKAFASPENLPYLRSRRTGQIIPIKSVRIWVTAHLEKIGSGMRQRYVIPGTNHHLEIFAHLDAQGNETRWDGHVVSLLEAVRRKRLGQPVVCRDHGPNTRFKFTLAKGDYIQWTDDQGQPQILRVIGISHNNIEFRLPSDARPITIIKQEKQRIRARYQTLFQRRARKVAVSPLGEVYPAGD

SEQ ID NO: 15775 - protein, 1108 aa, unidentified
  REGION 1..1108: note = Cas Enzyme sequence
VDHLEVHVSDSAGGHVSEIPEYLLGIDLGVLSLGWAAVKLQDGRPIGLLDAGVRAWDLQNIAESDIAVGKEEPPSQTRRQMRQMRRQLFRRAQRLRRTWRALQQLGLFPPGSRHCAARKAFLDQLDGQAKAWLCQHRFGSADPPPHWEDTWIYHLRAAALDQPLPPELLGRVFFHLAQRRGFQSTAKTRSAGDQKDGEDRKNKKNKKGKKSEKSERERIRAAISQLQQAMQTSGARTLGEYFARLDPHQERIRGRWTSRRIYKEEFEAIWAAQAPFHPEWTAADKDRLFRALFFQRPLKSQRGLVGLCPLESKVLPPAQPGQKAKVLYRHRRAPLASLEAQRIRYMQRINDLEIIAPDGTHWVLRDPAYQLMRSKLYDLAEHHEELTFPAIRKALGIPTGKKGEDWKFNLEAGGEKKLPGNTTAARIRRILGDQRWDSLGPDGQKQLVDTLLAFLSEEALQQHLEAHWHLDPPTAQALAHLELEPGYHSYSRRAIRKLLPLLEQGLRLNEARRKLYPQKEADAGGWDRLPPVCQVLPQVRNPLLVRALTELRKVVNALLHKYGKPVQIRIELARDIKRSRRERKALSRRMRKQEDRRKKAAQIAREHLGREPSPFEITKVLLAEECNWKCPYTGREKIELAALLGPEPQFDVEHIWPFDRSLDDSFANKTLCYHEENRLRKSNRTPWEAYGSDPHRWGEIIARVKGFQGEWAKEKLRRFLAQELPEDFPQRHLSDTRWISRTAADYLGLLYGGRIDPTGKQRIQTTAGRLTALLRRAWDLDSILGPGTEKNRADHRQHAIDAVVIALTDPAVVHRLSRWASHRPSWVRITPQLDSPWPGFFDQVKHRILSILVSFRQHRRLSGPLHDQTFYAPPVPSPEDPKKLRTKVRKKLSELSDNAVEDIVDPEVRRLVQEKLQALSQHDPKLADPKKAFASPENLPYLRSRRTGQIIPIKSVRIWVTAHLEKIGSGMRQRYVIPGTNHHLEIFAHLDAQGNETRWDGHVVSLLEAVRRKRLGQPVVCRDHGPNTRFKFTLAKGDYIQWTDDQGNPQILRVISLSHKDIRLCLPWDARPGNNKEIERVRSYQDFYKRRARKIAVSPLGEVYPASD

SEQ ID NO: 15776 - protein, 1078 aa, unidentified
  REGION 1..1078: note = Cas Enzyme sequence
MAKVTLGIDIGPSSLGWALIGEQEEKIFSAGVRVFPEGVDRDQQGGEQSKSQSRREARGTRRQIQRRARRRRLVRRSLIKAGLFPDNPDDLEKLLKDEKKMKKPGPYELRAKALDQKLELHELGRVFLHLAQHRGYFSNRKTDKAKETKGILAEMDNLAEKIKNAGCSTLGGYFAKEDGKYDRCQSNSERHIRGLHTKREMYLDEFEAIWTEQQKYYPQILTDVLKYGRNGKEIFPKEPEPLNNKTDPLTEYGIYGILFFQRKIYWPRSVVGRCELEPREKRCPRAARIAQRFRMVQEVNNLMLLDRTTGEYRSLSQSEREQLLGFLSEKEKMTFDEIRKKLNLGDMVRFNFESGGRDKLDGHKTDHAMASKKALGKHWKELSDDIKDTVVDILNYEDQDTDTIRRLTNECKLTEEEAQKAIYAPLPDGYMSFSRTAMRKLLPFLEKGYMLMGQNAENSALHAAGYLRPDEREINQRRFLPIPPQFTNPIVRQAIYEVRKTINAILKELVYRQGDELTHIYVELAREAKKSFDERKEIRIDNSKKQNIRTDAADEIAKFNSSIKLSRKTINRYLLWQEQHEDCPYCGQKISLAQLFNGDADVDHILPRWQSLDDSMANKVVAHRTCNQEKGDQTPCKWLESNQERYQIALKIASKLPFGKQKKFQQKEVVLEDFVNRQLTDTAYITRCVSQYLRCLGAEVVCTRGQMTSDLRHYWGLNTILNPEGQGEKNRDDHRHHAVDALVIGLTDRKRLFALANNKENIQPPWPGFREDAEIFIKEINVSFRPRRKLQGALHDAMFNGATQKIENNKRKKPEDRPWAITLNKITGEPVPWIEEEQTFVRRIFVKDLTKTQELKKVRDPVIREILREHLRVRGIDPDKRGEIGNAFKCENLPTMPSGVPIKRVRMVENSETMQPVSDRRNYQFVEPNSNHHVIIYQLFDDQEKPIIETRGGHKGKQKQDGETITMFEVGKRILNKKPIIDRSDKKEGKIIKKFAMSLSINEMFLLEMQDGPPILHRIQKLSEGSIILRPHTYAGKVSDYDKPPLIQRRSPNTLRGQKVTVDRLGRIRRVKKLIVSV

SEQ ID NO: 15777 - protein, 1020 aa, unidentified
  REGION 1..1020: note = Cas Enzyme sequence
MRIWGLDLGTTSIGFAVIEHDSARAVGRIERLGVRIFPEGVTEDKKEPRNKTRRAKRLMRRGLRRRKLRRRLLNEALAAAGFLPPYKDAAAWNVAMSLDPYSLRVKGLTEALKPYELGRAFYHLAKRRGFAGRGGDDDKRDPDEAKAREDAAKLQQEVGGKTLGEYLAQQDKKRGRHHTRSMIESEFNRLWDKQKAFHPALNDPQFAERIRNLIFFQRPTFWRLATLGRCPFVPCAPLAPKASWVAQRYLVLEQLTKLRIAGANQRPLLDDERAILLDLAHRQKSISWNGVRKALRSLWRDGGEPEDQAFNLEVSKAETGIKGNVVEYELRQIFGSAWDDHPKRDEIRRDLHRRLWTADYVQVGNARVEIRRPDQAAQERRNAAAAMVRDWGVTETQADALSRLELPSGWLRLSDAAVEAMLPELERGNGVGKLLESPEFAGWRERTFPNREQPTGEVCDRLPSHPRAMPAVRNPTVHRTLNELRKVVNNLIRAHGRPDSIRIELTRDLRESKNRRSERLSRNKKQEADRKKAVADLQAHGIANPGRDDIEKWLLWKESNERCPYTGDHIGFDALFREGKYQVEHIWPRSRSLDNGFGNKTLCRTDVNIAKGNRTPFEMYAHDAEAWNALKLRLADCKLPEYKVRRFVKDMISDAGSEEFAERQLADTGWAAREARDFLKRLWPDEGKAKSAPVETVNGRITAQLRHQWGLNAILNPEGQGKNRADHRHHAVDALVAALTTRGFVKRLADWHKIRETGVRPPQLDLPWNGLLKEAEAKISEVVVSHKTRRKVSGALHAETIMGDTRETERTKTGTYRLFVTSKPVERLSKSEIADIRDPKVREIVARHVAGRGGDPKKAFPPYPHLPMKDGQPGPEIRRVRLRIKQQIGLMVKAGTGFADPAANHHIAVYRTPDGEIKFKPISLHEAAQRVARREPVVARTLDGAKLIFSIAPGDTIEFPRGHKYAGLRSVTSVWSSGVVVTEACNDAQGEPWRPTIGSLISAGARKVSVDPIGRVRPAR

SEQ ID NO: 15778 - protein, 1036 aa, unidentified
  REGION 1..1036: note = Cas Enzyme sequence
MTYVLGLDLGARSLGWAAIAREGENEQKILGLGVRIFEAGVEGSLETGREESRSAQRRIARLARRQTRRRRQRARQFYHALSNAGLLPPVSHAPGKPEAIEIQRVLNALDSELRQRHGAHSAIHQLPYLLRARALDEKLEEFELGRALYHLGQRRGFKSSRKAKAKDADEEKGKVYGGIHDLEARMQGKRTLGEYLAGLDPAEERIRGPYRYTHRSMYEAEFEAIWAAQEPYHAALTEQLKDVLKQVLFFQRPLQDSSELIGRCEWDPEKKRTQLWRPEFQRFRILQTANHLRLRDPEGILWKLSEDQRQRLIQALEGAKEIGLAKAKKLLKVAANWKFTIEDGGETKFKGDGVAAQMSAQLGEQWDGADAARRTEILEGIAKAETDEDVAAFLTRECGMEPEKARMAAEKISLPSGYASLSLEALKKALPFMEKGLSVQEARVEAGFDLTRESEPLAYLPPIQATDIELRNPAVARALTETRKVVNAIVREWGKPEEIHIEMARELKSSPVQRQKAMKINRDREKEREAARARIEKEAGLGRIGRKEIELALLYEECGGICPYTGKPLGGLASILNGTAAVQVEHIIPRSISLDDSFSNLTLATVEANGKKGNRTPREAFGGDAAQFDEIIQRVRSFKGDYYAARKLERFQMEETGKEALLAEFSARHLNDTRYSSRLAAEYLGLLYGGEIAGGKRKVLKATGQVTADLRGLWRLNEILSGDSRKSREDHRHHAIDAAVLAVVGQKWIQRLSEAAENAWKEKKRRYASVEPPWVGFNEDLQEAIGATHISYRPDHRITGGLHKDSNYSFVGKNAQGGDIVRIRKPVHSLGKDDIEKIVDLGVRRIVAEKVAAVGDFKKLESDPPLLPNKNGAPMPVRKVRIKLNRAVRKIGKGHKVRYAEGSETHHVEVCEVTEKGKRVWRGDVVSMSEAMERLVAGRAVVDRSEANERGFLFSLCKGDTVELNDPKGELSGIWVVKKIKGNQQVVISPEHDARLENGAEGERRAARAPTVGGLKALRTRKVVVDPLGQIWEAHD

SEQ ID NO: 15779 - protein, 1057 aa, unidentified
  REGION 1..1057: note = Cas Enzyme sequence
MPYVLGLDIGARSVGWALLEKEGDSFTRILRAGVRVFEAGTEGDIEQGRDESRGATRRAKRLARRQIRRRRQRARALYRELSGAGLLPPITPVPGSPMAVLIQEAINRLDCELRRKYAGERAVNQLPYLLRARALDHRLEPHELGRALYHLGQRRGFKSNRKAESGKKAMEDSSKAGEEKSLVYRGIDDLKRQIREAGARTLGEYFATLDPAEQRIRTRYTHRSMYEEEFEAIWEAQRRHHAALTRELKDRLWQILFEQRPLRDTEDLVGECAWIPGEKRAPVWSLDYQRYRVLQTVNHLRVAENRCAPRPLTHEERWRLLEELEKKPKVTIAQAKKLLGLKKAEFTIEEGGEKELPGDKVAAQFYEKLGESWSRLNPEERRALVECVATAETDEQLSETLQQQWGLSADQANKVVREVHLPSGYAPLSLKAIRAVMPYLEQGMDVQRARLAAGIPLDRPVSVHALLPPVADSRVAVFNPAVKRALTEMRKVVNAIIRRYGKPDEIHLETARELRKSREERMKESRRMRDREKEREEIIRRIRDEVGIPEEKISRDDVLKGLLWQECEGRCPYCGESLGGFASLFGGNSPAQIEHIIPFSRSLDNSFVNLTLAHVSDNAYKGDRTPREAYGSDPERWDEILQRVEVFKGSYSKAKLNRFKMDESAVGELFEQFSSRALNDTRASAVAAARYLSLLYGGETVDGKRKILKVTGQVTAYLRDVWGLNGLIPSIHREARGEAEDGQAEARPVKSRDDHRHHAVDAVVVALCNQGWIQRLSEANRGALAARRRLFAPVEPPWVGFKEQLKDILKSMNISFRPDHRVTGALHKETFYTRIGKNEKGGDVVRVRVPVTGLGSKDVEAIADPAVRAIVRAKLEEVGGNAKKLENNWPLLPNRNGKPVPIKKVRVNLNRAVVSVGKGRWQRWAEPSETHHIEIYEVTSRGKTAWSGDVVTMRDAIGRASRGEPVVRRDGGPNSRFLFSLAKEDTLRLQGEKPGIWVVKKIRANTQMMLVPQYDARKEKDSSNGRESFSPTPGGLQKYSAEKVLVLPIGDVVRCNE

SEQ ID NO: 15780 - protein, 1053 aa, unidentified
  REGION 1..1053: note = Cas Enzyme sequence
MPYVLGLDIGARSVGWALLEKEGDSFTRILRAGVRVFEAGTEGDIEQGRDESRGATRRAKRLARRQIRRRRQRARALYRELSGAGLLPPITPVPGSPMAVLIQEAINRLDCELRRKYAGERAVNQLPYLLRARALDHRLEPHELGRALYHLGQRRGFKSNRKAESGKKAMEDSSKAGEEKSLVYRGIDDLKRQIREAGARTLGEYFATLDPAEQRIRNRYTHRSMYEEEFEAIWEAQRRHHAALTRELKDRLWQILFEQCPLRDTEDLVGECAWIPGEKRAPVWSLDYQRYRVLQTVNHLRVAENRSAPRPLTHEERWRLLEELEKKPKVTIAQAKKLLGLKKAEFTIEEGGEKELPGDKVAAQFYEKLGESWSRLNPEERRALVECVATAETDEQLSETLQQQWGLSADQANKVVREVHLPSGYAPLSLKAIRAVMPYLEQGMDVQRARLAAGIPLDHPVSVHALLPPVADSRVAVFNPAVKRALTEMRKVVNAIIRRYGKPDEIHLETARELRKSREERMKESRRMRDREKEREEIIRRIRDEVGIPEEKISRDDVLKGLLWQECEGRCPYCGESLGGFASLFGGNSPAQIEHIIPFSRSLDNSFVNLTLAHVSDNAYKGDRTPREAYGSDPERWDEILQWVEVFKGSYSKAKLNRFKMDESAVGELFEQFSSRALNDTRASAVAAARYLSLLYGGETVDGKRKILKVTGQVTAYLRDVWGLNGLIPSIHREARGEAEDGQAEARPVKSRDDHRHHAVDAVVVALCNQGWIQRLSEANRGALAARRRLFAPVEPPWVGFKEQLKDILKSMNISFRPDHRVTGALHKETFYTRIGKNEKGGDVVRVRVPVTGLGSKDVEAIADPAVRAIVRAKLEEVGGNAKKLENNWPLLPNRNGKPVPIKKVRVNLNRAVVSVGKGRWQRWAEPSETHHIEIYEVDEKGKKVWRGDVVSMREATERAARGTPITHRRGGVNTRYLFSVSKEDTLRLHGEHEGLWVVKKIAQKGQITLVSQYDARPEQGRTVFSPRLGGLQVHSAEKVVVLPIGDVVRCNE

SEQ ID NO: 15781 - protein, 1036 aa, unidentified
  REGION 1..1036: note = Cas Enzyme sequence
EGDSFTRILRAGVRVFEAGTEGDIEQGRDESRGATRRAKRLARRQIRRRRQRARALYRELSGAGLLPPITPVPGSPMAVLIQEAINRLDCELRRKYAGERAVNQLPYLLRARALDHRLEPHELGRALYHLGQRRGFKSNRKAESGKKAMEDSSKAGEEKSLVYRGIDDLKRQIREAGARTLGEYFATLDPAEQRIRNRYTHRSMYEEEFEAIWEAQRRHHAALTRELKDRLWQILFEQRPLRDTEDLVGECAWIPDEKRAPVWSLDYQRYRVLQTVNHLRVAENRSAPRPLTHEERWRLLEELEKKPKVTIAQAKKLLGLKKAEFTVEEGGEKELPGDKVAAQFYEKLGESWSRLNPEERRALVECVATAESDEQLSETLQQQWGLSADQANKVVREVHLPSGYAPLSLKAIRAVMPYLEQGMDVQRARLAAGIPLDRPVPVHAILPPVADSGVAVFNPAVKRALTEMRKVVNAIIRRYGKPDEIHLETARELRKSREERMKESRRMRDREKEREEIIRRIRDEVGIPEEKISRDDVLKGLLWQECEGRCPYCGESLGGFASLFGGNSPAQIEHIIPFSRSLDNSFVNLTLAHVSDNAYKGDRTPREAYGSDPERWDEILQRVEVFKGSYSKAKLNRFKMDESAVGELFEQFSSRALNDTRASAVAAARYLSLLYGGETVDGKRKILKVTGQVTAYLRDVWGLNGLIPSIHREARGEAEDGQAEARPVKSRDDHRHHAVDAVVVALCNQGWIQRLSEANRGALAARRRLFAPVEPPWVGFKEQLKDILKSMNISFRPDHRVTGALHKETFYTRIGKNEKGGDVVRVRVPVTGLGSKDVEAIADPAVRAIVRAKLEEVGGNAKKLENNWPLLPNRNGKPVPIKKVRVNLNRAVVSVGKGRWQRWAEPSETHHIEIYEVTSRGKTAWSGDVVTMRDAIGRASRGEPVVRRDGGPNSRFLFSLAKEDTLRLQGEKPGIWVVKKIRANTQMMLVPQYDARKEKDSSNGRESFSPTPGGLQKYSAEKVLVLPIGDVVRCNE

SEQ ID NO: 15782 - protein, 1070 aa, unidentified
  REGION 1..1070: note = Cas Enzyme sequence
MPNRLREEYILGIDLGSNSLGWAIIGLIDDEPAQLICAGTRVFDAGMQGDIQSGREESRNLKRREARLHRRLLWRRRRRLTKLFNLLRRSGLLPAAPETVSNAMGNVHRHPLLPDQLQDYFNNLDKDIVSSEWFKSKAISGLFREPEHTMPYILRASALVEPLEPHFLGRALYHLAQRRGFLSNRKHTAKKNDDEGAVKEGIAELRKAIQEKQARTLGEYLCHLNPAVERIRCRWTARYMYENEFSAIWDAQASHRPDLLTPDRKKQIYDAIFYQRPLWFDPETIGKCELEPSERRAPAHLPTSQRFRLLQTVNNLRVLPPDDIEMTLTPADRKKVIDDLETNGDRTFKQIFKLLKLEKTYAFNLERGGEKRIKGNRTNSDFCKVFGDRWLAMSPERRDRAVEYVHSFQNAAKLKSAAKKHFQIDDEAAKHLAEISLEPDYMNLSRKAIEKLLPLLEEGLTYGEARKIAYPESFQSGEPKPVLPPAEMALAEIRNPAVMRSLTELRKVINAIIRRYGKPRYVHVELARDLKKSKKQRQAISEKNRRNEKSRSDAVMRIMAEADIAEPRPDDIRKFLLAEECHWMCPYTGKSISVRSLFGPEPQFDIEHIIPFSRSMDNSFQNLTLCYVPENRSVKGNKTPHQAYHANSEQYEAMLDRVRKFGGDRQTLAAKLKRFMMNDDELELFLEDFRNRQLNDTAYATSIAAKYLGLLYGGVIDPDGRRRVQSTSGQATSYFRSLWKLNSILNDGPTTNGGAVLKSREDHRHHAVDAVVIGLTDAAVIKRLCDAAQRAPLEHRRRFASLEAPWPNFVDSVRTEIGKIIVSHRVSKKVSGSLHEESIYSRPAGENGEVRIRKPLASLTKPEVEKIADDGVKKLVQRKLDELGETEPKKAFSNPENLPRFPSSGVIIKKVRISKAVPTYALGEGRIARRVTSESNHHVEIYAEIDEHGNEGKWDGEVVSMSDAYQRLKAGKPIVQREFAPLARFKFSLAPGEVIECKDKGEQKLLVVRSVTGLSAGQIVIGLAPVNDARRKGEMQKCRDWVWKVPNSLRESHARKVAICPLGEVTEAHD

SEQ ID NO: 15783 - protein, 971 aa, unidentified
  REGION 1..971: note = Cas Enzyme sequence
ELDKTIFSSPWYAAKKASGVYPEPEQTLPYILRSAALDERLEPHFLGRALYHLAQRRGFLSTRKKAKGAEKEDEEGVVKQGISDLRRKMEEAKARTLGDYFSRIPPSEERIRGRWTARAMYEEEFQQIWNAQAKFHGELPTDERKKLLFQAIFYQRPLKDQPELIGHCELEPDERRAAAYLVTSQRFRLLQTVNNLTILPPGEPEKKLTPADRAKLIEALELHGDQTFPHIRKLLGLTRNYGFNLERGGEKSIKGNRTNSDFYAVFGERWSRMSPQEKQRAILDVRSIQKPETLLRRAREYWKLDEEAAQRFCDISLEPDYLNLSRRAMEKLLPLLEDGITYGEARRLLYPERFQAVEPLPLLPPVQDALTEIRNPAVTRCLTELRKVTNAIVRQYGKPAEIHIELTRDLKQPKKRRQDRADRMRANEKARKAAAKRIVEEAGISDPSPDDIRKVLLAEECRWECPYTGKSISMRALVGHESQFQIEHIIPFTRSLDNSFLNLTLCHVEENKVKANKTPYEAYSGDPERYERIVERVKRFQGDKGIVAQKLHRFLMTPEQVEEFLAGFTARQLTDTAYASRLAADYLGLLYGGVVDQAHARRVQATSGQVTAYLRNLWLLNTILRDGESTHGGYATKPRDDHRHHAVDAVAIALTDAGTVKQLSDAAQRAPLEHRRRFAALQAPWPDFVDSVRQEISRIIVSHRVSKKVSGALHEETIYSAPVAAGGTCPDLIGSPPGAALKGGATDVRHVRKPLASLTKTEVEDIVDPGVRQRVQDKLEELGGEIKKFAKSENLPFLLAKDGRRIPIKRVRIKKRLPTFELGSGRTLRHVTAESNHHLEVFAELDEQGNEVEWDGVVVSMAEAYHRQKLGLPVVQRDHGPKRAFKFSITPGEMLQCEGPHGGRRLLVVRSTTQLSAGSIIIGLAPVNDARPKKEMQADKSWVWKGPDTLRKLNARKVAVGPLGEVSEAHD

SEQ ID NO: 15784 - protein, 1085 aa, unidentified
  REGION 1..1085: note = Cas Enzyme sequence
MTENPVQDFILGIDLGSSSLGWALIERANGEPTGLLRAGVRIFEAGTEGDRESGQEESRNRARREARLQRRQVARRARRQREVFHLLQSYGLLPPGGATEEARQNLLNGLDRTILASEWFRTKAASGAFPAPAQAMPYVLRAAALDEPLEPHFFGRALYHLAQHRGFLSNRLKPAKKEEDEGVVRQGINMLRQEMGAAQARTLGEYLAHLPTSEQRLRGRWTHRDMYKDEFNALWEAQTRHHPALLSDEHEEELFQAMFFQRPLKFDPAVVGHCELEPGQRRAPRYLIVSQRFRLLQGVNNLELYPPLEGERELTAEERRKLVDALELQGDQTFAAIRRLLGLKKRVAFNLERGGEVSIKGNRTSAEFFAVFGDRWLAMSPEERDDAVQYVYSFEKADKLKEAVKRKWGVDERSAERLSEVSFEPDYMNLSRRAMEKLLPLLEQGATYAAARHQLYPEQFRTAEPLPELPPIECTTDSEALRKWAEHKKIVPEAGRLPDPVGAIRNPAVMRSLTELRKVVNAIIRQHGRPAEIHVELARDLKKPKKQRQSLSERMRKNEAERKQASKRIFDEVGIKEPKADDIRKVQLAQECGWKCPYSDRTISMRRLVGPESEFQIEHIIPFSRSLDNSFVNLTLCHVEENKNKSNRTPYEAYSGDRERYEQILAHVRQFTGARALVAAKLRRFQMTAEELEKFSSEFSSRQLTDTAYASKLARRYLSLLYGGLADEAHEQRVFASPGRATAYLRSEWKLNSILQDGPTAAGGRFPKERTDHRHHAVDAVAIALTSPASVKALSDAAQRAPLEHRRRFASLQAPWDGFVDSVRNVVNSIVVSHRVSKKVLGLLHKDSIYSAKIDAEGSRHLRRYLRAMKPAEVARIVDPKVRGKVEQKIAQLGGGDPAKIFSKEENLPFFEPGDGGRIPIRSARIKEKVKTFTLGEGRSSRAVRPESNHHLKMYATLDPRGQESRWDAELVPMHEAYRRLKDGTPLVQRDLGPLARFKFSLTQNEALECDEAPDKRRLLVVRSISQEEKTGSIKVEMVPISEARKKEEIKRLHAWITKSPNELRKWHARKVSVSPLGEVSEAHD

SEQ ID NO: 15785 - protein, 1082 aa, unidentified
  REGION 1..1082: note = Cas Enzyme sequence
MVGYRIWLCCQGFNMKNDSLEDWILGIDLGTNSLGWAVIGTKEGVPERLIRAGARVFESAMEGNSEAGKEESRNRARREARLARRQHWRRARRLHKTFNLLQRFGLLATGASETPQDRQDSINRLDRSILTSEWFSIVKDSAAYPEPMQVLPYILRARSLDERLEPHAFGRALYHLAQRRGFLSNRKQERAAKKEDEGPVKKSIGELEGEIEKTGARTLGEFFGRLSPTEKRIRTRYTARKMYKDEFNKMWEAQAAHHPTLLTPERKKLLFQTVFHQRPLKFDPDVIGRCELERDERRAPAYLLVSQRFRLLDRANNLEVIPPGETSRPLTVADRAKLIQELELKGDLSFKKIRELLGLPKNYHFNLEEGGEEKLPGNRTAAQFYGALCQRWLDMPPDERDRMVEYVHGFEKPEKLEEAARKKWGLDGASAEKFADVSLEPDYLNLSRRAIEKVLPLLEEGVRFATARKQVYPRSFEVLKAVDFLPPVMDSLDIRNPGVMRSLTELRKVANAIIREYGKPAEIRIELARELKKPKKVREATFKKNRENQKSRIAAAKRVEKEVGLSNPSRDDIRKVQLAEECGWLCPYTGQPISMRTLLSEPQFDIEHIIPFSRSLDDSFVNVTLCAIEENRNRKGNKTPYETYRGEPARYEEILERVTRFSGKGGAATEKLRRFKMTPDEVEARLTDFTARQLGDTAYASRLAAQYLGLLYGGTVDAKGTRRVQATSGQVTAFLRNEWKLNGILQDGPTSKGGSRVKSRDDHRHHAVDAVAIGLTSAGTIKMLSDAAQRAHQERRRRFGSVQSPWVNFVDTVREEVESIVVSHRVSRRVSGPFHKETNYALCDLNALRNSKEARLPRTRKLLKAMNAAEVERIADESVKRLVIEKLKSLGVNDPEQAFSNALNLPHVPNRNGPPVPIKKVRVKDQVKTVVLGEGRARRFVRPESNHHLEIYAEVGPKSEEKKWGGEVVTMHEAYQRLRQSMPIIQRNYGPLAVFKFSIASGETLECDDGPGKRSLFIVRSISKEGKTESIKVEMIRINDARLKAEVKKAGRWTTKSPNMLFQMKALKKVVSPVGGVSEARD

SEQ ID NO: 15786 - protein, 1071 aa, unidentified
  REGION 1..1071: note = Cas Enzyme sequence
MAEQPCGEYVLGIDLGTNSVGWAIIGLVDGEPTKLLRAGVRVFEAGMEGDIESGQEQSRNLKRREARLHRRQLWRRARRMTKTFNLLRQFGLLPEGDASTPEKRQDFINKLDQDIRASEWFKARAKSGAYPEPEQTLPYILRSAALDEPLEPHFLGRALYHLAQRRGFLSGRLRPAKTGEEEGKVKGAIKTLRAQMAEKGSRTLGDFLSHLSPTERRIRGPEAWTARSMYEEEFERIWTAQAQHHPSLLDEQRQKKIRQALFFQRPLWFDPDTVGQCELEPGERRAPAYLLTAQRFRLLQKVNDLQIEEPDRAPRYLTPEERAKLSDALELQGDLPFHKDRKVEGRVLPSVRTLLGLPNKVLFNLQRGGEERMQGNRTTSEFYAVFGERWLDMSAEEHKYAILDVLSIHKPEALRRRAMGHWKLSAEAADRFCEISLEPDYMNLSRKALENLLLVLEQGIPLQTARKQLYPESFKASEPKPLLPPVEQSLTEIRNPAVMRSLTEFRKVVNGLIRSYGKPAYIRIELARDLKKSKKQRTAVSEINRRNEKARAKAAEDIVKGGVGIREPKREDIRKYQLAEECHWQCPYTGKTISVQALFGPEPQFDIEHIIPFSRSMDNAFQNLTLCYVPENRSAKGNKTPHEAYSSHPERYQAILDRVKRFTGEHAMVSAKLRRFTMAEDELQEFLADFRNRQLNDTAYASTLATRYVGLLYGGPADAEHRQRVFAPSGQTTAYFRNLWKLNGILNDGPSRDGGRIEKSRDDHRHHAVDAVVIGLTDTGMVKRLSDAAQRAPSAGHKRFAALEGPWPNFVETVREAIRQIIVSHRISKKVSGALHEETVYSPPQADGSVRVRKPLAALTKHEVESIADDRVKALVVSKLAGGEPKKVFATEENLPHFETSDARRIPIKRVRIKKAVPTFSLGGGRTTRHVATESNHHIEIFAELDQQGKEREWDGIVVPMHEAWRRLRAGEPVVNRDAGPGRLYKFSLAQGEVVECDGKHEGRSLFVFRKVTQFTKGGIQIGFAPLNDARKAREMQVARAWLWTTPNTLGDRHARKMTVNPLGEVTEAHD

SEQ ID NO: 15787 - protein, 1075 aa, unidentified
  REGION 1..1075: note = Cas Enzyme sequence
MAGQPCGEYVLGIDLGTNSVGWAIIGLVDGEPTKLLRAGVRVFEAGMEGDIESGQEQSRNLKRREARLHRRQLWRRARRLTKTFNLLRNFGLLPDGDASTPEKRQDLINKLDQDIRVSEWFKARAKSGAYPEPEQTLPYILRAAALDEPLEPHFLGRGLYHLAQRRGFLSGRLRPAKTGEEDGKVKGTIKTLRAQMEEKRSRTLGDFLSRLSPTERRFRGPEAWTARDMYEREFDAICDAQAPHHPDALNAERKARLRDAIFHQRPLKFDPNVIGDCELERGEKRAAKYLLLSQRFRMLQMVNNLRLLPPGEMERGLSPQERQKLVEALEYEDDLKFTQIRKLLGLQKDHIFKGEPEGEKRVIGNRTNSSFSAVFGERWHSMLTEERDRAVEWVHAFERPEELMPLANTAWNLNEEAALKLSEISLEPDYMNLSGKAMERLLPRLERGESFAEARSAEYPESSKAADPLPLLPPVASEDAKRKAGVVRNPAVTRSLSELRRVLNAVVRRFGKPTYIHVELARDLKKSRKQRQAISKRNDENEAIRERALQRVKEMTGEQYPSRDDIRRVQLFDECHGQCPYCRESIPGRNFLGKESQVDIDHIIPFRRSLDNSYLNLVICHSKCNRTKGDRTPYEAFSGDAERYEEILDRVKRFAGDRRTVTEKLRRFMMDAEQPEGFLADFRSRQLNDTAYAARIAKGYLGLLYGGEIDTQNRRRVFARSGRATSDFRSLWKLNSLLNDGPTTGGGRVEKERADHRHHAVDAVVIGLSSDAMIQRLSTAAQWAPDRELRRRLFGPLDAPWPNFVDTVRAEIKGMVASHRASKKVSGALHEETIYSRFDPTAPVNSPLRESRIRQWVNQLSPKDVENIADEGVKSRVREKLTEVGGDPRKLPDPKDPANQQNLPYMVAEKSGRRIPIKRVRVKVSVQPVPIGVSPRQRYVKLGSNHHIEVFAGTDKRGREQWKGEVVSMFNAYQRLRKHCSVVDPEKRGNLVFSLAPGECVKFDDGPFKGQVFVTRGVTLEGGGRVFLVPINDARKKEEIVASKLYRREFVSTLRRWKTRKIIVSPLGEVSEAHD

SEQ ID NO: 15788 - protein, 1076 aa, unidentified
  REGION 1..1076: note = Cas Enzyme sequence
MSEQPCAEFVLGIDLGTNSVGWAIVGLIDGEPAKLVRAGVRVFDAGMEGDIESGQEQSRNLKRREARLHRRQLWRRARRMAKTFNLLRQFGLLPDGDASTPEKRQDLINALDKSIRESTWFQAKAASGAYPEPEQTLPYILRAAALDEPLEPHFLGRALYHLAQRRGFLSNRLKPVKIDEEEGKVKGTIKTLREEMKQQDSATLGDFLSHLSPAERPIRGPGSWTARDMYEKEFDAVCDVQAPFHPDALSGDHRAKLREAVFHQRPLKFDPNAIGDCELEAGEKRAPAYLLVSQRFRMLQTVNNLRLLPPAERERPLTEPERQKLVEALELNHELTFTQIRKLLGFPRSCLFKGEPEGEKRVIGNRTNAALYAILGEPWRTMAVSERDRMVECLRTFRKPEELILLVKQEWCFDDEAVEKLSEVTLEPDYMNLSRKAMERLLPRLERGESFAAAREAEYHTESRKVFEALPLLPPLAAEEVQRRVGTVRNPAVTRSLSELRRVVNGVIRQFGKPAYIHVELARDLKKSRKQRRAISKRNHENEAGRKRASERVQEMTGDPYPSRDDIRRIQLFDDCHGQCLYCGESIPGRNFLGKESQVDIDHIIPFSRSLDNSYMNLVICHSRCNRAKGDRTPFEAYSADREAYEHILSRVKGLAGDRRTMAEKLRRFAMDAEELQLFLDGFRNRQLNDTAYAASIAKGFLGLLYGGEIDEQKQRRVFARSGGATSDFRALWKLNSILKDGPTTGGGRIEKERTDHRHHAVDAVVIGLSSDRMIERLSRAAQVAAERESRRKLFGPLDEPWPSFLQTVSQEIDRIVVSHRVSKKVSGPLHEESLYSKFEAKAPTGSPLSVPRLRKWINELSAKDVENIADEGVKSRIREKVAGVGGDPRKLPDPKDPANQDKLPYMIAKKGGRHIPIKRVRVKVSLQPVPIAMGPRQRYVKLGSNHHIEVFAGTDRRAREQWKGEVVSMFHAYQRLAQRRPVVNPEKKGGLVFSLAPGECVRFDDGPFKGQLFVMRGVTQERDGRIILVPTNDARERDKIRESKLYRREFVNTLREWKTRKVVVTPLGEVSEAHD

SEQ ID NO: 15789 - protein, 1058 aa, unidentified
  REGION 1..1058: note = Cas Enzyme sequence
MTEQGVGEFVLGIDLGSNSLGWAMVGLVDGEPANLIRAGVRVFDAGMEGDIESGQEQSKNLKRREARLHRRQLWRRARRLTKTFNLLRQFGLLPTGDASTPEKRQDLINDLDKLIRSSDWFKAKASTGKYPEPQQTLPYILRAVALDEPLEPRFLGRALYHLAQRRGFLSNRLKPAKQQDDEGAVKKGISELRKAIEETRARTLGEYFARVSPTQRRIRSRWTARSMYEEEFESIWTAQAPHHPTLLTDERKKGLRQILFFQRPLWFDPNVIGGCELEAEERRAPAYLLPAQRFRLLQTVNNLKVLPPGQPERDLSGVERKKVIDALELKGDQTFVQIRKLLSLKGCEFNLERGGEKRIKGNRTSADFCGAFGERWLEMTPVERDRAVEYVHAFQRPDKVAPAAKKAWHLGDEAAEKLGEISLEPEYLNLSRRAIERLMPLLEQGVSYATARRQLYPERFEARKPLASLPPVEQALSEIRNPAVKRSLTEVRKVVNAVVRAYGKPTQIRIELARELKKSKKQRQALSDAMRKNEKARAEAARRIIAEAGVAEPKPDDMRKFLLAEECRWQCPYTGRTISMQGLFGPEPQFDIEHIVPFDRSLDNSFTNLTLCYHEENRNVKRGRTPFQSYGGSERYDQILDRVSRFTGERRMAAAKLRRFKLNDEELELFLADFRNRQLNDTAYASSLAAGYLGLLYGGLTDAGGDRRIQASSGQTTAYFRSLWKLNSVLDDGPSTHGGRAAKSRFDHRHHAVDAVVIGLTDAAMVKRLSDAAQRAPFTGRKHFASLEAPWPNFVDSVRQEIDRVVVSHRASKKVSGALHEETIYSRPLPDGASRVRKPLAALTKSEVEDTADPQVRRIIQKKLAEIGIDDPKKAFSDESKLPFFQARDGRRVPVRRVRIKKALPTSPLGDGRTVRHVASESNHHVEVYAEIDEKGNEGEWDGDVVSMFEAYQRQKARKPVVQRDHGPVVSFKFSLAPGEVIECDGKTRGRSLFVMRKASRLSSGQLQIGFAPINDARKAKEMQTSRAWLWATPDTLSQRHPRKVMVNALGEVSEAHD

SEQ ID NO: 15790 - protein, 1003 aa, unidentified
  REGION 1..1003: note = Cas Enzyme sequence
EQSKNLKRREARLHRRQLWRRARRLTKTFNLLRKFGLLPSGDASTPKERQDLINELDQTIRNSAWFPAKASSGAYPEPQQRLPYILRAAALDEPLEPHFLGRAFFHLAQRRGFLSNRIKSAKKNDDEGAVKKGISELRQAIQETDARTLGEYFAHVSPTERRIRGRWTARSMYEDEFEKIWAAQGPHQPTLLTDERKKELRQALFFQRPLWLDPRVIGRCELEPEEHRAPAYSLLAQRFRLLQTVNNLRVLPPGQPERDPSADERKNLIDDLEAKGDQTFARIRKLPGFKKCEFNLERGGEKRLMGNRTSADFQAVFGDRWSKMSAEERDSAVEYVHAFQRPDKLADAASKKWGLGDEAAERLAGVSLEPDYMSLSRKAIKRLLPLLEEGVPYATARRQLYPERFEAGAPLPSLPPVEQALTEIRNPAVKRSLTELRKVVNGVIGACGKPVQVRLELARDLKKSKKQRQALTEAMRKNERERAAAAKRIISEAGVTAPKPDDIRKFLLAEECRWQCPYTGRSISMGALFGPESQFDIEHVIPFDRSLDNSFTNLTLCYHEENRNVKRGRTPFQAYHGAERYDQILDRVARFTGERRMVAAKLTRFKMNDEELEVFLEDFRNRQLNDTAYASSLAARYLGLLYGGLNDAAGNRCVQATAGQTTAYFRSLWKLNSILNDGPSTDGGRVAKSRADHRHHAVDAVVIGLTDAGMVKRLSDAAERAPREGRKRFAALEGPWPNFVDTIRAEIGRITASHRVSKKVSGALHEETIYSGPQSEGASHVRKALATLTKSEAEDIVDPQVRKMVQKRLAQLGVEDPKKAFADETKLPFFESRDGRHIPIKRVRVKKQVPTFVLGSGRIERHVTSESNHHVEIYAQLDGQGNVGAWDGEVVSMYEAYQRQKTRKPVVRRDHGPPVKFIFSLAPGELIECDGKSGGRSLFVVRKASRLSSGQLQIGFAPINDARKAKEMQTSRAWLWATPESLSHRHPCKVLASPLGEVSETHD

SEQ ID NO: 15791 - protein, 1071 aa, unidentified; identical to SEQ ID NO: 15786
  REGION 1..1071: note = Cas Enzyme sequence

SEQ ID NO: 15792 - protein, 1091 aa, unidentified
  REGION 1..1091: note = Cas Enzyme sequence
MADATPTEFVLGIDLGTNSLGWAIIGLIDGEPANLIRAGVRVFDAGMEGDIESGQEQSKNLKRREARSHRRQLWRRARRMTKTFNLLRKFGLLPSGDASTPEKRQDLINALDNTIRSSNWFKTKASSGDHSEPEQTLPYILRAAALDEPLEPHHLGRALYHLAQRRGFLSGRLKPAKKEDDEGAVKKGISELRKAIEETHARTLGEHLAHVSPTERRIRGPEAWTARSMYEEEFEKIWAAQASHHPTLLDDERKKQIRQAVFFQRRLRFDPDTVGQCELEPGERRAPAYLLTAQRFRLLQRVNDLQIEEQSKAPRYLTPEERAKLSDALELQGDLSFHKDRKANGRVLASVRKLLGLPKDVSFNLQRGGEEKMPGNRTTSEFNAVFGDRWLEMSAEEHNQAILDVLSIHKPEALKRRASGHWKLDEQGADRFCELSLEPDYMNFSRKAIENLLPLLEQGIPLQTARKRIYPESFKASDAKPLLPPVEQALTEIRNPAVMRSLTELRKVVNGVVRRYGKPTYIRIELARDLKKSRKQRAAISEINRQNEKARAKAAEEIVKSDVGIKEPKPEDKRKYQLAEECHWQCPYTGKTISIQALFGPEPQFDIEHIIPFSRSMDNSFQNLTLCYVPENRSAKGNKTPNEAYSGDSERYQAILDRVKRFAGERTMVSAKLKRFMMNEGELEDFLEGFRNRQLNDTAYASRLATRYVSLLYGGLADAEHQQRVFAPSGQTTAYFRNLWKLNAILNDGPSTDGGRVAKSRGDHRHHAVDAVVIGLTDAGMVKRLSDAAQRAPIAGRKRFAALEGPWQNFVDTVRSQIDRIVVSHRVSKKVSGALHEETIYSRPFPSAAVSDRRSRSNADQGGVTSATVVRVRKPISALTKNEVEEIADEGVKSLVVAKLSGGEPKKVFANDENMPFFEASDGRRIPIKRVRIIKAVPTFPLGNGRTARHVATESNHHIEIFAELDQQGKEVEWDGIVVPMHEAFRRLRTAEPVVNRDPGPGRLYKFSLGQGEVVECDSKQEGRSLFVFRKVTQFTKGGIQIGFAPLNDARKAREMQVSRAWLWTTPNTLGKRHAHKMTVSPLGEVTEAHD

SEQ ID NO: 15793 - protein, 1073 aa, unidentified
  REGION 1..1073: note = Cas Enzyme sequence
MPAPLSSQDYILGIDLGVGSVGWAIVGTKDAQPSALVRAGVRVFAPAVEGNIESGREESRNVARRSARLQRRQTWRRSRRNLRVFRLLQTWGLLPVGASKTSQERHDLLDLLDLRILGSDWFQRKRIDNSIPEPMQVLPYLLRASALDEPLEPHFLGRALYHLAQRRGFLSNRKVSSRSKADDDSGLVKPAIADLRKQMLETGSRTLGEFFSRTSPSQARIRSRWTGRDMYEGEFTFIWDSQTVHHPTILTPERKKLLHKAIFFQRPLSSARHLIGTCELEPKHRRAPRSLLVSQRFRLLQRVNDLQIVLPGQPTRDLAPEERADVLNSLERKGDLTFPAIRKLLHLPKEAKFNLEAAGETRILGNRTNAFFLRLFGDRWDKMPSEERDQIVDYVRSFQRLDKLPTAAAKKWGLSEESAQILESDPLEPDYLNLSKAAMCKLLPLMEEGVPYAEARRQVYPQRFVSQAPQELLPPVFLAEASVGRIRNPSVVRSLTELRKVVNAVVRKFGKPKQIRIELARDLRNSRAQRERMAKSNRENEKLRADAAKRILKEIGNPGPSRRDLQKAQLWDECHGECPYTGKVISFASLFGPEPQFDIEHIIPFSRSLDNSFTNLTLCHAEHNRNVKQNRAPSEAYGSDPDTYQAILNRVRKFSSRSATEKLRRFLMTPEEIQNFVSDFAESQLNDTRYASRLASDYLGLLYGGRVDADHKLRIRATVGRITAILRDEWKLNAILNDGSTLQGGLTLKSRDDHRHHAIDAIVTALTDEGTIQTLSRAAENAYLAKRRRFAPIEEPWQGFFEDVRNEISRIVVSHRTSGRVRGPLHEQTLYSHPIPVAAGASGQKKPGKPGFEHRVRKPLESMTTEEAANIGDPVVRSLVAEKLAQFGGAVPKTVFSVPANLPVFQASDGRRIPIRRVRVRKPLTATVLGSGPSTRYVVPESNHHAEIFAELDQKGKEIEWDIFIVSLAEAIRRKHSRESVVSKNHGAQETFKFSVAPGDVIEMDVASGRRQYFVVRGTSYPSVSLAPIADARQKKELVKDHAYLRMVPNSLRKKNARKIHVTPLGDVEEAHD

SEQ ID NO: 15794 - protein, 1073 aa, unidentified
  REGION 1..1073: note = Cas Enzyme sequence
MPAPLSSQDYILGIDLGVGSVGWAIVGTKDAQPSALVRAGVRVFAPAVEGNIESGREESRNVARRSARLQRRQTWRRSRRNLRVFRLLQTWGLLPVGASKTSQERHDLLDLLDLRILGSDWFQRKRIDNSIPEPMQVLPYLLRASALDEPLEPHFLGRALYHLAQRRGFLSNRKVSSRSKADDDSGLVKPAIADLRKQMLETGSRTLGEFFSRTSPSQARIRSRWTGRDMYEGEFTFIWDSQTVHHPTILTPERKKLLHKAIFFQRPLSSARHLIGTCELEPKHRRAPRSLLVSQRFRLLQRVNDLQIVLPGQPTRDLAPEERADVLNSLERKGDLTFPAIRKLLHLPKEAKFNLEAAGETRILGNRTNAFFLRLFGDRWDKMPSEERDQIVDYVRSFQRLDKLPTAAAKKWGLSEESAQILESDPLEPDYLNLSKAAMCKLLPLMEEGVPYAEARRQVYPQRFVSQAPQELLPPVFLAEASVGRIRNPSVVHSLTELRKVVNAVVRKFGKPKQIRIELARDLRNSRAQRERMAKSNRENEKLRADAAKRILKEIGNPGPSRRDLQKAQLWDECHGECPYTGKVISFASLFGPEPQFDIEHIIPFSRSLDNSFTNLTLCHAEHNRNVKQNRAPSEAYGSDPDTYQAILNRVRKFSSRSATEKLRRFLMTPEEIQNFVSDFAESQLNDTRYASRLASDYLGLLYGGRVDADHKLRIRATVGRITAILRDEWKLNAILNDGSTSQGGLTLKSRDDHRHHAIDAIVTALTDEGTIQTLSRAAENAYLAKRRRFAPIEEPWQGFFEDVRNEISRIVVSHRTSGRVRGPLHEQTLYSHPIPVAAGASGQKKPGKPGFEHRVRKPLESMTTEEAANIGDPVVRSLVAEKVAQFGGAVPKTVFSVPANLPVFQASDGRRIPIRRVRVRKPLTATVLGSGPSTRYVVPESNHHAEIFAELDQKGKEIEWDIFIVSLAEAIRRKHSRESVVSKNHGAQETFKFSVAPGDVIEMDVASGRRQYFVVRGTSYPSVSLAPIADARQKKELVKDHAYLRMVPNSLRKKNARKIHVTPLGDVEEAHD

SEQ ID NO: 15795 - protein, 1051 aa, unidentified
  REGION 1..1051: note = Cas Enzyme sequence
MRTSNRGQPFVLGLDIGVASIGWIQVGVDGGGEPATVHQAGIHTFDAGVEGDVESGRDEARGAARRMARMPRRMFDRRQRRRKKLLRLLQRSTLLPPGKIGTPQEIHEYLLALDAQLRGRFNPKKERVASHVLPYRLRAAALDGKLEPFELGRVFYHLAQRRGFLSNRKSLKKDEDEGVVQQGITELQTAMTTAGARTLGEYFAGLDPEEERIRRRWTARQMYVDEFNHVWDAQAPHHPAVLTDALRKESFRAIFFQRPLKSARRFIGRCELVPSARRAALADRLVQRFRILQKVNDLEITLPDESARRLLPQERARLIDALSNHGDLTFAKIKSKDVLGALASKPKALPKGTTFNFEQRDEEKKLPGHRTDEKMRSALGERWQKLTESERDAAVLEILSFQNPDALARRAMKVWGLDEQTARALAATRLEQGYAAHSRRALRQLVARMEDGTPYATARRELFPDSFEATKPVDRLPPVLKAVSSLRNPAVARALTELRKLVNEIIRVHGKPQQIRIELARDLKRGRKERERVSKNIDEQTKLRDQARARILKEAGLNVPRRPDVEKALLWEECGGTCPYTGRGIPFAALFGDNPQFDVEHILPFSRSLDNSFANKTLCYHEENREHKRNRTPFEAYSKAPDRYHEIIGRVRGFQGKVAAAKLRRFEMQEIPEDFVNRQLADTRYASRLAGDYLALLYGGRADASGTQRIQISTGGITFHLRNEWLLNSILGQGEKNRDDHRHHAVDALAVALASPGLVAKLQRAAERASDEGRRLFARVQEPWAGFLEQAREKVLAINVSRRQSKKIAGDLHEDTNYSKEYQWIGKDGKPKSVRHVRKPIEGMNEKQVDDIVDPVIREKVLAWLKENPKIKPNAPVQYPTINTRDGREIPIKTVRIRKVISAVPVGEGARKRYVKPGANHHSVIVAVLDKDGKETKWEDYPVTRLEVHKRKAAGQPIIQKDWGPGRRFKFSIAQGESFLINDDQGVPCLWRCTTVSDGDNWFRLNNDARTREALKEVGGRPLRASGNKLKQRGARKVMVTYLGEIVPAND

SEQ ID NO: 15796 - protein, 1204 aa, unidentified
  REGION 1..1204: note = Cas Enzyme sequence
MSAGQNPERPSYILGLDLGVASIGWAMIECDASPQANFKPTKLLSMGSHLFESGTDGGKAGLEGIARGIDKPRNQKRRTARLMRRQTWRRARRKRVLLRALIEHDLLPRPASLGIEIGAGFNRPLDIDAYIKKIDAEMVSRWRAVGKAVGGPGWTHADEQRLCYLLRAAAANGKVTKHELGRALYHLAQRRGFLSNRRAEAKKGEDESSEVKKDIASLAESIEASGLPVKTLGAYLATLNPDERRLRGRWTGRGMYETEFLAIMNEQSKHYPEILDGVSGLWDEIRQAIFYQRPLKDQKGLIGRCSLIPDERRCPISNRRYQRFRVLQTVNNLRLGPPGEEPKPLTPEQREQLIAALMRNGDLTFPAARKLLGLKKNVQFNLETGDETKIPGNRTEGKLRKVFGERLDSFTSADLDRMVEDLRSFRLPDALVRRGVQRWGLTKEEAEEFASIGLEEGYAPICLAAVARLMPLLEEGTPYATARRALFPEQFEAGMAFDELPPLSCFDDRHDPSKCHSKCCGKRSSISKDLTMIRNPAVTRTLTEARKLVNELVRRFGKPVKIRIELAREIKNPRGIRERISKQNREREKERAAIAALITKEAGIARPTRDDIQRAMLAFECDWQCPYTGKQIHWKDLFGKQPQFDVEHIWPKGRSLDDSFLNKTLCHHEHNRGRKRGHTPVEAYGTEELEQILARVRKFDADPFTKAEKLRRFMEPIDEGFTNKHLSDTRFISRAAADYTALLYGGREEASVEDAPRTRRVEVGTGGLTAWLRMGWGLDSLLGDSPEKNRSDHRHHAIDAVVIALSDSRAVQSLARAATEADRQFKRRAFESIDAPWASIRSDAEEKLRSLIVSHRQSRKVTGPLHDQSIYSRPFGEGKTQASRISKVLADLTVDQVTGGVYLGDAAIAKLVGLVERLGVVVPDDADLKSVILADGFEATTLDVLALRKLWPKLAKHRAKRTSDGTSKRKGGTPPTTAQNVQDFVAQGNARPSIVDTRSLKAIRQRLDELKVRNPSEKDISSVFSLPANAPLVKGHDGAMVRLRKVKVEANAGRRIGRADKATDRYVQPASNHHTVVVATLDAAGNDASWEDHPVQLIDAYARQAAKVPIVDRHVEEGQRFVFSLAPGEFVEMNTPDDATKRTIYRVASISKGDMELRLHTDARTSSELKESKSRVRVSGDKLRELQARKVTVTYLGEVKNAGG

SEQ ID NO: 15797 - protein, 1063 aa, unidentified
  REGION 1..1063: note = Cas Enzyme sequence
MGESKPRDRLLLGLDVGVNSVGWALFEMEEPTSGRILDAGVRVFEAGINLEKSAKGESRNLDRRVARGGRRVRARRARRKRAVRARLQRAGLLPPGEPPNGVDDGLIDGAWTDVMGMDPYALRARALEAPLSHFELGRVFYHLAQRRGFLSNRKAPLKEDEKPGEMAEEMQGLERQMKEMGARTLGEYLANVDPRLEPRRKRHTQRDWHREEFDRIWGAQSKHHPEILTDRLHAGLCSMRNSIFHQRPLKQPRHEYCELERRPGGKKKRVRAPLGLRVAQRARLLQDINHTRIVDAKGRESEMTGPQRAELLAALEREAKLTFPQARKLLKLPKGSTFNLERGEREAFIGDRTAAKLRREFKKKKRGAPPDDELGVEIFGERWDGLDDATKDRIIEDVLTIDSPAALERRGREVWGLSEDAAKAFARIELEGSRARHSAKALRKLVPHLEEGLSYAEAADLAYPERRKTGDALDRLPPFEDLRNPIVQRALTEVRRTVNALIARHGKPGKIRVELARDLTRNARQREEVWKGQRNRERERALAAQTLREAGVNQPHRRDIERVLLAVECDWRCPYTGEGFGPTDIIGKHPRFDVDHIIPFSRSLDDSFFNKTICLAEVNRDRKGNRTPHETFGGSEDWAVILGRVKKFKGDAATEKLRRFKLDSAPGQEGETASFLEDFASRQLNDTRYAARETATALKLLYGDEGNSRVEVTRGGVTAYLRSAWGLNDILGGPGEGKLRDDHRHHAVDAAVTAMTDRRWMQVLALAAKSGRNPGAFRDLALPWPGFHDEVRAAIERIVVSHRIDRNINGQLHKETHYGLVSEKPEAEKRPVARTILDRLTEADIRKKRIVDKAVREAVEIKLAELDSDLKKALKKLADPANHPFLIAKDGRRIPIHKARVWQEVTTVEIGRGPRRRNVKTGGNHHLEIFEVRGKKGRTQWEGRIVTTLEAMHRRRARQPIVRREDGDGNRLVFSLAIGEAVELTLNKTVGPPKRLRRPGERVIAVVRKLSQTQYMFKLHYDARMATEQDPQNFYASGAKSLRKMEPKKLILTILGEARPARD

SEQ ID NO: 15798 - protein, 1205 aa, unidentified
  REGION 1..1205: note = Cas Enzyme sequence
MDSVDLKDDLILGLDIGANSVGWAIVQHNGENPIGLIDAGVRVFEEGANYEDYLQGRPASRNADRRMARQRRRLLERTKLRMNRTLRILQEAGFLPEGQRPDGIPRTGRSPLAEVLAFHPEKNNPYKLRADALVKRLEPFQLGRVFYHLAQRRGFLSNRKAEARQKDDNKERGKVKGAIKSLRQELEAKGWTLGQYLSSLDPHERRIRGRHTSRKMYEDEFEGIWNAQSPHYPDKLTGDVKAKDEPKNFKKRLHKAIFFQRPLKSAKHLIGECELERGRPRAPMGLLLAQRVRLLQEVNHSRAWEPGMSKPRELKSDERELLLLALQSPDSLPQDAKDRLTTNAKGKAVPEVLNNLRARALLKFRDAARMFGWPEEWRFNLEAGGREEFKGDTTSARLRYALVAEDDDEEEAAEGEDRKRKNKKRRLVPIFGARWDEMLAKPSERRGQRTRTLADDVVEDVISIQKEWAQAARGKKWGLSEEQAELFGRVVLEDGYSRLSRQALEKLAPKLKEGLDFARAKAAAGYKEPDRRPVGKLPPGENLRNPIVQRAMAEVRRVVNAIVAKYGKPALVRIELFREAKKPALSRQIAWKINQQNRKDNEEAAEEITKRRSELGIDEPKARDKLKCRLLQECRGRCPYTDEPIGWTDLFRDGLFEIEHIIPFSRSLDDSYLNKTLCHVDANKRKGKLTPWEAYGGTDDWDRIIRNVENFQERHITVEYPSGIKKKMRIDAAAEKLRRFKLKNISDENAFGEELLSEFMEDFTEQKAATTAYASRMAATYVGRLYGNEWRRHVQTGSRGQATMFLRDQWDLNRILDDGGRKNRRDYRHHAIDAICVALTNPETVKMLCDAAARSKKPGRFDRESISSPWPTFLDDVRAMIDKIGSVDGDRCPRCVSHRVNRKTTGEIHKTTFYSKKIPKRGDDGRPVLGKNGDPERVFVVRTPLEKLTPPDIRKDFIVDPVVRAAVHRKLAEIVGVSIGALHPIGKQTIKTVDAQLKEALKGFRDVNNHPFLESKLLKEGEQPRQIPIHKVRVTQEVEPEEVGKAERLRRVKLGNNSHLEVFEVTAMRGRNKGKKAWKGVVVSLLETNHRKPIIRDKDNDGNPLVTSLRINEAVWLTLDKEVGPPNARRGKGERVLAVVRKLSDKEYVFKLHNDARKSPELDRDKFYAKGAESLRKMDPEKVIISPLGEIRPARTERFDDRSDH

SEQ ID NO: 15799 - protein, 1048 aa, unidentified
  REGION 1..1048: note = Cas Enzyme sequence
MIRETTSKPSTEPVVLGLDIGAKSIGWALVRGPETGKPEIVAAGVRVFEAGVDGDIESGQDSSRAAVRRMARQMRRQTHRRVQRKRQLFRLLQSVGLLPATPNTQSTTRDATIKAVDTLLLASLPETYGTEGDVAAKLPYVLRAEALKRALTPEELGRVFYHLGERRGFKSNRRTDRKAEDTGKVYDGIAEVRSKKGSQTLGEYFAAGDPKKARIRNHYLARADYEEECVKIFDSQQRHHDCLTPKFRRKLLRCLFWQRPLKSQKSLIGRCSLLTTRRRCSIADPIAQEFRLLQAVNHLNIIDPDGNMRVLTNAERAKLLDALRNQGDLTFTAVRKLLGLKKKESRFNLEEGGEKKLPGNRTHQAMTEAIGEDWEKLSDVEKSQLVGIVRGSTDEASLRGQIGAAFPNLLYACDTLDKVVLEDRPAAHCKKVLADLVERMRDGIPYATARADFEATHKLGGPTEPVDQLPSVRTFLPSLTNPAVIRALTELRKVVNELVRLYGKPNMVRIELARDLKKPRHIRQAISDRMRQREGERSVAVQNLKSKGVTNPSRADIEKVMLAEECGWVCPYTGKSFGMIDLIGSAPAVDVEHIFPRRYLDDSFINKTLCVATENRAVKKDRLPAEAYAGDAPRYQQILDRVRAFRSELRDEKLRRFMADKVDADFASRQLVDTAYASREAARYIGLLYGGIVDVRSDRRVRTSSGRLSGLLRSAWKLNTILGTAESPKGRGLDHRHHAVDAIVVALSTDSIVKAVTDSASKYAARSSGRWTLDIPEQDGLLEAATEAVKAIVVSHRVDRRLAGRLHEDSIYSPPRPDGNGNHYHVIRKALTKLTPADITSDKIVDPRVREIIQEQYRVLCERLGKTKPSDIFADEKNLPHLPNKSGAPIPIRKVRLRVRDSAARIGDADHRQRHIMRDADGLHHTAIFVRRKGDKEVWLEEPTSRLEVQDRKRRGSPVVRTISGLDTDFVLHLCKGDSVELDDATGDRTIYVVRGVAGTDIRVVPCWDASTDNRTPETRIRSPNKLRDRNPRVVVVTPAGRVFARGG

SEQ ID NO: 15800 - protein, 1111 aa, unidentified
  REGION 1..1111: note = Cas Enzyme sequence
MSEPLKFERPPQRPYILGLDIGANSIGWVCLAAEPCGPGWEPTGLLHKPSDMGRWPTMGVRIYPVGVAEFDTGDEEGPAVKRRRARMMRRQTQRRARRMRKTFRILQEAGLLPHYPQGTLERHGAPAGPEPTTRVESRRHRQARMVAEQAARDELLKIFDARRAKDWAQRLEKHQRSLAFDHLPYLLRTRALSEPLPLEDLGRAFYHLSQRRGFLSNRKDAASVKPGAKKPAKGSDDDIESLKGQMKALEAAIHENGHRTLGEHLLWKLTEKKEKVRQLKTYRFLYREEFDAIWEAQAHHHPNVLTDELRKRLNDAIFRQRKLRSQADKIGICSLEDGSYYRLEETGELVPTRAERRIPACSLLFQRFRALQRVNDVRAVVKKTGEIRDLWPEERKKLLQNLEGVKSLTAKEVSSVLAWGKEYAAQLNFDDETGAALDGCWTNQQLHEIFKDRWSQLTFDQRETIVTDLFDYEPDDWYEDDPDAPDRQERARDPHIARRALSQEGPWGLLKPTRSEAISLVHVKLSSDYASLSRAAIQRLIPHMESGMQYRHALDKCYKPKESEALDYLPPVNKVFRSVNNPIVTRSLTELRKVISHLIAYYGKPEQIRLELSRDIHQGKKGRDEARKGIKENLKRKENAVKEYAEQANLIGKSTNSFRAKDLEKLRLWVEQKHVCPYTSKTISGSAVLSAEYEVDHIIPFSISQDDSFSNKVLVCARANQEKGNRIPLTAFGSDRERWSKIEGWVESRRKKGDIAPHKLDRILMTEAQVQELLEQFKSRQLNDTRWASRWAQRYLMHLYGGNVVTGVDPKGRRRIQTSAGRVTADLRRELGLEGLLSDVIDPSVPRPAGRFNKRIDHRHHAVDAFAVAWFGPKAALAMAKAAEAAPGAYKRFYAQLQEPWTDFRDDIREALKACIPSHRVSNRARGALHKETVYSPTTIASGERKSNLSVGKGHRQRNVDHDGNHHVLFALQDSGDKAGPIIEVVTYWEACQRVLRARDGKDAKRHAVPYLRVHGTLMTLCIGDTVVFNKHNTTLICNVTQIWQNKTIALRPVSETRTPRSPPPDQDKIEKFLLTNIPFSGLLVSGTQLLQRGLRKLSVSPIGVKRPARA

SEQ ID NO: 15801 - protein, 1109 aa, unidentified
  REGION 1..1109: note = Cas Enzyme sequence
MVESTKFERPPQRPYILGLDIGVNSIGWVCLAAQPDGNAWEPTGLLHPPSEMHRWPTLGVRIFPVGVAEYDTGDESGPGLKRRRARLMRRQTQRRARRMRKTFLILQKAGLLPSYQEGALERHGAPAGPEPKPKAESRKYRRERIVAEQAARDELLKAFDATLSRACAARLPKDQHSAAYDHLPYLLRSKAVSEKLPLHEIGRAFYHLSQRRGFLSNRKDAATVRPGAKKPAKGTDDDPETIKGQMDALQNLMNEHGHRTLGIHLLWKLTEKREKVRELKTRRYMYRDEYEVIWETQQKHYPDILTDELKQRLYKAIFHQRRLKSQDDLIGICALEDGAYLRIEKGGELVPTKPQKRTPACTIRFQRFRALQRINDMRVVEKKTGEVRKLTDVERGQLLMEAENRKSLSSKEIPEVLKWGKQYVAQLNFDDETGSALSGCWSNQQLKEIFGERWDRLSLDEKDSIVLDLFEAEPDDWYEDDPDDHREGRKRTPHIARRALACEGPWGLIKPTKGEALQLVEFKASSDYAGLSKAALSRLMPLMESGMAYRTAVEKCYRAKLSEILDYLPPVNKVFKSVNNPIVTRSLTELRRVMSHLIKFYGRPEQIRLEVARDIQKGKAGREAAREGMKANLKRKKEAGTDYFQEIGRPGATLDGASKRDVEKVRLWYEQDHVCPYTSKSIPAGRVLTSEYEVDHIIPFSISQDDSFTNKVLVHNRANQEKGNRIPIAAFGEDQERWKSIEAWVAQRRKKHGKVSSRKLDRILITKDQTKELLDDFRSRQLNDTRWASLWARKYLMHLYGGNVVEGVDEKGRRRILTSAGSVTADLRREKGMDAMLKAVLDPSTPLPPGPFSKRFDHRHHIVDAFAVAWCGPQAQALMSRAAEAAPSEKRRLYGKIEDPWDGYQADIIEALSVCVPSHRVSNRARGALHKETVYSPTTVTSGERRSNLVVGSRHRQRNMDHDGNHHVLLAMQDGNDGLVQTVSVVTYWEAVRRLNEARQESKTGDVVYRRVPGTLMTLCIGDTLSCEREGRRQYCWVRQIWQAGQVQLCPVSETRTPDSPPKDKAKMEAFLKKKIPRSGLLISLNVLGRMNSRKHSVSPIGVVRPARA

SEQ ID NO: 15802 - protein, 980 aa, unidentified
  REGION 1..980: note = Cas Enzyme sequence
LDGSQQRHSILNRLDREISAKWSDADGNAAHVAIELPLYLLRKAALDGRLEPFEIGRIFYHLSQRRGYKSNRKEKAARQDTIGKAKKEDDLGQVEGDISELKKEMDRAGARTLGEYFASLDPHTQKVRRRWTGRKMYEYEFAKIWEKQSSYYPDLLTEELHRELMRLLFYQRPIRAQSHLIGGCELEPGERRAAWATLEAQEFRVLQKVNDLELVYPGQVTGVPLTAEHRQIVIDLLQNSAEATFKKIRKVLELPENVGFNLQRGGETRLKGNLTQSLMKAVFGERWAAMSEDERKQVVEDWRTIEAEESFIRRAIEHWKLDEAGAKWLAEHPAPSGHCMISRKAIRKVLLLLKQGYRFKEAENAIYGNRFSGGRVYERIPPVREALKTLRNPAIERSLTELRKVVNALIRDLGAKPEEVRIELARDLKKPRKERAEAAARNRARGKERDSAKAKLLRELGPGFENPSRADIEKALLHEECGGVCPYTGRLIEFASLFGQNPQFDVEHIIPFSRIPDDSFQNKTLCYHEENRHVKRNQTPFEAYKDLEQYEIILNRVRSWPKRNLGKLARFELKTTEQLEGFSSRQLNDTRYASKLACQLIGTLYGGRDVETESAMRQVVFASSGMVTATLRRGWGLEAILREPGSSANGLNKGKPRTDHRHHAIDAITIALSRPSLIAALSRANAQDPYWPNSGRTAPTLQVPWKDFVGSIRLHIEQLLVSHRPEHRLTGALHDETSYGRPRQENGKEVVHIRKPVPGLSASDIENIVDPKIREAVKEKAAQCGGDLKNWTSGEQPADWPQLRTRSGQVIPIKRARIRKPLQVESIAEEPRRRYVSLSSNHHVAVFALLDDRGRERRWESQIVSLLEAMDRQRRKQPIIQRSIPAIPEAVLKYSLMWGDILRLHKDCDHSKDICNPSFWRVRSIWEQGTLTLVRINDARLLNEIRAAKDWLLPSADALRKMDAAKVVIDSLGRVHSAGC

SEQ ID NO: 15803 - protein, 1162 aa, unidentified
  REGION 1..1162: note = Cas Enzyme sequence
MHLNRKAEVPKPTDLNYRIGLDIGIASVGWAVLENNTHDEPFRIIDLGVRIFDTAEQPKTGASLALPRREARSARRRLRRRGHRLERIKKLFEAEGLINIEEFEARYKKTGLPDVYKLRYEGLDRRLTNDELAQVLLHIAKHRGFKSTSKAADGADSDTGEVKKSISANKALMQEKRYRTVGEMIYLDEKFHTDCPWNENGYILTPRNKSGDYKHTVLRDMLADEVMEIFKAQRAMGNDAATEELEMAYLDIMLSQRSFDLGPGSPSRYAMEGFEDRVGLCTFEGKNGEKRAPKAAYTSEFFVALEKINHTKIVYADGNTRFFTDDERYAIIALMHRQQMVKYTAVRKTIGLAEEDKFYNLNYSPKSGNKKSPEDTDFVKMENYHKIRKALGEEVVSEHLSPDKIKLYDDIARILTLYKNDDSRIRRLAEHDVASECYDALLEMSPSKFHNLSLKAMGKIIPFLLEGNTYDKACELAGYDFRAENNGEKSVLLKGKNITNIVNDITNPVVRRSVSQTIKVINAIILEYGSPQAVNIELAREMSKDFDERRKIKSDMEAREKENDKVLSRVREYKSNPTGQDIVKFRLWEEQGGMCLYSGEKIDINDLFSSNGGYDVDHILPYSITFDDSYRNKVLVKALENRQKGNRTPYEYFMVGKDEPAWNEYEALVKNTIKDYKKQLKLLKKHISDEEKAEFKERNLTDTKYITRIVYNMIRQNLVLKPYLNLERNRKKQVMAVNGAITHYLSKRWGLAGKDRRTDTHHAQDAVVIACTTDGMINRISRYSKGRELAYSRGFEFVDEETGEILNSDNFSRKDWDEKFGVRLPMPWEHFADELDIRMSRYSTMGEGVSSGTSPREFILSHRDVFNWINYPEWMFVEGRPGRRGVLDGIFVSRMPNHKVSGQAHEETIRSAKYYEDGGCGVEKGYVVYKTAITNLKLDKNGEISNYFNPESDSLLYNALVKRLKDYENDPKKAFEKAFYKPKSDGTNGPIVKKVKVFEKKTIGVLLEKVKGFANNDSMIRVDIYCVNGKYYFVPVYASDVVRDRLPNKCAAKNKNSSDWEIVDDKYFLFSLYKNDLLYIKKDKLPLKSIDECKYPIPNSSKGVYMYFGGADVSGLAFSCEAHDKSFSFRSSVVTVDKLCKCQVDVLGNVSFVKNEKRMTFN

SEQ ID NO: 15804 - protein, 1074 aa, unidentified
  REGION 1..1074: note = Cas Enzyme sequence
MKHPYGIGLDIGIASVGWAVVALNENAEPYGLVRCGSRIFDKAEQPKTGDSLAAPRREARSARRRLRRRSLRKADLYELMEKNGLPGKAEIEQAVQAGHLPDVYALRVQALDGPVTALDFARILLHLMQRRGFRSNRKADDAQKDGKLLQAIDANTRRMEANRYRTVGEMMYRDPVFAEHKRNKAENYLSTVKRDQIIDEARLVFAAQRQYGATWASPEMEAEYLCILTRQRSFAEGPGKGSPYSGSNRVGTCTLEGKSEQRAAKAAFSFEYFTLLQKINHIRIAENGTSRTLTPAERQVLLSVCSQTDKLDFARVRKALALPEEARFNMVRYRGEQTAEACEKKEKITALPCYHKMRKALNTLRKDHIRNISREQLDAAGAALTNPENEDKLREALKQAEFEPLEIEALLTLPSFAGYGHISVKACRKLIPYLEQGMNYNDACQAAGYDFQGRQNGEKAQFLPASTEEMEDITSPVVRRAVAQTIKVINAIIREQGESPVSIHLELAREMNKNFQQRSELDKAMRDNSAENERLMKELNELFPGRTVTGQDLVKYRLWKEQDGRCAYSIQPLELDKVITVSGYAEVDHIVPYSISFDDRRTNKVLVLASENRQKGNRLPLQYLQGKRRDDFIVYTKANVKNFRKRQNLLKERLSEEDGKGYIQRNLQDTQYIAAFMLNYIRNHLAFADYSRAGKRRVVAVNGAVTAFLRKRWGLGKVRADGDLHHAVDAAVIACTTQGMIKRVSDFCKRAETTAVRNEHFPEPWPRFRDELTQRLSACPQEHLMQINPVYYATVDISSIQPVFVSRMPRHKVTGAAHKETIKSRLDDTHVVQRRNITELKLDKDGEIAGYFNRSSDTLLYNALKARLLAFGGDGKKAFAEPFYKPRADGTPGARVQKVKICDKVTSTVPVHGGKGVADNDTMVRIDVYYVPGDGYYWIPVYVADTVKPELPSKAVVAYKSSAEWKEMKDEDFLFSLCQHDLVRIESKRLMKFKVQNRDSTLEKEMPVNKILAYFEGGNISTGAITVTTHDDAYIADGLGFKTLQKVQKYQVDVLGNYTPVKKEKRQTFPAQRR

SEQ ID NO: 15805 - protein, 1020 aa, unidentified
  REGION 1..1020: note = Cas Enzyme sequence
MMPSKMRYRLGVDLGTTSIGWCLIRLNTKNQPIAIIRMGVRIFSDGRNPKDGTSLAVTRRLARQMRRRRDRLLRRKSRIMDALIKLSFFPKNATQRHELLLLDPYALRKRGLDQPLTGPEFARALFHINQRRGFRSNRKTDKKDSESGALKKAIKILDEKLKKENCRTLGEWLANRHEKGKSVRARLRGKKKKDKTYDFYADRTMIEHEFDTLWDRQSGFNPELFTNAAREKLKDILLYQRPLKPVKPGRCTLLPDEERAPLALPSVQLFRIYQELNSLRLLNSDLTEKPPLTKPQRDLLAKVLTQGNNLTFKAGIKKRLKLEGTIKFNLSDGKRDKLKGSATSTILAKPECFGERWFEFNLVMQDTIVEHLLNEPSEAEAIKWLRDNTGVDEFTAKHLSDISLPEGYGSLSRAALARILPELINDVVVYSEAVTRAGFASHSVLSHAKQTGEIMEALPYYGIPLTRHVAFPKDNPRNDEERYGKIANPTVHIGLNELRKVVNALIRRYGHPSEVIIEVARDLKWGQKRKQEIQREQKVRQDLNEKHVAEACRILGLTPANLNRAKRRELSQKMQLWVELNPKDVANRRCPYTGEQISIERLLSNEIEIEHILPYSMTLDDSMNNKTVSLRRANRDKGNRTPYEAFNDHPGYDYGDILERATLMYRAKTRRFAPDAYQNWLRNDQDFLARALNDTAYLSRISQEYLSLICPGQVRAIPGRMTALLRGKFGLNKLLSNTPYKNRTDHRHHALDAAVIAITDQGMLQRFAKASASTREKQLGRLVEEMPLPWATYREHVERALNNIIVSHRPDHSYQGAMHEASAWGFRDNGMTTRRKLSESDESHQREIKKQKLIPITSTHCAQRHGLDEQDNPKPYKGYVGGNNYCIEIWRDEVGKWKGDVISTFQAYQVIRQNGEVEGIKKLRHPKLTQSGKPLAMRLMINDIVCIKIDSENRIMRVVKISSAGQMFFAAHNEANVDARNRDKENPFTYISKYPGSLKSIQGRHVTISVIGELHDPGFR

SEQ ID NO: 15806 - protein, 1033 aa, unidentified
  REGION 1..1033: note = Cas Enzyme sequence
MRYRLALDLGSTSLGWAMVRLDKENQPCAVIKAGARIFSDGRNPKDGSSLAVTRRAARAMRRRRDRLLKRKQRMMDALIKHGFFPATAAERKALETLNPYALRAKGLDKALTPAEFARALFHINQRRGFKSNRKTDKKENDSGALKTAIQKLRESLQGENCRTVGEWLNKRDNSGQTVRARYRQEKHIKEDGKSKIDKYYDLYIDRAMIEHEFDELWSKQAELDPARFNETARAELKDILLHQRPLKPVKPGRCTFLPEEERAPLALPSTQRFRMYQEVNNLRILRDGLKEEPLTLEQRDTLIFALEENNKCSFTRIKKLLGLSGAVQFNFEDPKRQELKGNTTSAILGKKDLFGPDWFKFDETKQDAIVMKLLTEESEETLVRWLQNETGVDEKTAEAIANAGLPEGYGSLSAQALARILPELRRDVVTYDKAVKAAGFEHHSKLGSDTEIPSITFKTERIDLDTGEIKAFHIHDKLPYYGEYLQRHVGFGSGKPEDTPEKRYGKITNPTVHIGLNQVRLVVNALIQRYGHPSEVIVEVARELKQNHEQRKEESKRQAENQDRNKRLRSNIAGILKISEEQVSRDDIEKMILWEELSHDVADRKCPYSGVPISASMLLSSEVEIEHILPFSQTLDDSLNNKTVSMRQANRIKGNRTPWEAKQDFEAQGWKFDDILARAGNMKKEKRYRFAEDGYKRWLKDDAGFLPRALNDTRHLSKVAREYLTLICPQATRVIPGRMTAMLRGKFGLNDVLGLNGEKNRNDHRHHAVDACVIAVTDQGLLQRFAKASASAREKQLNRLVESMPLPWENYREHVQRAVGNILVSHKPDHSHEGAMHNDTAYGLRDGGKVSFHKMVDGKRERTEESLKVIKISDAKAIERHGVLPTGEPKPYKGYKGDSNYCIEIVRNEKGKWEGEVISTFDAYQLVRQHGIERLRHPSLSVSGKPLAMRLMKNDCVKLQLDNEIITSRVCWVRTDTRIAFAPVSEANVDARDRDKGDQFSYIIKTASVLQKLCARQITITPIGELHDPGFKV

SEQ ID NO: 15807 - protein, 1012 aa, unidentified
  REGION 1..1012: note = Cas Enzyme sequence
MRYRIALDLGSTSLGWAMVRLDAQNETCAVIKAGVRIFSDGRNPKDGSSLAVSRREARAMRRRRDRLVKRKNRMLQTLLRHGFFPQDESARKALVTKDPFALRAKGLDDALLPEEFARALFHINQRRGFKSNRKTDKKENDSGALKTAINQLRQAMQATGCRTVGEWLHARHQQGLSVRARYRENRITKDDGKTKIEKSYDLYIDRAMIEAEFDALWAKQSELNPALFSDTARDELKDCLLHQRPLKPVKPGRCTLLPDEERAPLALPSQQRFRIYQEVNNLRLLREGLNEEPLTLTQRDQLVNALETNNKRSFTQIQKLIGFSGQFNLQDEKRTELKGNNTSAMLSKKEFFGSDWLRFVEARQDAIVMQLVTEENESRLIAWLQADTGVDEITAERIANVPLPEGYGSLSAKALEKILPALRNEVITYDKAVLLAGFDHHSHISHAATGEILSELPYYGQYLQRHVGFGTGKPEDLAEKRFGKIANPTVHIGLNQVRTVVNALIKRYGHPSEVIVELARDLKQSQEQRKDEQKRQADNQRRNERMRDDIARLLNTSPERVRSADLQKMVLWEELSFNVADRRCPYSGVQISAQMLFSDQVEIEHILPFSQTLDDSLNNKTVAMRQANRIKGNRTPAQAAVDFEAQGWNPEDMLSRASLMPKGKRYRFAQDGIEQWLREDKGFLARALNDTRHLSRVAREYLSLVCPQGTRVIPGRMTALLRAKFGLNDILGLNGEKNRNDHRHHAVDACVIAVTDQSMLNRFARASASAREKQLNKLVETMPLPWDNYRDHVQRAIDNIWVSHKPDHGHEGAMHNDTAYGLLGAGRVHVRKTVEGVRTREIAALKVIEFADSHGHPRHGVLPNGQPKPYKGYKGDSNYCMEIVRNEKGNWEGEVVSTFEAYQLVRQHGLARLRHPALSVSGRPLVMRLMIGDMLVLNVADNTKMLARIAKISGNGQIFMAAHSEANVDARNREKADLFGYVSKMAGSLQKAKGRNVTISSIGELRDPGFSD

SEQ ID NO: 15808 - protein, 1058 aa, unidentified
  REGION 1..1058: note = Cas Enzyme sequence
MCGFSFGASFSLLAFRAHISIKYMFNYIIKFSKSTQIFQEAAMTKMRYRLALDLGSTSLGWAMVRLNESNEPNAVIKAGVRIFSDGRNPKDGSSLAVTRREARAMRRRRDRLLKRKARMMNYLTRYGFFPSNEDDRKKLEILDPYELRSRGLTKALTPGEFARALFHINQRRGFKSNRKTDKKENDSSALKNAIKGLKLAIQTDGCQTVGEWLYKRHTSGQTVRARYRQTPIKQENGKIKINKSYDLYIDRGMIEAEFDALWHVQSNYNPALFSELVRADLKDCLLHQRPLKPVRPGRCTLMPDEERAPLALPSVQQFRIYQEVNNLRILGEGLSEGPLTLDQRNNLVEALEANSKRKFTQIKRLLDLSGTVQFNFEDPKRQELKGNTTNAILSKTDHFGLEWFNFTLDRQDEIVEKLIDEENETRLIAWLQNEFNLPEDRAEKIANTSLPEGYGSLGVKALKRILPELKKSVITFDKAVISAGFEHHSNISHASTGEILPSLPYYGEYLQRHVGFGTGVPEDHPEKRFGKIANPTVHIGLNQIRVVVNSLLKRYGHPSEVIVELARDLKQSQLQRKEDNLRQAENQRRNERFKIDIASALNISTERVRSADIQKMIMWEELSHDIADRRCPYSGVQISVHMLLSDQVEIEHILPFSQTLDDGINNKTVAMRQANRVKGNRTPWEAKDDFLRQGWKYEEILSRAEKMPKNKRYRFGDDGYQHWLREDKTFLARALNDTRHLSRVAREYMSLICPQATRVIPGQMTAMLRSKFGLNDILGLKGEKNRNDHRHHAVDACVIAVTDQGMLQKFSRASASAREQNLTRLVENMPLPWETYREHVARAIAAIYVSHKPDHGHEGAMHNDTAYGLLGDGIVRTHKVVDGIRTREDSNLKVIEISSTKAMNRHGTLPDGFPRPYKGYKGDSNYCIEIFKTDDGKWVSEVISTFQAYQVVRHEGIERLKHSKLSLNGKVLIMRLMIGDTLRFDVDSQTKTMKIAKISGSGQMFFSPLSEANVDARNRDKTDAFKYISKMAGSLKSANARQITISPIGEVRDKGFAG

SEQ ID NO: 15809 - protein, 1356 aa, unidentified
  REGION 1..1356: note = Cas Enzyme sequence
MQEPYGVGLDIGTNSVGWTVVDGSGKLRRVKGKVAIGARLFKEGEAAADRRSFRTTRRRLKRRKWRLRLLREIFDEPISKIDPNFFARRKYADISPRDPNYDGLVKTLFNDRTDKAFYEAYPTIYHLRNALMTEQRQFDIREIYMAIHHIVKYRGNFLRSGQARQYRTVPLKLGADFQQISELWAQIDPELGLTLVTDDEQIGLIKRILLRTDLSRSDRQKKIVPLLAVLSNDKNLKKQQKAVVTEFAKALVGTKVKTNVITLVEIDSAVKSDWSFTMDMFQESLPTIEGELDNPRTELLEKTAELYAAINLAQLIPEGLTFSQSMMEKYTRHAKHLEWLKNYVDMQVDNQRGRDIRATYDHYIDGLKGRPVSRADFYRALRKFTDADAATNELAAKINTQIELEKFMPKLRTKQNGTIPYQVQQNELDLIIANQAKYYPWLAEKNPVKKRQGAFPYKLDELVGFRVPYYVGPMVTTEDQEKGSEANFAWMVRKAKGDITPWNFDDKVDRVESATQFIQRMQMTDTYLVGEDVLPQQSLIYQRFMVLNELNKIRLDGQPIGVKQKQRVFEQVFKKKKTVSIKDVQRNVVAAGEFEIEPEITGLADPHKFNSSFSTYIDLSKIMPTELDDESKQSDIEKIIMWSTIFEDAAIFKVKLESISWLTEKQRHQLSHIRYRGWGKLSKRLLTEFKDQNGRSILDALWATNKNFMGLQSQPDFAAQIQAANTQDVDGQSFQNSINEMYTSPQNKKALRQVMLVLADIQTAMQGQAPSHIFIEAARGGGKKGVRTLTRAEQVSELYKGAAREIISDEVKQEFETKNKNQVDFTDKLMLYFMQNGQDIYTGKPISIDDLPGNKYQIDHIVPQSYVKDDSLDNRVLTACNQLKGERFAADVFQNETGIWHQWQKRGLITNRKLQHLLMKAETFDKYATGFVNRQLVETRQVIKLVTSLLNLEYPNTSIVSVKADLTHQFRKVLNFPKLREVNNKHHAFDAYLVAFIGTFLLKKYPKMENFFVYGKFAKQPLDSNKFNVIRMLEKAQKPITADDTGEILWDRTTDLPRITKIYNFKRILITREVYENRAALFNQTIYKAKDAQKQTLIPKKQNFDTNIYGGYSSRKLAYLAIVKVPTKTSFEYRVVGVPTLMVTRIQQLKQKMSEVDALTKLLVPMFTKVNKRTGKAVVSDYQVILPQVRFEQVVRDSIKGYTHRFALGTDTYYHNLQELYLPLEVQRLFKNDDSDAALDEVFDATMDQMTRYFTLYDINQFRTKLLDSDERFKALKPLNTIVDHKVVLGKQSVLRAIFVGLHANATMSDLKALGIKTPFGKLQVPGGLKLSRQAQIVYQSPTGLFERVVGIKTLE

SEQ ID NO: 15810 - protein, 921 aa, unidentified
  REGION 1..921: note = Cas Enzyme sequence
AKYYPWLAEKNPVKKRQGAFPYKLDELVGFRVPYYVGPMVTTEGQKKGSEANFAWMVRKAKGDITPWNFDDKVDRVESATQFIQRMQMTDTYLVGEDVLPQQSLIYQRFMVLNELNKIRLDGQPIGVKQKQRVFEQVFKKKKTVSIKDVQRNVVAAGEFEIEPEITGLADPHKFNSSFSTYIDLSKIMPTELDDESKQSDIEKIIMWSTIFEDAAIFKVKLESISWLTEKQRHQLSHIRYRGWGKLSKRLLTEFKDQNGRSILDALWATNKNFMGLQSQPDFAAQIQAANTQDVDGQSFQNSINEMYTSPQNKKALRQVMLVLADIQTAMQGQAPSHIFIEAARGGGKKGVRTLTRAEQVSELYKGAAREIISDEVKQEFETKNKNQVDFTDKLMLYFMQNGQDIYTGKPISIDDLPGNKYQIDHIVPQSYVKDDSLDNRVLTACNQLKGERFAADVFQNETGIWHQWQKRGLITNRKLQHLLMKAETFDKYATGFVNRQLVETRQVIKLVTSLLNLEYPNTSIVSVKADLTHQFRKVLNFPKLREVNNKHHAFDAYLVAFIGTFLLKKYPKMENFFVYGKFAKQPLDSNKFNVIRMLEKAQKPITADDTGEILWDRTTDLPRITKIYNFKRILITREVYENRAALFNQTIYKAKDAQKQTLIPKKQNFDTNIYGGYSSRKLAYLAIVKVPTKTSFEYRVVGVPTLMVTRIQQLKQKMSEVDALTKLLVPMFTKVNKRTGKAVVSDYQVILPQVRFEQVVRDSIKGYTHRFALGTDTYYHNLQELYLPLEVQRLFKNDDSDAVLDEVFDATMDQMTRYFTLYDINQFRTKLLDSDERFKALKPLNTIVDHKVVLGKQSVLRAIFVGLHANATMSDLKALGIKTPFGKLQVPGGLKLSRQAQIVYQSPTGLFERVVGIKTLE

SEQ ID NO: 15811 - protein, 1266 aa, unidentified
  REGION 1..1266: note = Cas Enzyme sequence
MTICLGLDIGSNSVGSAWVDTERQEVHLAASVFPAGVDEQENKRGAPKNQARRQTRSQRRTIHRRAQRKRQLVRFLMDHDLLPREPTELQELFDLDPWQLRRKALKEPLTPHEFGRVLVHLAQRRGAVGVVTDPENPDEGKVKDAMDRLNKLLKDRGAETVGQLLADLIDERRQPIKRLPDDACSRRTRQRRAKRHGREPNDPQVLPVRNRQYRLPETEMLFASRALIREEFQRIVEKQRGFADSALAGMLTDDLIKALDDPSQSDAWRHRGLLFGQRRTYWDTGTLGRCVLEPTERCVPQADRHASYFRVLETVNNLRIEPPTGPERPLTADEREKVIRLLRGPLGQSKQKGKLVPKTSASVADLKKALGINPRDRSLRLNIEADEQREINTDWFHREIVHGAFGEERWNQMSEQQRESVNRAILKFDPDHEDDTKRLRDGAQRWWGLGEAAADRLIEAWKGRPKLEKRLNLSRRAILNLLPYMERFDADNNRWPTQQEARKAHAQELWQQFRQTGDCAYELAARRYATGALGLTAADRYYMRQEKHQLKDENGEVIRDENGHPLPEPPPAPMLSNPVVRKTIHEVRRHLVAWLRKFRRKPDRVVIEFARGVQDTAKRRNEQLAANREREQERRQIEENLRAWSIPQSNWARATLRVRLCREQAGVCPFSLSGPNSNRTITERMAAEGREVEIEHIIPEALTGRTMAFNNLVLCYREANRGKGMRTPLDWLGAEGVKAMLQRLEKAPIKDNRVKWERLQAPTPDEEAFRNSQLTDTAYAARQVASYIADALYDGQGLPERGGVRRIFTTKGEYTSRLRADWGLHESTIDRAHGLEEPPAPDQLAADPDLEQASRRARKEPKDRSDHRHHALDALVTALLGPELLTVVARQAREDREYYERTGYRPRRKPLPHPAAWPSPESFRDAVVTAFDRLVVANRPVKRRLVGAFHEETHYGPVIDPLPPHRTEDASALFTNRISVDRLTPNHLRVPEGWDELSARLEDPSLPAQAKRAIRKQLAALQDPSPAKSGIVRDRALRDRIRKCLRANALNPDDFTPAEIKKLLDDGKLTMPSGVPIKSVILLRTITDPVIIPRKHWDPGAGTLVPHMDPSDPSKPHARTKRVYIGGNNHHIEIRESLKTGKWSGEVIPTFEAARRVRIEKRPAVDRADREGQLFVMSLAEGEMIYARRKDRPDEAPNYFVVCKLDKLGNSCRIHFAPHWDARKASEQDRWAVTPADLKECGPEPGQPPYKVRVGPLGDVQRLDRD

SEQ ID NO: 15812 - protein, 1058 aa, unidentified
  REGION 1..1058: note = Cas Enzyme sequence
MTNISTNPYSLGLDLGSNSIGWALIKLDENENPCGIEKVGVRVFKAGMKGLIEQGKEKSRCKNRREARLSRRQIERRSRRYKKLAGLLQKIGLLPEGDIRNSAERQRIFEDLDNELRKIYIDKNLPEKEKHLINQKFIYYLRSLAVEQELEPYALGRVLYHLGQRRGYLSNRKGQKEDDSEKGKVVKGIAEIRQEMIRLGAETLGRYFAKIDPTKQRIRGRWTARDMYEHEFYAIWNFQSKFYPDIFNKENKRRVFESIFFQRPLKSQKDKIGYCIFENVARGAIRNRRRAPWFILKAQYFRILQNVNNLTVRTNRKDVRSLTQDERRMLIDYLNQHREVTFNNVRKLLNLSDEYKFNFEKNKKGEAKLIGNRTAGSICKIIGDKWDQMTPELKDKLVHDIYSIVDNRHLKKRLIKYWKFTEEEAEKLSNMPIEDGYCNLSRQAIDKLIPGLEEGKSFSTVAKEIYGVNKNTCGDVDLLPPLNEAPISIYNPVVKRVVSEMRKIVNELVKLYGKPRFIRIETARELKKNKKERQAIYESNEKRHNEREKIKEQLRSQGLSNPSEKDVDKYLLAEECGWVCPYTGKAISFRLLFFEPEFDVEHIIPYSRCLDNSMRNKTLCHVAENRSFKNNLTPYEAYGSMEEKYNEILSRVEKFNSQDKDEKLRRFKMNNEELEEFLDNFTSSQLNDTRYAARVAVDYCSLLYGDDWRKHIFTVSGGITHALRTMWKLNNILGNSEKNRIDNRQHAIDAIVIAMVSPRMVRSISEQSSKISVEEKRNKHWWNYIEPPWETLYNEAFDKVTNIIVSRRIDNKVSGRLHEDTLYSFPEKRGENEYVSRVRKPLSSITSNEVDNIVDPVVKELVIKKIEELGGEPNKIFKDPKNLPMLPNKNGDPVPIKKVRIFKKDRFLTIGQNERRRCVTVDENHHMEIFEIKDKKGKIKWDANVVTMFEAYRRRKCGEPIISKILVRDGEVVEDAKFLFSLQKGDIVYMKDSNGKYDYFYVTTICETSEGYKGLELVTHFVSKKDKDYPNISKSVNKLFKEDAKKCVVDVLGCCTLR

SEQ ID NO: 15813 - protein, 1122 aa, unidentified
  REGION 1..1122: note = Cas Enzyme sequence
NPSSDQPPFQRKKLKRGLTQEQIDSLGPLTFGFDIGIASVGWAVLSETRIVDLGVRCFDAAEDPKTGESLGERWRTQKVARRRLHRRVDRLKALRRLFVQEGLLAKPDATLLAAPPTETRQVNLQTPWALRSRGLDERLEPIDWARVLYHLVKRRGFLSTRKAERVERSATTANAKEKQGLLAGVAATARMLQVDGERRYRTLGELAFKSEAFYMAKRNKAGAYSRSFDRNLLLDEIKTLFDAQRKLGNTHTSDGFHGQVCQLLMYQRPAVTGEAMLKLMARCTLEPSEYRAPRNSYSAERFIWLGKLANLRIVQNGERRELTPGERALAVAMPYENKSGKITYKQLRNHLGLGTSPQIGFAGLSYGSKRNKKGEAVDPEEATLIQLRGWPALREALLDANLKESWEKLSVNPAQMDRAAYALSVYQTDDELRPALSALDFSPTEVEALLTIDFKGFIALSSKALERILPHMELGLRYDEACDRAGYNHAQPQAASRSHGRLPKFSYEDIRNPVVFRALNQARNVLNALIDVYGSPARVHVELARSLSKSFEERRDIQRDQETYKKSREEAEKMFREHFAGRSPNPRNQDLLKYRLYREQDGKCAYSLAAIDLERIVEPGYCEVDHALPYSRSFDDSMSNKVLVLTKENRDKGNRTPYEYLGGANDSAAWRAFEACVVGNKQYRKAKRDRLLRRNFDDMSAEGFRNRNLNDTGWVVRLFANRVRENLRFAPGRDGQVAEQPVLTPSGGFTSFLRTRWGLHKDRESSDLHHAKDACVIAAATPALIKRVSDYNRKRETLEILPGGAIVDVTTGEIKKDAKAHFPEPWSHFRDEVLARLSNDPSKAVSLVSSAYGADVLAHMQPVLVSRAVKRRAGGAVHQDTVRSVKPHLGPQTSSKRTRLTDLNIAKLDQIVGAQDLRNAGLMHVLRSRLEAFGGDGKKAFSPSQPPVHKPRRDGTDGPVIRTVQLKDVQKGGVPVRGGVADQASMWRVDVFEKSGKFYLVPIYQSDRIRGNPLPNKAATANTDRERWTTIDETFRYCFSLQANDFIHLITKKASTQGYFSGLNVHTAAINVTVHDRAAAVAKAGVFEGLGVKTGVASFEKYLVDTLGQRFSCRSEIRRDLA

SEQ ID NO: 15814 - protein, 1049 aa, unidentified
  REGION 1..1049: note = Cas Enzyme sequence
MQYILGLDIGITSVGWCVLESNENLEPKRIEDLGVRLFNRAENPKTGASLALPRRMARGSRRLLKRKRTRMKQIKNLLINMGLISLEKLHSCFSNYHEPFDSPWLLRAKALDEIVSEQDFARILIHIAKRRGFKSPRKTMREDEESGKVKSAIQENRKLLEAGSYRTVGEMFYKDPKFENHKRNKGSYEFCVARSMLVEEVKEIFKHQASFGNKFASQSLLDQYLGIFTRVCEPQDEYDAVGNCTFEKNEKRAPMMCYSTELFMLYQKINNLTLLENYKPLKLNNEQRAAIIDMAFHQKDIKFSQIRKKLGLDETIIFKGLSGSKKDVQTAEKKKFVELKFWHMMKKHFENNHPELWLELCNDIDKLDVIGQGLTYFKKKESIRNFFKKNEFTDSMIEACMELDFNGVASLSLKAIKRLLPFLSHGMVYSEACAAAGYNHSIPLDGQNFRKYLPQIADDITNPVVKRALIQSRKVVNAIVKKYGSPLRINIELARELGKNFSDRKEIQKKQEESQKTKEKTVESLKENFGIIARGSDVLKQRLYEEQNSKCVYCRTPFDLHRVITEPGYVEIDHAIPFSRSFDNSYNNKVLACQKCNQEKKDRTPFEFLGHNQLIWEEFEAWVKAIYFGKLYRKGVRLLTEEFGPDQESEFKERNLVDTRYITSYFASFLRNNLTFKESSKKKKVLSVNGAITAMLRGCWGLAKSRDNHLHHALDAAVVSTTTDSLIKRITDHFKRKETWSFNNHEAIKERLPIPYECFRDELLARLSDDPVNTLKSLDLYNYEGLNLESIKPVFISRKPEKKETGAAHQETIRSKKKVATKGVSTIRKPVDENLTADMIERIVDKEGGSKWIYEQLKAKLAAAEGKSKVAFKPPVIIKKAGEDHLIRRIKIEETCKSGIEVNNGIANNGDIIRIDVFTERKPKKKGKYYVIPIYASDAIKDQLPNRAIVANKEEADWTLMDENFLFKFSLYPNELFYLKSKNYDGFGYYTGVDRATSAISFSEATPEGKTLRVSPKSADVFEKWSVDVLGNYCKAINQKRKKTERNTK

SEQ ID NO: 15815 - protein, 1091 aa, unidentified
  REGION 1..1091: note = Cas Enzyme sequence
MRYVLGLDIGITSVGWALLNLDRRRIEALGTRAFNEAGYSQTKAPVAELRRLARSVRRRLRRRAGRLRRARELFLKYNLLTEDRLDKAFVTAKSKVDPWQLRAEGLDRLLTGEEFARALFHIAKRRGFKSNRKVDRKSQEEGKMLEGIQQNRSILEEKGYRTVGEMFFKDEKFAQRKRNSYGVYLNTVERAMLEDEIKKLFQAQRDLGSKFASTEFEREFLDVFKWQLPFASGDAILEKVGLCTFLGHEGKKRAPKACWTAERFNLLCKINSLTWFEDGEQKRPDDEQRKLLLEMAYNQKKVTFKQIRNKLGLPESARFTGVTYASRKAGNIEEKLESEGKKDFCQLNGYHTLKEELQIKGLWDKVKDNTDLLDELAYACTFYKTPEDVKQYLNERNVDSDVADVVAEMPGFSKVMHLSVEAMKRIIPHLEKGLVYSEACQAAGFNHSNPYPDAKRGLKLPPIDKDEIVNPVVLRALSQARKVVNAVTRQWGPPVRVHIELGREIGKSAEERNRINNRIEENRKAREEEKEHFKEIFNGVEPNGEMLLKFRLYREQNGQCAYSQKEINLHRLLEPGYVEIDHILPYSRSYDDSLSNKVLVLCSENREKTDHTPFEWFGQDDKRWANFESWVNANIRDPRKRANLLRRKFDERDSNEWMNRNLNDTQYAARYFGSFIRRHLQFAEPDKEKSPVMCFSGHITALARGLWGLQKNRDEDDDLHHAQDAAVIAALTPGRIKTLTEYRKAQETGRVQEIVDFETGEVHEVVRGKRFKFPEPWKGFREEVEARLSDDPEGEIAKLNLPSYSEDPPQLRPVIVSRMPIRKLDGAIHAETIRSKRELDGKPVSVIRKRLVDLKPSDLDNLWDPENNQKLYDAIRERMEQHGGDAKRAFAEELRKPTNSGKRGPVVRSVRLMEAQPSGIEIRGGIADNGRMVRTDVFRKKGKYYLVPVYVSHIKSGELPNKAIAAHKPESEWETIDSSFEFLFSLYPYDLVRMKVKGKEILGYYRGTHRRTGSIKLTPPNINDENKSKSYGARTAELVEKYFIDVLGNYYRVKREKRLGLAKHSRVESCSAEDRCRSAGDISGSRSDSSS

SEQ ID NO: 15816 - protein, 1434 aa, unidentified
  REGION 1..1434: note = Cas Enzyme sequence
LNEIDKYNHKKMDDIVLGLDPGSNSLGTVVRDMSNDKLSDQIVYYSVDTFESTVIKGVSLAAQRSADSRQRRQHRVRRDRLWATLNVLIKYHLCPLKQEELDAWRIYDKRRGYFRKYPIESKEFAQWITLDFNGDGIPDYSTPFELRHLLVTEKLDFNLRHNRYLLGRAIYHIAQHRGFKSSRLGIGKSSDDVEEQEGDEEDIITQLERSETKKKGKLQAYMDNHIPIIKTVGSAFHLLLTEGENDGTGSPIRVRASEYEAVRSQLYEEIETIFDFQDCLHEETECLDRLLSDKKEYGSIFYINPPRINRKSIGTCILEPDKKRCLESHPEFEKFRAWSFVNTIRIRNSDGVMEPLPFMLREEIFRELFMGRVSDFHFKLIRKLIQKRLGIEKLVFSSEPNKRTINYPDDNLIPACKVTKRLIDLFGDNWETGGKAIEGKRRRGHGKNHPPRQIVYRPMDVWHQCLSIDTLEQLESYARQKLGWTDDDKIDKLKKLWSSISKNRCTLSHKALYNINYFLQQGLGYSDAVFFAKIPDIVGAEAWNSKKNDVFDYIKNGYQSLKDEIKSQSMIVAITNRLIADFKTQTEENQDSDKKRGYDTTLTSDYCEKVIDPFIQRHFGEVTWKSFTSVYRQAIKDSVYKEYTLFLQDPKRDFRKLPKLGEELAKIMVSNYFTDKSLADDFGKLYHPSQISRFRPVEVTGKGMRLGSPSLGNIRNPVYLRAMHILRRKVNALLDAGIIHLEDTRVVLEVPHEINDANMRRAYSLYQSRQEKEKQCILAALGKDQKYTNEEIEKVILLVHSNKNYIGEDTPIEDKSDSKSRNERRYKEWIKEGGICYYTGNPIKLEDLRLGERNSNSKVDVEHTIPRSLLPDNTRKNQTLCFSYYNRFDKGNILPALLPEFEAEISPRLQPIREKVERIKKEISFCQSKARGSSEKNWKDYWIVKRHVWEMELEYWQGKLTRFTAKDVPDDFRRSQLTDTALIAKYAALYLRSIFHRVDVQKGAVTALFRKLYSFQEKDRTSHCHHAIDAAVLSLIPPSAQRDRIIKLYYEREEAEQASEKRRITQEINKEIISARLGLSLTGLQKSVKYIERKIRESVLVNWNTTDRRLKPNKRGDSIRLDLHEKTLHGIVKTVKKETDKKDGTVNVTRIPRPVIRVTLSKLTTTDDIVSFLNNIVDGKLRNYLKAVYDRRKKEGVPLKDILKNIEYGSSKNGKHHPLRHVRCYKDSNLSYERLIPAHHHIFQRDNAPEYKKTTFVKSRENSLLLIYEHVNDKGVSSWIGRYITGFELSKVANIFRKHHIGIISTINDIPEEIGWHSYIDKTTPIEYRLKYVLKPGIRILISEKKQNWKKMSAVKLLKQLRIIVKFNEADGIWLCHHTQVKEYSVEQENGKMKTKRQMSKRKIGNIMSEDLLIEHVHFEINLNTSTDRLFTWL

SEQ ID NO: 15817 - protein, 907 aa, unidentified
  REGION 1..907: note = Cas Enzyme sequence
LIEIDPYFLRRKGLYEKLTPEEFGRALLHLNQRRGFRSSLKIQDQAKEEGEIKKNISALSQEIAQNDFKTIGELFAWKKEQGMKIRGQHTSRQMFIDEFELLWNAQAQFFPDLLTEALKNEVYSAIFYQRPLKEQSHLIGKCKLEPEERRCPRSSWYAQQFRILQEINNFRVLSRSGERTLTEEERKQIFQKLMTQKSPVKIQTIKSKLLDLDEIETLNFEATGRDSLEPNYVEAGLQKIFGKDHYLANAEWYRNEVWEALIREDPYDFKQKAENDWGMNEERIKSLFDIKRPSGYTNYSLKAIKKLLPWLEKGFSVYEAIEKAGYQQEGQKELSYLPPIRSDEFRNPIVVRALSETRKVINAIIRNYGMPEKIMIEMARQTKGTIRSRQKQLWENLRRAKYHEEIREKLQEKDIDASRNNITKYKLWEECNYTCPFTGSSISFSQLFGNDYEYDIEHIFPFRRSLDDSFINKTLCKRSENISRKGNRTPYEAYYGTEQYDQILLRVNKNKKMPYAKRKRFSMKEIPEDFTKRQLVDTSYAAKSAVEYLKQLGCEVDTVRGHITSELRHFWGLNSILNDEDDNNQKSRDDHRHHAIDAIVVAHITKKHINALKSKYDFQKNKHFPSPWDAFGIGIDDFRRDVKKSVQTINVSHRPERKISGKMNLETNYGKTGQDNQFVYRVPLQALTPAKVTKIVDPVVRAIVESRLKEFGIEPGKGSKPIKAAVFKEELRMKAKCNKEGPPIKKVRVRASFSNAIPIKDKNGIPYRYVEPGSNHHIAIYEYEDEKGVKRRCKEMVSRFEAYQRRMKGLPIVNKKHPQYPDARFMMSLCINDMVIYKKNNNKYLCRVQKISGEGNGESIDISFRDHTASTIDSEKKGFRVRTLSPSKFDIEKVFVDPLGRVLPAHD

SEQ ID NO: 15818 - protein, 1004 aa, unidentified
  REGION 1..1004: note = Cas Enzyme sequence
MGISKFTIGLDIGSNSLGWAIVDGSPEFNGENIIAGVRVFSGGTAKTQAGEQSRNSDRRAARQARRQNDRYSRRKRKLKKVLITAGMYPCEPKEQEPLIEIDPYFLRRKGLYEKLTPEEFGRALLHLNQRRGFRSSLKIQDQAKEEGEIKKNISALSQEIAQNDFKTIGELFAWKKEQGMKIRGQHTSRQMFIDEFELLWNAQAQFFPDLLTEALKNEVYSAIFYQRPLKEQSHLIGKCKLEPEERRCPRSSWYAQQFRILQEINNFRVLSRSGERTLTEEERKQIFQKLMTQKSPVKIQTIKSKLLDLDEIETLNFEATGRDSLEPNYVEAGLQKIFGKDHYLANAEWYRNEVWEALIREDPYDFKQKAENDWGMNEERIKSLFDIKRPSGYTNYSLKAIKKLLPWLEKGFSVYEAIEKAGYQQEGQKELSYLPPIRSDEFRNPIVVRALSETRKVINAIIRNYGMPEKIMIEMARQTKGTIRSRQKQLWENLRRAKYHEEIREKLQEKDIDASRNNITKYKLWEECNYTCPFTGSSISFSQLFGNDYEYDIEHIFPFRRSLDDSFINKTLCKRSENISRKGNRTPYEAYYGTEQYDQILLRVNKNKKMPYAKRKRFSMKEIPEDFTKRQLVDTSYAAKSAVEYLKQLGCEVDTVRGHITSELRHFWGLNSILNDEDDNNQKSRDDHRHHAIDAIVVAHITKKHINALKSKYDFQKNKHFPSPWDAFGIGIDDFRRDVKKSVQTINVSHRPERKISGKMNLETNYGKTGQDNQFVYRVPLQALTPAKVTKIVDPVVRAIVESRLKEFGIEPGKGSKPIKAAVFKEELRMKAKCNKEGPPIKKVRVRASFSNAIPIKDKNGIPYRYVEPGSNHHIAIYEYEDEKGVKRRCKEMVSRFEAYQRRMKGLPIVNKKHPQYPDARFMMSLCINDMVIYKKNNNKYLCRVQKISGEGNGESIDISFRDHTASTIDSEKKGFRVRTLSPSKFDIEKVFVDPLGRVLPAHD

SEQ ID NO: 15819 - protein, 1004 aa, unidentified
  REGION 1..1004: note = Cas Enzyme sequence
MGISKFTIGLDIGSNSLGWAIVDGSPEFNGENIIAGVRVFSGGTAKTQAGEQSRNSDRRAARQARRQNDRYSRRKRKLKKVLITAGMYPCEPKEQESLIEIDPYFLRRKGLYEKLTPEEFGRALLHLNQRRGFRSSLKIQDQAKEEGEIKKNISALSQEIAQNDFKTIGELFAWKKEQGMKIRGQHTSRQMFIDEFELLWNAQAQFFPDLLTEALKNEVYSAIFYQRPLKEQSHLIGKCKLEPEERRCPRSSWYAQQFRILQEINNFRVLSRSGERTLTEEERKQIFQKLMTQKSPVKIQTIKSKLLDLDEIETLNFEATGRDSLEPNYVEAGLQKIFGKDHYLANAEWYRNEVWEALIREDPYDFKQKAENDWGMNEERIKSLFDIKRPSGYTNYSLKAIKKLLPWLEKGFSVYEAIEKAGYQQEGQKELSYLPPIRSDEFRNPIVVRALSETRKVINAIIRNYGMPEKIMIEMARQTKGTIRSRQKQLWENLRRAKYHEEIREKLQEKDIDASRNNITKYKLWEECNYTCPFTGSSISFSQLFGNDYEYDIEHIFPFRRSLDDSFINKTLCKRSENISRKGNRTPYEAYYGTEQYDQILLRVNKNKKMPYAKRKRFSMKEIPEDFTKRQLVDTSYAAKSAVEYLKQLGCEVDTVRGHITSELRHFWGLNSILNDEDDNNQKSRDDHRHHAIDAIVVAHITKKHINALKSKYDFQKNKHFPSPWDAFGIGIDDFRRDVKKSVQTINVSHRPERKISGKMNLETNYGKTGQDNQFVYRVPLQALTPAKVTKIVDPVVRAIVESRLKEFGIEPGKGSKPIKAAVFKEELRMKAKCNKEGPPIKKVRVRASFSNAIPIKDKNGIPYRYVEPGSNHHIAIYEYEDEKGVKRRCKEMVSRFEAYQRRMKGLPIVNKKHPQYPDARFMMSLCINDMVIYKKNNNKYLCRVQKISGEGNGESIDISFRDHTASTIDSEKKGFRVRTLSPSKFDIEKVFVDPLGRVLPAHD

SEQ ID NO: 15820 - protein, 915 aa, unidentified
  REGION 1..915: note = Cas Enzyme sequence
CEPKEQEPLIEIDPYFLRRKGLYEKLTPEEFGRALLHLNQRRGFRSSLKIQDQAKEEGEIKKNISALSQEIAQNDFKTIGELFAWKKEQGMKIRGQHTSRQMFIDEFELLWNAQAQFFPDLLTEALKNEVYSAIFYQRPLKEQSHLIGKCKLEPEERRCPRSSWYAQQFRILQEINNFRVLSRSGERTLTEEERKQIFQKLMTQKSPVKIQTIKSKLLDLDEIETLNFEATGRDSLEPNYVEAGLQKIFGKDHYLANAEWYRNEVWEALIREDPYDFKQKAENDWGMNEERIKSLFDIKRPSGYTNYSLKAIKKLLPWLEKGFSVYEAIEKAGYQQEEQKELSYLPPIRSDEFRNPIVVRALSETRKVINAIIRNYGMPEKIMIEMARQTKGTIRSRQKQLWENLRRAKYHEEIREKLQEKDIDASRNNITKYKLWEECNYTCPFTGSSISFSQLFGNDYEYDIEHIFPFRRSLDDSFINKTLCKRSENISRKGNRTPYEAYYGTEQYDQILLRVNKNKKMPYAKRKRFSMKEIPEDFTKRQLVDTSYAAKSAVEYLKQLGCEVDTVRGHITSELRHFWGLNSILNDEDDNNQKSRDDHRHHAIDAIVVAHITKKHINALKSKYDFQKNKHFPSPWDAFGIGIDDFRRDVKKSVQTINVSHRPERKISGKMNLETNYGKTGQDNQFVYRVPLQALTPAKVTKIVDPVVRAIVESRLKEFGIEPGKGSKPIKAAVFKEELRMKAKCNKEGPPIKKVRVRASFSNAIPIKDKNGIPYRYVEPGSNHHIAIYEYEDEKGVKRRCKEMVSRFEAYQRRMKGLPIVNKKHPQYPDARFMMSLCINDMVIYKKNNNKYLCRVQKISGEGNGESIDISFRDHTASTIDSEKKGFRVRTLSPSKFDIEKVFVDPLGRVLPAHD

SEQ ID NO: 15821 - protein, 1033 aa, unidentified
  REGION 1..1033: note = Cas Enzyme sequence
MTRYTLGLDLGSNSVGWAMVAHGRDAFAEGGRIICGVRIFAEGVDRTQKGTEQPRGQNRREKRGLRRMTYRRRQRRRLLARILKEVGLLPLAEQELAGVRAMDPYGLRAKGLDDPLAPYEFGRVLMHLCQRRGFKSNRKTGKSKDDGKVAKATTSLAEEMQRTGCRTLGELLHRRGREFVRTDPAARRMRSQYTLRSMYEAEFGALWAKQSESIPVLHSPDLRAKVEHAIFHQRPLRYDPNLVGDCELEPGEKRCPKAHWLGQQFRMLQEINALRLMDPGEGERPLASAWVEAIRRVLKDAGEGERPLTSAERTRLAEALAGEKKMTFDDVRKCLGLLEAQQFNLEGGGKRDYIQGNAVEAALRSRPLAKWYDAAPPAVREKVYDALAEVETEEELIAMAPPWGMSPDQARHLARLSLPERYFSVSLKAISKMLPYLDPAHICDDRCRRLCPQTPPGAGHVVSDAKALAGYGVVKPSAALDSLPPLNRTHKYLANPLVRRALSEMRKVVNGLAREYGKPQEIVVELAREMKKPREERERLHFENIERKKENEEIAAVLTADFGILTPKRDDILKYRLWRECKASAYSGNPISKTQLFSAEVQIDHILPYSRSLEDSYMNKVLCFTSENAEKGNRTPLEAFAHDQARYQRILQAAAGLPYPKRRRFVQKDIDLDKYIERQLNDTRYISREAVRYLGLLGADVRCARGDATAELRWQWGLAGLWPNADERQRDHRRHAVDAVVVALTTRSALQKLSTVKYNPLRPRFDPPWENFRNDVDDAMKAVNVSFRPARKLSGALHEDTGLGPVEPAAGRYVCRVPLDRLTLGMIPQIRDKAVRELVEERCRQKGLDPQGKGTDKPGKVLTDPPVCMPSGVPVKRVRIEKTQKTAIPIRKVAGRAVKYVLPGGNHHVEIYQEKNGTWTGRCVSRFEAHERVRRGQAVVDRQPTGGRKFVMSLCINDTVLITDEQTGEARLYRLQKVTAFGSMLDMLLRFHAAAQIDDKSTALRVTSWTTLAALKPQKVVVDPIGRVLPCND

SEQ ID NO: 15822 - protein, 1333 aa, unidentified
  REGION 1..1333: note = Cas Enzyme sequence
MYVEEFDRIWTRQAPVLGLDREQVETVHYRYFTGKSDSYEARRRLERYRTKDPSAVIETLSGDEHRFVYKTTTSLKEHLAGKIWYDKDGTIRFVSKESTLFWQRPLRSQKGMLDKCSLESHKVKGRGTNRFITQGPTVVSASHPYYELYRVLQTLLNMRTRDWKLDLMRLQSMLDKLLTYGKNTKVSKLKKDLRLTLDLNFPDDYELPGCPTISGITKLLDSKKMPSRKGDASPVDRLVIPFDLDLYTRIWEKLFFYDDNHLLAQGLRGIEGAAFVEDLEDKLAKLHLSEDYGNLSLHALRNILPYLLRGEELYSAVLLGGIRNAVRDDALVDDHDDALRSWIHTQGPLARGEMIDRIVALLQDPDGPFHLSTPELKLRQRLYHPSQGTAKHRLMDQLPPVVNLRNPMVEQALWAMRRLVNYLLNNYRSTIRPDFTFDEIHVELARDLKLSTQKRAEVRTRQKKAEEDNDMARDYLRSQGLSTSRENLQKYKLYMELAGRSMGVVTCPYTGKVIRGLSAALDGNSMFQIEHIVPRTMTYDDSFANKTLCDADFNRKKGNLTPWQFYQQDPSPKLWGADSWEEVEHRAFRLLPYRKATRFVSKTIEDQLSGDQLVDTAYISRKAKEYLSYICPQDHIRLYPGRVTARLRQLWGLNSILSQGPTITKGQLPAGLALSGDQIPAIVIGKKKSGVLSRILPKYTSRPEREERDVVLLVRVQKGKIYSARYSELPLFWDKAASLADGTYYFVLRSSEVVRVERMFTDQPRLTEDQLRARVTIELNKDGQPKLSSREMDVRILKDIPLPTAPGNYWLTIPLVSVPEVTPEHPRAKVATDTIKVSGSVEQGVFVSKVYRQGDVAMEDGLAQVILTPDLSEVSFTKIKLDAPAITSGEVVLTGAIDRSDLFVCDQDDELRVQIDSFDEPGKYYAVFSFDPTASYILSYDQTPNLSSDEVVLEGDLIYNDKDDRVHFSPAKNRDDHRHHALDAIVIACTGQGVLTAMSTYNAHADDYERGTGTKPTFASPWEGFRDDVREAIEAVLVKHKQSTKILNKVTKQITKDGRTHRSKGLAVRGKLHKETFYGQRQSPEEPAPTMHYRVPITSITKSKQLNQVADPTIRALMIRRLQDMGVDTTQEDYAIPGNAFVDKAGNYTILLPNKRGVPVPVKKVRRRRVVNNTVQLDGYNKEVETSNNDFALIYEDQEGNYCEEVVTFWDSADRLLHGQDRVQLPMDAKRVVMTLRINDMFVIGMSEDELRSAIGSSDYGGISDHLYRVQKLSSMHYVFRLHRASTLNHDEELYTIRSFSALKESTPIKVIIDTDGTISIAARDDQANNHHQ

SEQ ID NO: 15823 - protein, 1211 aa, unidentified
  REGION 1..1211: note = Cas Enzyme sequence
MEKILGIDTGTNSLGWAIVEKSNEGKKLLDKGVHIFQEGVKIEKGIESSKAADRTGHRATRVRYYRIRIRKMQLLKILIENHLCPPLSKDDLKNWKLKKIYPKNELFMHWQRTNDNEGKNPYADRHKCLHEKLDLNNLMNRYTLGRALYHFVQRRGFLSNRKEQGGDDTGAVKEGISALSEEMLNSGFEYLGDYFYSLYNKGEKIRDHYTARNEHYLKEFKAICEKQELDSRLGSDVVKAIEKAIFYQRPLKSQKGQVGKCVFEKNKAKCPASHPLFEEFRMLSFLNNVKIQTPKDDALRPLNNDEREKVMQLFFRKLKNSKGKFDFEDIAKKLAPKKMYAFYKENPDMPYLFNYPMDVSVSGCVVTAYLRDIFGEDWLTGVCEVYTLAEGKTRMQILNDVWHALFFYSNKEKLEGYAKERLQLSDDDAKKFSEIPIPSEYASLSLKAISKILPYLRRGMIYSRAVFLGNLCEIMPRYEWGITEMREVAIEKIVNEMDNYNPSIDNRTLEVCIKDYLKSEYGVTDEDLKKLYHPSMMETYPRVRPNNDGVYQLGAPRINSVRNPMAMRSMFRLRKLINRLLQEGKIDKNTTINIEFARELNDANKRKAIADNVRENQKQRDDARKKICELYKAETGKDIEPNDDDILKYILWEEQEHVCLYTGKQIGIADFIGADPKYDIEHTVPQSVGGDSTRMNLTLCDSHYNREVKRALLPSELSNHDEILKRIEPWKKKYEDLDKQIRRQRTSGASTKDAKDKIIQRRHLLQLKRDYWRGKYERFTMTEVPEGFSRRQGTDISVISKYARLYLKSVFDKVYTVKGIATSDFRKIWGIQDVYVSKERVNHVHHCIDAIVIACIGKAEYDKLAQYYHDKENHAWYGYSKADFVKPWATFVEDIKNVQNEILVSHYTPDNMAKQGRKYTIANGKKVLSKGDSARGSLHNDTYYGAIERDGDIKYVVRRELVSLGEKDIKNIVDDTVRGIVETAIAEKGFKEAMAGPIWMNEEKQIPIKKVRCYTPSVTNPLNIRKHRDESVKEYKRQFHVANDSNYALAMYIGKDTKGKEKRDFELVNMIDAAGFYKTSNNKEVVGGSMVPIKSKHDYPLAYTLKIGTMVLLYEKSPEEIWERNAAERCKRLYKVVGLSILNTSGHSYARITLRHHEEARQGTDLKIQNGAFIQNEKLRPCILMLHTQLKALVQGYDFDINELGEIKRLR

SEQ ID NO: 15824 - protein, 1453 aa, unidentified
  REGION 1..1453: note = Cas Enzyme sequence
MAKILGLDLGTNSIGWAIVDKDGNDFSLVDKGVRIFSEGVKSEKGIESSRASERTAYRSARKIKYRRKLRKYETLKILSLNGMCPLSLDEVEDWKKSGFKKYPLNPEFLKWLRTDEDENINPYVFRDRASRRKVTLYELGRALYHIAQRRGFFSNRLDQSAEGILEEHCPIIQGIIEDLNSTVEMNSEIKDYFLNTGIIDESVKGGFSKDLDDGDKKLVSLYKSLISIVSKNENDSAKAKEEVIARLNRKEDLGAVKRGIGEISQAMKDGNFSTLGQYFYSLYNKDRIRNKYTAREEHYLKEFETLCKQQGISGIDENEQLPEKRYVGLAKDLYRAIFFQRPLKSQKGLIGKCSFEKSKSRCAVSHPDFEEYRMWTYLNTIKYGTQSEKTLRFLSQEEKLGLIPKFLRKKDNFNFEDLAKELIPKGASFGFYKSSRKEEFYYWFNYKPTDTVSGCPVSASLKNVIGDDWKIKTFTYKTSNSIGREVSRTVDYRDLWHLLSVSTSDIYLYEYAKEKLNLSDKNAKAFSRIRLKKDYASLSLNAINKILPYIKEGLLYSHAVFMANVESIVDDEIWDDVQQRKYIQDKIAAIIESHTYENGLLEAVNSLLKDCKIDNCYYSKEAEATYKSDLDKKLISFFKYHSVEDRQAVLEELSPVFIEQLKVYEFVKIQRLDEKVLEFLSGKNENGQIFCSNEKSLKKLYHPSDLEVFKKKIIKDEFGNEKVVLGSPLTASIKNPMAMRALHQLRKLLNTLIFEGQIDEKTKIHIEMARELNDANKRKGIQDYQNENKKFREEAIKEIKKLYFEECKKEVEPTEADILRYQLWVEQQKCEIYEQGKNISICDIIGSNPAYDIEHTIPRSISQDNSQMNKTLCSKRFNREVKKQKMPIELTNHLEILPRIAHWKEEADNLSREIEIISRSIKAAATKEVKDKKIRRRHYLSLKRDYVQGKHDRFIWTEPKVGFKNSQIPDTGIITKYSQAYLKSYFKRVESVKGGMVAEFRKQWGIQDSFIDENGFKQYKEKDRSKHTHHTIDAITIACMTKDKYDVLAHAWKLEDEQNKKEAKAIIEQAKPWKTFKEDLLKIEEEILVSHYTPDNVKKQSKKIVRVRGKKQYIAEIERDTKGKAIPQKDALGKIIYKLNEKGEKLPRLHQGDTIRGSLHQDSIYGAIKNPLNPDEIRYVIRKDLESLKANDVESIVDEAVKEKVKEAVANKVLLLFSNAQQKNKIDGIVWMNEEKQVPINKVRIYANSVKNPLEIKEHSLLSKSRHEHKQKVYGQNDENYAMAIYQLDGKREFELINNFNLAKLIKNGQGFYPMNKKKEVKGKTVLIPIAKSNNRNIVLKRGQQVVFYDKEIEQPKDISEIVDFKGRIYLIEGLSIQRIKSGNNEFEYGVINFRHFKEARKADEIKKDNFKPDGVFKLGENKPTRKMNHSQFSAFVEGIDFKVLSTGKFEKI

SEQ ID NO: 15825 - protein, 970 aa, unidentified
  REGION 1..970: note = Cas Enzyme sequence
GVRIFQEGVNRTTSGSEESKNADRRIARGIRRQNARYRSRRDDLIVSLIKLQMYPKEKDEEANFYKIDPYEIREKGLDEKLTLLEIGRALFHINQRRGFKSNRKTATKEKGKIYDGKGEIAGITETAKAISEESYRTLGEYLAYLDPKEKRRRNRYTLRSMYSDEFNILWEKQRQFYPEILTDDAKNCIYDAIFFQRKLKSQKHTIGYCTFEPKKRCAPKSSPVFQYYRILEQVSRLTITTDNRFGEKLTDDERFLLTNELNERSELKFSRIKKILKLPPDSYFNLEQQKKLLGNRTGYEFAKAFGKKCWFSFSPEKKHEIWHTLHFSNDDEWLKKYASEKWGLDSNSVEKLMKVSLENGYARLSSKAMKNIIPFFEEGMAYDKAALEAGYHHSQTFKNRGNMEKLPEPENIRNPIVQQALYELRKVMNEIIEKYGKPNVIRVELLRELKLPKEKRENILLDNRRREKKANEIRARLKEELGFLNPSREDIQKYLLWEECNKICSYTGKQISLAGLYNGDFEIEHIIPYSRSLDNSMANKTLSLKELNLEKGNKTPFEAFSGDSERWDEIKQRVKKNMPWKLKKFTIEDAAEEIDDDFFHHQFTDSAYIAGEVHKYLKYICEKVQVAKGSATFQLRHLWGLDKILSGDINIKNRDDHRHHAVDALVIANITPGFLKKLSTYSKFGYEATHEKFPVPWENFRKYAGSSINNILVSHRVNKRVRGKLHKDTFYGKIRLRNGKETYVVRKPLKSLTPNMIKNIVDPVVRKTVLKRLRSMGLDTNKKYSIPKDAFTETLTMQNSSVSIKSVRVAITSGNMIRLYPDRNLYVEPGKNHHIEIFENETTGKRDGRVVTLFDAVKRKKEGLPIVDKNPLGKGYKFIMSLAINELVLIDLNYKNINWNDQTSSQELSKKLYRVQKISESTQITFRHHKVAVRKDEEGNEPGICSFVPNTLKGVKIKISPLGKIRMADD

SEQ ID NO: 15826 - protein, 1053 aa, unidentified
  REGION 1..1053: note = Cas Enzyme sequence
MKTVFAFDVGLASLGEAVRHGDDIVHADSLLIDPGVADISGQAIRRRQYRSRLTHKDREKWWENIWTSIGKQPLRGIRRENGKWVEGDERLEREFAQTGDSTVYTSCLLRIMLLEGKKLEDWQIYKAVRSAFQRAGYPKVPWARNNDDEKETIERVNAFTEDLQDNFPNVRHRFPCYYDAWKIGLFDPRKGKIVSFCQDHNAERARGYTAPRGLVEKEIMVLLEQAAKQIPQLRAEIAKRISTPDKWREYVLYGPDFSGFNDTKVEGVLDQKLARFDNRCVNMCTAIPRFKVARAENILYFQMHFLLRLANTLVEKDGENKKLTNEEIRERYVVAEEKKKAYMAECIQTKQKPDYEKLAEFYKFTPAQWKKWAAKKGYTVYPATPEVPPPKTGGRTAYSRPAMALIRELILSGKPPHDFREDVVRSNFEKFPAMGLQESDLGFFLRMAENDPQSIYISPGSLAERYAGKHGGELEKGVMEIIGSTRDAKVRHRLTVFFERLKALMEKCGAPDSIIIEFAREDFSSRRSKKAYEDKSKANNKLYTEARSQLREQFGENFADPGNKLVLKYILMRQQGDICPYTGKSISRSQLSYCDIDHIIPQGDKYQGPDAIENKVLTHHETNQQKDDRMPFECDEIITDREAYKNRIEGMQLSGKAKKILLCSRKEEADELIERYYGLAITGWVARLARDIACLWMGWEPGAKGEKRKLHVVSGSLVGKIRREYHLNEALSPVTAAMVPDRTGEERRSENEDEKEKPAAEVKKNREDARHHALDAMVMTYLAEYARDIRKFDNLRLPEGRNHPKYFAQKLEELNVIPHKVARAKAALGETAYRVIERQVIEQKRGKHAMKKERILLRTKGIREIQSAKDARKIIDPQIRKQVEEFFKNNPKPSAEGKEAFYSGLRLKGNGPRILKVKVEAGSPDNTKNLVGFGRGSCYQSGSSSAVGTLQHGVYLYSKGNGKWKVKPVYAFDSPYRVRKKLTEQGYTVKDDVLFYTGCLIEITKPIEGTDVDVGTYTVKTIRADGRIEISKINGEKHGFALSRIGNSFLFVR

SEQ ID NO: 15827 - protein, 958 aa, unidentified
  REGION 1..958: note = Cas Enzyme sequence
NGILNEDNFDIVSKIIKEIDDRIFLPKILHSDNGLFPKQVNEFELKKIIENMVRNYAETEEMASAVLSLFNYKIPYYVGPLTGCNSWVVRTDEKVTPWNFDRVVDLAKSNEAFMRRMTNKCAYIKGEDVLPKASIIYQKYDTLNQLNKLRINDRVISIELKQTIYNELFLKYPKVTDKKIKELLVREGLCSSSETKDITISGKDGDFKSSMSSYIRLKNILGDFVDDDLKSGGKVCENIILWHTLNTDKKIVEDLIEKNYGFIPEIKANIKQLKGLTFNDFGRLSAKLLIGIEGVDKTTGQILTILDVLYQTNQNLNEVLNNESYNFSEIIDEENGIETEIISYETVEELYVSPAVRRGIWQTLLMIDEYVNAVGRLPDKIFIEVTRNDGKKGDNGRTQPRKRQLQEKFKNIGSAYSDIIEELSEEKYTDLKLRQERLYLYFRQLGRCMYTGERIILDELNGNRYDVDHILPRTYVKDDSLDNKVLVCRGANATKADTYPLPTEFSRKEVRAHWKMLLDKDLISKTTYDRLTRIEPLKDDDYNDFINRQKTITDQMAKAVIELLKRKYPNAKLIFSRAKNVNDFKNRFNLFKCRETNDLHHARDAYLNVVVGNVFDTVFSTPLGQSRKDGDVWRIYNLKKLFTRDVIGAWSKDSIKIVKDTYSKPSMSVTRYATCNKGKFYDETVCRKDDSAITAPRKGKGPISDVTKYGGYTSQKTAYFAIVTSVDKKGKRIKTIEAIPVLVTYKLKSDTDAIQKYLESYLREPNIVVPKVKVKQLVSYNGSLCYLAGITNNQITVHNASQLYTDNTTDEYVNELIKIIGMGDNGIITGNESQYITKTNKDGVIRIVVNKENNEKLYETLKNKLDSKIYKGLSAFASFKKNMERGKDKFCELSVLEQAKVLLQILKVFRCNAVNSNIELIGGGRGSGSIKINKNITDVDFKLVNLSPAGLTVRIRKV

SEQ ID NO: 15828 - protein, 1358 aa, unidentified
  REGION 1..1358: note = Cas Enzyme sequence
MEKKSKKIYLGLDIGTDSVGYAVTDDQYNLLRVHGDDAWGSVIFDAASLSDERRSHRSARRRLDRRQQRINLLQEIFAKEISKVDDRFFIRLSESYRWREDVQDRYVFFNDEEYTDVQYMGEYPTIHHLICELMNNKNPHDVRLIYLACAWLITHRGHFLNNLNVEKLDEIMDISSVYQNFINYFTENGYRRPWGEIDVSALSEVLKQKTGVTVKNKELQNILLEGKNPEKSGTEEFPFSQDSIIRLLAGGQCKLKDVFCKEEYLDLGSVSLGMDEEKFGEISGNIGEDYDLLIALRGLYDWSVLADILNGHSETISMAKVQIYEQHGKDLQILKYFIRKYVPDKYNEVFRKAKADNYVAYTGHMDKDTASQIKKKAKAEEFSKYVLKLMSPIKPEKTDLQSYEDMCERLKLNIFLPKQKNTDNRVIPHQLYEYELIRILKNASLYLPFLNEVRNGISEMDKVVSIFRYKLPYYVGPLNKKSDFAWISRKAGKITPWNYKDMIDEDASENAFIKRMTNKCTYLPGEDVLPKDSLCYQKFMVLNELNNLKIDGRKVPVEVKQGIYHELFEKKKKVRRKDIEEYLISNNYLAKGSTELTSGIDEQVHSCLSSYYAFRNLLSREILSENDVEKIIERASYAEDKSRVKKWLRKEYPDLSQDDVRYITKIKIKEFGKLSRKFLTELKGCNKQDGEMTTILRIMWETNDNLMEILSDKYTFREVVEMFTQEYYTGKNQSLKERLDEMRVSNSVRRPVYRTLAVVKDIEKAFGKPDKIFVEMTRGGLSDQKGKRTKSRKQQILELYAKCREEDVRDLKQQLESMGERVDSRLQGEHLFLYFMQFGKCAYSGMPIELEKLMSGSKEYDIDHIYPQAYVKDDSIINNKVLVLSKINGTKGNVYPISPEIRNRMQGQWNWWHHIGVISDEKYKRLIRSTPFTDDEKYGFINRQLTETSQSTKLIAGLLKERFQNIDIVYVKAGLVSDFRHEFDLPKSRTYNDLHHAVDAYLNIVAGNVYNMRFSKRWFSVDSKYSIKTKTVFSHPVNCQGTIVWDGASMLAKVKKIAKKNTAHFVKFATFKTGGLFDQNPVKKGTGLIPLKAGLPTEKYGGYNKAGIMFLMPVKYKIRKKCAIIIMPVELLHGKHFLEDETFAREYTFNRLESILGKKVDEISFPLGMRPWKINTMLSLDGFRVCITGTGGKGKCLVAQSIMQFSSEDCWKGYMKKLEKFIEKFKKNPDFIYDKEYDKVSVEENQKLYELYIEKLQNTIYSKRVNSPVQILMDGQERFEKLNIKEQCVVLMNIQTVFGRMTSGCDLSLIGGSPNSGATVNFSSTISNWRKNYSDVRIIDQSPSGIWEKRSENILELL

SEQ ID NO: 15829 - protein, 1099 aa, unidentified
  REGION 1..1099: note = Cas Enzyme sequence
  REGION 1095..1098: note = misc_feature - Xaa can be any naturally occurring amino acid
MEKKSKKIYLGLDIGTDSVGYAVTDDQYNLLRVHGDDAWGSVIFDAASLSDERRSHRSARRRLDRRQQRINLLQEIFAKEISKVDDRFFIRLSESYRWREDVQDRYVFFNDEEYTDVQYMGEYPTIHHLICELMNNKNPHDVRLIYLACAWLITHRGHFLNNLNVEKLDEIMDISSVYQNFINYFTENGYRRPWGEIDVSALSEVLKQKTGVTVKNKELQNILLEGKNPEKSGTEEFPFSQDSIIRLLAGGQCKLKDVFCKEEYLDLGSVSLGMDEEKFGEISGNIGEDYDLLIALRGLYDWSVLADILNGHSETISMAKVQIYEQHGKDLQILKYFIRKYVPDKYNEVFRKAKADNYVAYTGHMDKDTASQIKKKAKAEEFSKYVLKLMSPIKPEKTDLQSYEDMCERLKLNIFLPKQKNTDNRVIPHQLYEYELIRILKNASLYLPFLNEVRNGISEMDKVVSIFRYKLPYYVGPLNKKSDFAWISRKAGKITPWNYKDMIDEDASENAFIKRMTNKCTYLPGEDVLPKDSLCYQKFMVLNELNNLKIDGRKVPVEVKQGIYHELFEKKKKVRRKDIEEYLISNNYLAKGSTELTSGIDEQVHSCLSSYYAFRNLLSREILSENDVEKIIERASYAEDKSRVKKWLRKEYPDLSQDDVRYITKIKIKEFGKLSRKFLTELKGCNKQDGEMTTILRIMWETNDNLMEILSDKYTFREVVEMFTQEYYTGKNQSLKERLDEMRVSNSVRRPVYRTLAVVKDIEKAFGKPDKIFVEMTRGGLSDQKGKRTKSRKQQILELYAKCREEDVRDLKQQLESMGERVDSRLQGEHLFLYFMQFGKCAYSGMPIELEKLMSGSKEYDIDHIYPQAYVKDDSIINNKVLVLSKINGTKGNVYPISPEIRNRMQGQWNWWHHIGVISDEKYKRLIRSTPFTDDEKYGFINRQLTETSQSTKLIAGLLKERFQNIDIVYVKAGLVSDFRHEFDLPKSRTYNDLHHAVDAYLNIVAGNVYNMRFSKRWFSVDSKYSIKTKTVFSHPVNCQGTIVWDGASMLAKVKKIAKKNTAHFVKFATFKTGGLFDQNPVKKGTGLIPLKAGXXXXY

SEQ ID NO: 15830 - protein, 1358 aa, unidentified
  REGION 1..1358: note = Cas Enzyme sequence
MEKKSKKIYLGLDIGTDSVGYAVTDDQYNLLRVHGDDAWGSVIFDAASLSDERRSHRSARRRLDRRQQRINLLQEIFAKEISKVDDRFFIRLSESYRWREDVQDRYVFFNDEEYTDVQYMGEYPTIHHLICELMNNKNPHDVRLIYLACAWLITHRGHFLNNLNVEKLDEIMDISSVYQNFINYFTENGYRRPWGEIDVSALSEVLKQKTGVTVKNKELQNILLEGKKPEKSGTEEFPFSQDSIIRLLAGGQCKLKDVFCKEEYLDLGSVSLGMDEEKFGEISGNIGEDYDLLIALRGLYDWSVLADILNGHSETISMAKVQIYEQHGKDLQILKYFIRKYVPDKYNEVFRKAKADNYVAYTGHMDKDTASQIKKKAKAEEFSKYVLKLMSPIKPEKTDLQSYEDMCERLKLNIFLPKQKNTDNRVIPHQLYEYELIRILKNASLYLPFLNEVRNGISEMDKVVSIFRYKLPYYVGPLNKKSDFAWISRKAGKITPWNYKDMIDEDASENAFIKRMTNKCTYLPGEDVLPKDSLCYQKFMVLNELNNLKIDGRKVPVEVKQGIYHELFEKKKKVRRKDIEEYLISNNYLAKGSTELTSGIDEQVHSCLSSYYAFRNLLSREILSENDVEKIIERASYAEDKSRVKKWLRKEYPDLSQDDVRYITKIKIKEFGKLSRKFLTELKGCNKQDGEMTTILRIMWETNDNLMEILSDKYTFREVVEMFTQEYYTGKNQSLKERLDEMRVSNSVRRPVYRTLAVVKDIEKAFGKPDKIFVEMTRGGLSDQKGKRTKSRKQQILELYAKCREEDVRDLKQQLESMGERVDSRLQGEHLFLYFMQFGKCAYSGMPIELEKLMSGSKEYDIDHIYPQAYVKDDSIINNKVLVLSKINGTKGNVYPISPEIRNRMQGQWNWWHHIGVISDEKYKRLIRSTPFTDDEKYGFINRQLTETSQSTKLIAGLLKERFQNIDIVYVKAGLVSDFRHEFDLPKSRTYNDLHHAVDAYLNIVAGNVYNMRFSKRWFSVDSKYSIKTKTVFSHPVNCQGTIVWDGASMLAKVKKIAKKNTAHFVKFATFKTGGLFDQNPVKKGTGLIPLKAGLPTEKYGGYNKAGIMFLMPVKYKIRKKCAIIIMPVELLHGKHFLEDETFAREYTFNRLESILGKKVDEISFPLGMRPWKINTMLSLDGFRVCITGTGGKGKCLVAQSIMQFSSEDCWKGYMKKLEKFIEKFKKNPDFIYDKEYDKVSVEENQKLYELYIEKLQNTIYSKRVNSPVQILMDGQERFEKLNIKEQCVVLMNIQTVFGRMTSGCDLSLIGGSPNSGATVNFSSTISNWRKNYSDVRIIDQSPSGIWEKRSENILELL

SEQ ID NO: 15831 - protein, 1017 aa, unidentified
  REGION 1..1017: note = Cas Enzyme sequence
MRYRLALDIGSTSIGWCLLRLDADDKPIAIIRMGVRIFSDGRNPKDGTSLAVTRRTARQMRRRRDRLLKRKERMLAALTRLGFFPADEAQRRQLVNLDPYALRKKGLYDALSGPEFARALFHINQRRGFLSNRKTDKKDSESGALKKAIRDLRDKLSQENCQTLGEWLANRHESRLSVRARLRGKTQRDKAYDFYADRAMIEHEFDALWTKQNSLNPALFTDAARGELKDILLHQRPLKPVKPGRCTLIPDEERAPLALPSTQRFRIYQEVNNLRLLTPDLREQALTLDQRNQVAELLEHQGEVRFTKILKTLKLPGTTKFNLEDIKRDRLKGNATSTALSKDTCFGEHWYSFDLAMQDDIVDKLLNEASESALVNWLQEHTGVDEATAERIANTSLPEGYGSLSRAALARIVPELIKDVVVYSEAVNRAGFDSHSALSHIQQTGEIMDALPYYGIPLRRHVAFAKDNPRNDEERYGKIANPTVHIGLNELRKVVNALIKRYGRPSEIVVEVARELKLSRERKLEIQREQKERQELNDKQVADACVVLGLTPANLDRAKRRELSQKMQLWVELNAKNVADRQCPYTGEQIGIERLLSNEVEIEHILPYSMTLDDSMNNKTVSLRRANRDKGNRTPYQAFGETSQSGYDYEAMLQRAALMPREKAKRFAPDGYQRWLNEDKDFLARALNDTAYLSRIAKEYLSLVCHPNKVRAIPGRMTALLRGKFGLNQLLSGTESKNRNDHRHHALDAAVIGVTDQGLLQRFAQASASAKERQLDRLVEEMPLPWPTYREHIERALGNIIVSHKPDHGYQGAMHEDTAWGLHGDGVVSRSLRPDDGGPRQREYKNKNVVAINSTRNSERHGTDDNGQPKAYKGYVGGSNHCIEIWRDEKGKWNGDVISTFDAYQLIRQHGEAEGIKQLRNQSHSLSRKPLVMRLMIDDLVKLDVDNVPKIMRVVKIGGNGQMFFAEHNEANVDARNKDDGDPFKYVSKYAGSLQKAMGRRVTVSEIGNLRDPGVRG

SEQ ID NO: 15832 - protein, 1019 aa, unidentified
  REGION 1..1019: note = Cas Enzyme sequence
MLPKMRYRLGLDIGTTSIGWCLIRLNKKEEPIAIIRMGARIFSDGRNPKDGSSLAVTRREARQARRRRDRLIKRKKRMLNALIKYGFFPEDETKRQVLVNLDPYVLRKKGLYQPLTGAEFARALFHINQRRGFLSNRKTDKNDNESGALKSAIRLLREKLEQENCETLGEWLANRHERGESVRARLHGKTKKDRAYDFYADRSMVEHEFDRLWSKQFSFNPSLFNEAARKELKDILLFQRPLKPVKPGRCTLLPDEERAPLALPSTQRFRIYQEVNNLRIITDELKEQPLTLEQRNVVTELLEQGDATFRTKIKKALKLSGSVSFNLEDIKRDRLKGNKASIILSNKNLFGKQWYDFSLAQQDKIVDKLLHEEITTELVKWLCNETNVDEEAAERISNTNLPEGYGNLSKKALDRILPELEKDVVVYSQAVEKAGFESHSALSNSQQTGEIMTALPYYGIPLQRHVAFAKDEPKNEEERYGKIANPTVHIGLNEIRKVVNALIQRYGHPSEIIVEVTRELKLSRDRKNEIQRIQKLNQDRNEENIKEACQALGLTASSIDKSKRRELSQKMQLWKELNPKDAANRRCPYTGEQIGISKLLSNEVEIEHIFPYSITLDDSLNNKTVSMRRANRDKGNQTPYEAFGKLSIEGYNYDDIISRATLMPKAKSKRFAPDGYKQWLRDDNDFLARALNDTAYLSRIAKEYLSCICPPNKVRAIPGRMTALLRGKYGLNEFLSDDRHKNRDDHRHHALDAAVVAITDQGLLQRFSKASAYARKHQLNKLVDEMPFPWLTFRAHVQRGLNNIYVSHKPDHSYQGAMHEESAWGINKEGLATRRVRPNDGDFRQRETKNKNLVMINSSGSSTRHGLDEHGNTKAYKGYVGGNNYCLEIWRDEKGKWKGDVISTYRAYQIIRDLGEDKGFKQLRNKSTSQSGQPLVMRLMINDYVRLNVGDTSKTMRVAKIIGNGQVFMSEHNEANVDARARLKTYSYVSKYAGSLQKSNGRHVIISEIGELKDPGYRG

SEQ ID NO: 15833 - protein, 1059 aa, unidentified
  REGION 1..1059: note = Cas Enzyme sequence
MKYRLALDLGTNSIGWALIRLAGNPAGQMEPSAIIRAGVRIFGDGKDPKSGASLAVDRRLARGARRNRDRKLKRKQRLLQALIDSGFMPNDKTERSALVHLDPYLLRSRGLSEELTPFEFGRAIFHLNQRRGFKSNRKTDSVDSDSSLMKNTINQVQQMLTSEGYVTVGQWLAERHEKRESVRARLRGSGVKDKTYDLYFDRAMIETEFDVLWSAQAAFNPAFFTPAKREMLHETLFFQRNLLPVRPGRCTFEPNQERAAKALPSSQLFRIYQEVNNLGIEDGNFKYRPLTLSERDAIVEKLCSQKTVSFDAMRKLLKLAGAPRFNLESEKRKDLKGSSTAVSLSKPEMFGAAWSSLTLDEQDEVTSQILNVEDDDKIIAWLIESFGLTDEAANAVSQSRSEITKQATGYANLSSTAIHKVLPHLQSDVRKYSDAVVAAGYQSHSGLTHMEQTGEILDRLPYYGEYLQRHVGHGTGLVTDDPSTRFGRIANPTVHIALNELAKVVNALIDCYGPPDQVIVEVTRDLKRTKEQKDEESKKQAENQKANERWSQEVLEATGITATRKDLQKMKLWVELNPKDPTNRCCIYTGEVIGIARLFSPEVEIEHILPFSRTLDDSLNNKTVSMVKANRDKGNQTPFEAFGSSPKGYDYDEILVRARNSNRYRAARFGPEGFSNWLKNDADFLARALTDTAYLSRIAREYLQLVSPTPVVAVPGRMTASLRRHWGLNNLLSDDGVKNRSDHRHHAVDAITIGLMDRGSLQRYARESGRGTTVEEQLSKTSHESPLAHLREKAQGVIGAIKVSHRPNHSYQRQMNNDTNYGFRPNGFVATRKALDEFATLKSVMDTHFADAYLKEKILRFVGDCSDTDLKSRLAEFTAETGTRKITFWQKLDVIPIPPNPAVPERAPKGTKAREDNSPRGVKGDSNYCLEIFVNDKGKWVGEVVSSYEAYRIARTQSPARLLDPHLTQSGMPLVIRLMRDDVVQVDVESPDDRQLMRVCQFASSGRLNLAPISEANVDARVRTKEISYLSASAGTLQSRKAKKVTITPDGRVSYRNIS

SEQ ID NO: 15834 - protein, 1059 aa, unidentified
  REGION 1..1059: note = Cas Enzyme sequence
MKYRLALDLGTNSIGWALIRLVGNPAGQMEPSAIIRAGVRIFGDGKDPKSGASLAVDRRLARGARRNRDRKLKRKQRLLQSLIDSGFMPNDKTERSALVHLDPYLLRSRGLSEELTPFEFGRAIFHLNQRRGFKSNRKTDSVDSDSSLMKNTINQVQQMLTSEGYVTVGQWLAERHEKRESVRARLRGSGVKDKTYDLHFDRAMIETEFNVLWSAQAAFNPAFFTPAKREMLHETLFFQRNLLPVRPGRCTFEPNQERAAKALPSSQLFRIYQEVNNLGIEDGNFTYRPLTLSERDAIVEKLCSQKTVSFDAMRKLLKLAGAPRFNLESEKRKDLKGSSTAVSLSKPEMFGAAWSSLTLDEQDEVTSQILNVEDDDKIIAWLIESFGLTDEAANAVSQSRSEITKQATGYANLSSTAIHKVLPHLQSDVRKYSDAVVAAGYQSHSGLTHMEQTGEILDRLPYYGEYLQRHVGHGTGLVTDDPSTRFGRIANPTVHIALNELAKVINALIDCYGPPDQVIVEVTRDLKRTKEQKDEESKKQAENQKANERWSQEILEATGITATRKDLQKMKLWVELNPKDPTNRCCIYTGEVIGIARLFSPEVEIEHILPFSRTLDDSLNNKTVSMVKANRDKGNQTPFEAFGSSPKGYDYDEILVRARNSNRYRAARFGPEGFSNWLKNDADFLARALTDTAYLSRMAREYLQLVSPSPVVAVPGRMTASLRRHWGLNNLLSDDGVKNRSDHRHHAVDAITIGLMDRGSLQRYARESGRGTTVEEQLSKTSHESPLAHLREKAQGVIGAIKVSHRPNHSYQRQMNNDTNYGFRPNGFVATRKALDEFATLKSVMDTHFADAYLKEKILRFVGDCSDTDLKSRLAEFTAETGTRKITFWQKLDVIPIPPNPAVPERAPKGTKAREDNSPRGVKGDSNYCLEIFVNDKGKWVGEVVSSYEAYRIAITQSPARLRDPHLTQSGKPLVIRLMRDDVVQVDVDSPDDRQLMRVCKFGSSGQIQLAPISEANVDARVRLKEITYLSASAGTLQTRRAKKVTITPDGRVSYRNIS

SEQ ID NO: 15835 - protein, 1059 aa, unidentified
  REGION 1..1059: note = Cas Enzyme sequence
MKYRLALDLGTNSIGWALIRLVGNPAGQMEPSAIIRAGVRIFGDGKDPKSGASLAVDRRLARGARRNRDRKLKRKQRLLQSLIDSGFMPNDKTERSALVHLDPYILRSRGLSEELTPFEFGRAIFHLNQRRGFKSNRKTDSVDSDSSLMKNTINQVQQMLASEGYVTVGQWLAERHEKRESVRARLRGSGVKDKTYDLYFDRAMIETEFNVLWSAQAAFNPVFFTPAKREMLHETLFFQRNLLPVRPGRCTFEPNQERAAKALPSSQLFRIYQEVNNLGIEDGNFTYRPLTLSERDAIVEKLCSQKTVSFDAMRKLLKLAGAPRFNLESEKRKDLKGSSTAVSLSKPEMFGAAWSSLTLDEQDEVTSQILNVEDDDKIIAWLIESFGLTDEAANAVSQSRSEITKQATGYANLSSTAIHKVLPHLQSDVRKYSDAVVAADYQSHSGLTHMEQTGEILDRLPYYGEYLQRHVGHGTGLVADDPSTRFGRIANPTVHIALNELAKVVNALIDCYGPPDQVIVEVTRDLKRTKEQKDEESKKQAENQKANERWSQEILEATGITATRKDLQKMKLWVELNPKDPTNRCCIYTGEVIGIARLFSPEVEIEHILPFSRTLDDSLNNKTVSMVKANRDKGNQTPFEAFGSSPKGYDYDEILVRARNSNRYRAARFGPEGFSNWLKNDADFLARALTDTAYLSRMAREYLQLVSPSPVVAVPGRMTASLRRHWGLNNLLSDDGVKNRSDHRHHAVDAITIGLMDRGSLQRYARESGRGTTVEEQLSKTSHESPLVHLREKAQGVIGAIKVSHRPNHSYQRQMNNDTNYGFRPDGFVATRKALDEFATLKSVMDTHFADAYLKEKILRFVGDCSDTDLKSRLAEFTAETGTRKITFWQKLDVIPIPPNPAVPERAPKGTKAREDNSPRGVKGDSNYCLEIFVNDKGKWVGEVVSSYEAYRIAITQSPARLRDPHLTQSGKPLVIRLMRDDVVQVDVDSPDDRQLMRVCKFGSSGQIQLAPISEANVDARVRLKEITYLSASAGTLQTRRAKKVTITPDGRVSYRNIS

SEQ ID NO: 15836 - protein, 1084 aa, unidentified
  REGION 1..1084: note = Cas Enzyme sequence
MNKLHYTLGLDVGIASIGWAVVEIDFKNGHYYPKRILPLGVRLFPSAETPKTGDSLNKPRREARGLRHRLHRRKIRLHQIRELLIESELLKNKSELADASLIPWVLRVKGLDKPLENKELAKIIFHIVKRRGFKSNRKKIEDTDKDSGKMNSQIKNNIALMKEKGYRTYAEMVSKDEKFSNHIRNKGGEYVGSVSRDTLQKELELILNTQQKFGNEIVTNDFIKKCLDIFGKQKPFADKESILKMVGSCPFETDQKRAPRNSFTNESFVFWQRLNNISLINSKEYSASYAFNELERNSIYNFVLTQSEVSYKSIRKLLKLDTHIIFKSGDLTSKYGVNNLEKEATTKLKVFKGYNSIRKVFEKLDPELWDKAKIDSDYLDRVSFVLSVCKTDDELKKELSNEKFSDNEIEIILNIPTFDGFGHLSLKAINKMLPYLMKGLKYSEACEAVGYDFKLHLKNEQNTLPLIDHEEIRNPIVYRALTQSRKVINAIVATYGQPSFVHIELARELMRSRDERNKLSAMNEENRTRNEKLVKELLEYGLPDPRGKDIEKLKLWKEQNGKCAYKMRKIKIEDLISQDNMVEIDHILPFSRSLDDSMLNKVVVFSSENQNKRNQTPFEYLGGDEQSEKWQDYKTYIQNHTGLRQKKREYLLNTNFKNKDLKDFIERDLNDTKYIASYLKNFVEDNLKFGDIPINATRRVYTFTGKFTSYLRKHYGLNKDRDENSRHHALDAVMVAIASYGMLKRVSDFETVKETNENKGLKVFKKYPAPWGNGDAFRADIQARIFSDDPMEEIKKAKLEEHYKGAEEHIKPLFVSRMPRRGISGKAHAETIYSTKLYEKNHLLIHKISIFSLQKKNFENAGESNGIYGDDKELIRVLRERLEKYDWDTKKAFKEEIRKPSKNGQGNLIRTVKVMEKSNAIVPIHEGHGAAMQESMVRVDVFIKDKRYYLIPIYVADTVKKDLPNRAIVANEPYDKWISLDETYQFLFSFYSNDYVKIKLKDKELIQGYYVGTDIGRASIEIKTHDDSKNLRGKMSERPGTKTAEYIKKFNVDVLGNIYEVKNEKRHGFQIHNSKSESPSETQK

SEQ ID NO: 15837 - protein, 1084 aa, unidentified
  REGION 1..1084: note = Cas Enzyme sequence
MNKLHYTLGLDVGIASIGWAVVEIDFKNGHYYPKRILPLGVRLFPSAETPKTGDSLNKPRREARGLRHRLHRRKIRLHQIRELLIESELLKNKSELADASLIPWVLRVKGLDKPLENKELAKIIFHIVKRRGFKSNRKKIEDTDKDSGKMNSQIKNNIALMKEKGYRTYAEMVSKDEKFSNHIRNKGGEYVGSVSRDTLQKELELILNTQQKFGNEIVTNDFIKKCLDIFGKQKPFADKESILKMVGSCPFETDQKRAPRNSFTNESFVFWQRLNNISLINSKEYSASYAFNELERNSIYNFVLTQSEVSYKSIRKLLKLDTHIIFKSGDLTSKYGVNNLEKEATTKLKVFKGYNSIRKVFEKLDPELWDKAKIDSDYLDRVSFVLSVCKTDDELKKELSNEKFSDNEIEIILNIPTFDGFGHLSLKAINKMLPYLMKGLKYSEACEAVGYDFKLHLKNEQNTLPLIDHEEIRNPIVYRALTQSRKVINAIVATYGQPSFVHIELARELMRSRDERNKLSAMNEENRTRNEKLVKELLEYGLPDPRGKDIEKLKLWKEQNGKCAYKMRKIKIEDLISQDNMVEIDHILPFSRSLDDSMLNKVVVFSSENQNKRNQTPFEYLGGDEQSEKWQDYKTYIQNHTGLRQKKREYLLNTNFKNKDLKDFIERDLNDTKYIASYLKNFVEDNLKFGDIPINATRRVYTFTGKFTSYLRKHYGLNKDRDENSRHHALDAVMVAIASYGMLKRVSDFETVKETNENKGLKVFKKYPAPWGNGDAFRADIQARIFSDDPMEEIKKAKLEEHYKGAEEHIKPLFVSRMPRRGISGKAHAETIYSTKLYEKNHLLIHKISIFSLQKKNFENAGESNGIYGDDKELIRVLRERLEKYDWDTKKAFKEEIRKPSKNGQGNLIRTVKVMEKSNSIVPIHEGHGAAMQESMVRVDVFIKDKRYYLIPIYVADTVKKDLPNRAIVANEPYDKWISLDETYQFLFSFYSNDYVKIKLKDKELIQGYYVGTDIGRASIEIKTHDDSKNLRGKMSERPGTKTAEYIKKFNVDVLGNIYEVKNEKRHGFQIHNSKSESPSETQK

SEQ ID NO: 15838 - protein, 1088 aa, unidentified
  REGION 1..1088: note = Cas Enzyme sequence
VERKYVLGIDIGIASIGWATFNLDEHGNPVEFCHMGSFCYPNPISEIVKGRRVTSRTGRGAKRRQRHRLEHFKARRKKLTRLLVDLGWLPTDPDEQTALRCRKTRRVDGNVELEHPIALKVKALSAPLEPYQLGKILLHYQRHRGYLSTADLPVLLAFKGPKVAKVEVVKADVPLELETSEEKETRVLNASLKATREHLDGRTVSQFQLAELEKHQAVRAVKRPKVAKELPKDERDAVKRQQKPATPFRYDRWMYVKEFDRIWEVQRAHYPQMTEELWRTLRDLMFHQNPLKSTKGLVGKCQVLPDRRRCPRADLAFQRFNIAQYLANLEVNEGGHRRTLTQAEREAALPALVSVEQMSWPRLKEVCGIAADAVFSREPEEGLELAPKKKKGEKRPKKTARSVQAEVKGSPVGAFLAKTIGATGQDLVSGRHDGIIEDRLAEMHLDPLYQRLTKFHGLSHEQALAVIEYEPPKGYASYCRRVLRQVLPHLLSQTDRKGKDSHVDKALLAAGYGRVKPMAESPSRLKLDKKYNTGNPSVDAAVSWSVKVINQIMDHYEGPPSVIRIELPRIMALGNEARAEKWLEIQRNEKNNAAIRQELAAAKRDPSDRNVRLVKLWREAGNRCPYEPDRPIDSIASLVDNYEIDHIIPKSVFAEDAYGNNTICPTRLNQQKGGRTPYQAFGATDPIRWNRIQAYVKGLSGMDKRKRDRLLDENDPEMAMEKRMEPTVGYVGRKMAALLGTLGAQVTFVKGTMVATVRGLYGLNSLLEKPEKPLKRGMGVSEEYRDEKNREDLRHHALDAAVIALLDVSMAQRLTRYHKAKEAQKRGEGGAAAEGHRVKIQLEEPFPNLRRVLEEALKNCPVVSPPDRKVAGPLHEETRIAKSAFPAISGPPDTVREHGSLVVHFGPDGKPCAAWARGEIHHGFIFERRTKKGSERGVVSVSRFTVAQRQAFNERLKRRRKQGKDLDVPFRRIIDPAADLPPGATLVMSLSGKDLVIYKGEKGAGPGWYRIGTIAVGAKSTELVLLWHRAAMSAPKAPTSIRVTGQKELHNVVARVLLNVFGVEVFREPAADNEANRGDPDTGLFAPG

SEQ ID NO: 15839 - protein, 1020 aa, unidentified
  REGION 1..1020: note = Cas Enzyme sequence
MLPKMTYRLALDIGTTSIGWCLIRLSSDELPVAIIRAGVRIFSDGRNPKDGTSLAVTRRNARQMRRSRDRVLKRKQRMLESLVKLNFFPADSSQRHGLANLDPYALRKKGLYEALTGPEFARALFHINQRRGFLSNRKTDKKDNESGALKKAIRDLREKLTEENCQTLGEWLAKRHEARLSVRARLRGKTQKDKAYDFYADRAMVEDEFDLLWRIQSAFNPSLFTNAARDELKDVLLFQRNLKPVRPGRCTLLPDEERAPLALPSTQLFRVYQELNNLRLLGSNLTEAALTKVQRDKLAHLLERQGQVSFTAMIKALSLPGVTKFNLEDVKRDRLKGNITASILAKTQHFGDRWHAFDLLLQDKIVNKLLNEASESTLAAWLQENTSIDEASAERIANVSLPEGYGSLSRAALARILPELINDVVVYSEAVTRAGFDTHSALSHALQTGEVMEALPYYGDPLRRHVAFAKENPRNDEERYGKIANPTVHIGLNELRKVVNALIKRYGHPSEVIVEVTRDLKLGRERKREIELEQKERQDLNQKHVVEACAVLDLDPDNIDRSKRRELSQKMQLWAELNIKNAADRACPYTGEQIGIERLLSSEVEIEHILPYSMTLDDSMNNKTVAMRRANRDKGNQTPYQAFGERLLPGYDYEAILHRAALMPREKAKRFAPDGYQRWLKEDKDFLARALNDTAYLSRIAKEYLSLICPPNKVRAIPGRMTAMLRGKFGLNQLLSGSDKKTRNDHRHHAIDAAVIGVTDQGLLQRFSKASASARERQLDRLVEDMPLPWPTYHKHVARALDHIIISFRPDHGYQGGMMEDTAWGLRDDGVVVRHVRPEGGGPREQEVKNKNVVPISSTRNPERHGLDENGQPRPYKGYVGGSNYCIEIWCDEKGKWNGDIISTFQAYQVIRQYGVAQALKKLRNPNQSQSGMPLVMRLMINDMVRLDIGSELQTMRVVKISGNGQIYLCNHNEANVDARNRDIDDLFAYTSKSPGSLQKAQARHITVSEIGDVRDPGFK

SEQ ID NO: 15840 - protein, 1090 aa, unidentified
  REGION 1..1090: note = Cas Enzyme sequence
MNDFHYTLGLDVGISSIGWSVIKLRKDDKTVFAPELLVDTGVRIFPTAEVPKTGESLNLKRRNARGLRRRLRRKRIRLREIKKILIDAEILVDSKNLYSISQNDLTPWEIRVKALEEKVSNEELARAILHIAKHRGFKSNRKVDLKETAGKSEDQMANAAIAQNDIALREYRSVAEMVVKDSRFKSKKRNSPDNYKAVVLRKHLMDELQLVLITQLKLGNQKITSEVINKVITIASSQLPFGNKEQIKKLIGYCTYYPNEQRISKGTLSGTEFVLWDKINNTYYRTIGSQIDRAFTVEQKQKIAELAFTKNEVTYWDIRKLLELPSDILFSSVNYYKKKAIHQETEGEKSIRYENSSIEEIEKDKKSATFIQLKAYHELRRSLEKELPDLWHRMNSDHILFDTITEELVYNKDDESLKSALLNIQPELSDIEITKLIDIKVSPSLFKPLHVSRKAIHDLLPYFKQGQQYKEAEMNGIPEEIRKVTPTKAERLSSINLPEIRNPVVLRAVSQLRKLINAITREYGQPTYVNIEFARDMARNFSDRMKLHREHEDNRTKNENLINELRETYGVIDPKGFDILKLKLWRAQGGRCAYSMQTIDVRRLFSDEKYAEVDHILPFSRTLDDSKSNKVLVLSSENQQKRNMTPYEYIHSRNSKQWDEIVTWWKTLPELSSKRLEKLLTEHLDVTDRRRFIERDINDTRYIARAIKNYIEDNLLFKPADVIRRVYTFNGKFTSVLRARYGLNKDRDLNNRHHALDAILIGIADDSMLQKISDYSKGDENFQSITEKDKKRFPLPWDNFRDDVYIRVFDENPEQQLENLQIIKHYGEYRKFIRPLFVSWMVDKKVTGAAHEETVYSIKEVNGRDMLVVKKPVSSLKVSDLANIYGEDPALKMALIDHSNKYPDTKGKLAFAKDAPRIYKPSESGQANEIKSVKVICGPATNYVNIHKGKGVAPQSSMIRVDIFKKYGKHYFIPIYVHHTTGKELPNKVVSRQNIQVDDSFDFLFSVYPNEYLVLSDKGNVIAEGYYAKANSNNGQFTLRSHDYSKPEQTPTIQNRDSLRKFTVNLLGYKYEIKQEKRHGFSSRRHNETI

SEQ ID NO: 15841 - protein, 1050 aa, unidentified
  REGION 1..1050: note = Cas Enzyme sequence
MTNGYVLGLDLGISSIGWAVAPQSELGDIADIESMGSFCYPSPIAEVEKGRRISNRVGRGAKRRSRHRLDHFQARRKKLVRLLVHLGWWPNDKTTQENLRHAKLREEAGRITLVHPIALKVKGLEEPLSEHDLGKVMLHYQRHRGYLSTADLPVLLAHLRPKNTAAVIEVAEAPGLQTSEQKEALDFNKSMVFTQKKMQGRTVSQFQLDELENLRAVRARLSPTSLELRLMPKEQRDERSKKRTTRTSERYQRWMFIEEFDLLWAKQAETRPEMTEELMREIRSLVFHQAPLKEKSRDVGFCELLPKQRRCRTGELVFQRSRILQTLANLDVLENGEPRRLTSEERTKALTYLMVRDKSTLKALREAMELTNARFKAEPPEDEPEKGKAKKKKTASAAVTESIKGSAFGAKLAKILGVTGEALADGSMDDLVHDFISIPTADKLFARLTSTYGLEPDAATELMALEPPKGYGKLCARLLRRIEPKLKEGMDLHNAVIEAGYKWPHMQEAPEPAEKLVIDREWTTGNPSVDAAVRWSAKVVNQIIDRYGKPKVIRIELPRQMAMGNEARAQEFERINKRAKENEQYAKELEEAGIEPRMKYIKMVRLWNESDRRSPYAPSQEIASLKDLIEHYDLDHIVPQSHAAEDGMDNLVICPRSLNQEKGAKTPWEAFGHTTRWAEIEQFLAANRSISPRKKQRIMAKERPEMAMEARMLAATGYIGRQITSLLRTLGKEVAIELVNGQITAEARRRYGIDSVLDEEKSTKKGIGKNDKFSGEKDRSDLRHHAVDAAVIVAVNRSLAGRLRQYYKDLENWKKYRKVEGEAPTVTLEEPFANYRNRVLELLPGCPVVRPANRKISGPLHKETMLPLNEFKNVTGPPNTFQVIGQNVIRFGEEGEVTGAWVKSTVHHGLIFETLSGKRRVESVSLFEAAKRVSENNRARKRGEKPVPIVRPVERRFTGLERCVMSISNGDTVEYTGDKGAGPGFYRVGTIAVGNSTEISLIWCRDAKSDPKAPKSVRATGQADFKNIAARVVQNIFGEVIFREPGAADD

SEQ ID NO: 15842 - protein, 1058 aa, unidentified
  REGION 1..1058: note = Cas Enzyme sequence
MCGFSFGASFSLLAFRAHISIKYMFNYIIKFSKSTQIFQEAAMTKMRYRLALDLGSTSLGWAMVRLNESNEPNAVIKAGVRIFSDGRNPKDGSSLAVTRREARAMRRRRDRLLKRKARMMNYLTRYGFFPSNEDDRKKLEILDPYELRSRGLTKALTPGEFARALFHINQRRGFKSNRKTDKKENDSSALKNAIKGLKLAIQTDGCQTVGEWLYKRHTSGQTVRARYRQTPIKQENGKIKINKSYDLYIDRGMIEAEFDALWHVQSNYNPALFSELVRADLKDCLLHQRPLKPVRPGRCTLMPDEERAPLALPSVQQFRIYQEVNNLRILGEGLSEGPLTLDQRNNLVEALEANSKRTFTQIKRLLDLSGTVQFNFEDPKRQELKGNTTNAILSKTDHFGLEWFNFTLDRQDEIVEKLIDEENETRLIAWLQNEFNLPEDRAEKIANTSLPEGYGSLGVKALKRILPELKKSVITFDKAVISAGFEHHSNISHASTGEILPSLPYYGEYLQRHVGFGTGVPEDHPEKRFGKIANPTVHIGLNQIRVVVNSLLKRYGHPSEVIVELARDLKQSQLQRKEDNLRQAENQRRNERFKIDIASALNISTERVRSADIQKMIMWEELSHDIADRRCPYSGVQISVHMLLSDQVEIEHILPFSQTLDDGINNKTVAMRQANRVKGNRTPWEAKDDFLRQGWKYEEILSRAEKMPKNKRYRFGDDGYQHWLREDKTFLARALNDTRHLSRVAREYMSLICPQATRVIPGQMTAMLRSKFGLNDILGLKGEKNRNDHRHHAVDACVIAVTDQGMLQKFSRASASAREQNLTRLVENMPLPWETYREHVARAIAAIYVSHKPDHGHEGAMHNDTAYGLLGDGIVRTHKVVDGIRTREDSNLKVIEISSTKAMNRHGTLPDGFPRPYKGYKGDSNYCIEIFKTDDGKWVSEVISTFQAYQVVRHEGIERLKHSKLSLNGKVLIMRLMIGDTLRFDVDSQTKTMKIATISGSGQMFFSPLSEANVDARNRDKTDAFKYISKMAGSLKSANARQITISPIGEVRDKGFAG

SEQ ID NO: 15843 - protein, 1187 aa, unidentified
  REGION 1..1187: note = Cas Enzyme sequence
MTLKTSSADFLNDLVFGFDVGTGSIGFAVRKGSKFEDVGVLICPEDTNKLDKRRGSRSQRRRLRNRSRVHDWLANQLEDKFELPSPWTKIENGQIIIKPGLDYARISNPVLLRCEALQGRIEKPEELHAAISHLWKRRGKTEVPWKQGEAKQETPEQKEEKKIIAKKLNALAKEMAAGDGTKNPDGLPKVFEHPCQLLLHRQKLGIKQRDEVWPRDEFQNPAFNLKNEFLAIIKIAAGLKKEDGTQRFPKLSEVDADWILYGDTHKVINKGQERRVYFKTTECENPGVLGLRWPRFDNRNPGLDLLKPLDELDRPLHVVRRNKSVFRETQFEQALFNFRVIDIVSGKRVLPDSASLNRLRQIYDLAKRKSKTDDLKISESVIKNWAKEFADKYELVEDQSELVSRAGDGRAKFCSATLRDIKQVLEKLSAGQTIDAIQPLLRMPSESKEQAMARFLGDIRHGLVRHRLNLFLRLLHRLIKEHGKPDFIVVEAVRSLAFSEKKKDEHKKEQKKNRVDRDQVYQKLKDEENSTSKEAMLRYRLARDAGFECPFCRQSFDQADLFNGGVDISHLYPKSLTPCKEYYNLTIAHTKCNRTDMEAKIPREAFGSDPVWPDIEANARKRFFGKKLELFLAQTREDAEKLIESKAPLAATAYISKMIRRLCLIDMEWHGKDGRDPTNKEGNIPSQQFLVTNGEITARYRDTWHLNEILHHPVPTFTDEEWNNLTAEEKQAHNEARKKRFEKNRGDHRHHALDAMVISCTWPAYAQRVHNATKNWEDKGWWYFDKVKNQLMSRHPLFENFEPMKLAVTEWMNRLIAENRIQHHASKSKHRQSYKTSFFSRRPEKPNTGEHFYLMREKLLDVSPKDLRLRKVHPPEFSDYLYAAWDKYLENLYSYVEKAAAGFLKTFDAHTNVKFAARQFSNRLEWSDFRAWLKDKSKEPVLAKDEAENRITLNPKAIPEFKKNQAGEWTVKLPEPEKLIKTLPEDFQRQLCFSHYQKWSQERPSGFDFPEKVIIPIVRVRYRQPVNDNSVAVGPKTMPGWDGGRVYVKRDGYQEVRLMPYAKGAGVVPVLVPRWRKDKPFSEYEFIADAKPLLTIRKNQVVKLQNDYSPNYKAGDYLVEVLGEHQPTLNKPHIVNTKEARIANDFPATGFKPYWHKLIPALGFIFPKEIHAVENVGEGEEDEQDGT

SEQ ID NO: 15844 - protein, 1024 aa, unidentified
  REGION 1..1024: note = Cas Enzyme sequence
MKDYVLKNKPEPASNDKFLTGLVFGFDVGTGSIGYAVRKGADFKDVGVLICDSEGSDLSKRRDLRRQRRTLRSKRFRRQWFAKELVKLGLPKSETALDDPISLRLRALNGEELKPEELHAALTHLFKRRGYSKVPWANEAKIVKETAKSKKDDDEGIIKEAVKEMKAKLGDKHPCQFLAEEKARVGNSPTTNWARKIYWPREVLRAEFLAILKAQQNNFPQLAEKADWLLYGDSQAKEKNGETFHVFFKSTEARNPGVLGLRWPRFDNRGPALDSLQPVDGQGRPLHVVRKNKEAFGNAQWELALMNFRVLDVETRQKRDPRTDFPIFIENVRNEWNKKGKVTEARLKTLAKPFKDKFLLIKDQKPLTPDHGGGRARYSSPTLDLIHKEISEGRRVDPPQPILQRKGENAEQALNRYLADVKHPVVQHRLVLFRRLLMQLVSRYGQPDMIVLEAVRSLALGQKAKNELNQRNEKFRKERENAREQLSSNKESFSRKAIQRYRLWQEAKGRCPFCLQMIERTELGHGADIEHLVPRSIVDCNEFYNLTVAHIKCNRELKGDRTPFAAFSGTSQWPDIKDHAEKTFFGRKLEIFLSPDAEQLIEQKSDLQHTAYIARVIRHISLIQLGWLNDAGRDPTPEKQNPALSFQVTNGQLTSRLRKSWGLNQILHPLPPGKRWDELTDEEQTQFTEKNRGDLRHHSLDAMVIACTLPWLAHRTHGATDQFGHHGWWTQDEKQRSKAANPLFPNEGQMHDVVKKEIEKVIVRHHVSRSNHKRTYDTTIYGKKSSNVYVAREKLTDLKEKDFESVYPKIFGVYIAAAWERFTTETPGLPEMLKATKNKLPEMFARKLCFSHFQNWREKKPVAFDWPDKVRIPIRSVKYIGVHDDKAVAKASSGTHGYVARGGYKEVRIHKTTDGKGWVPVFVPYWKGDRLIHEQPFQAEKPVQTIRLGDLIELKNGYGPNNPPGTYRVVSTMQKQIQLMPPNIADTKEALKASGYLENGINLRWPAFFKAAGYELPHPPSVKP

SEQ ID NO: 15845 - protein, 1144 aa, unidentified
  REGION 1..1144: note = Cas Enzyme sequence
MDKHHRTAHKKKFNTLQAGHLSFASNEDYNARFQAIIFARSFCVMRGKMAFCVRFHPPVRVDLNRRTCSPRAKCIVKIRMDDIRLQFHPSGVRLPCPAIIPAVLSRLPLPCRLLVSLHNSTFKANMNRSILPKENLFKDGLVFGFDVGTGSIGYAVRKGSEFKDVGVLICDSEGSDLSKRRDLRRQRRTLRSKKFRRQWFAKELVKLGLPKSQTSLDDPIALRLRALNGEKLKPEEIHAALTHLFKRRGYSKVPWANAEKTAKETTKQKKDDDEGIIKEAVKEMKAKLGDKHPCQFLAEEKVRVGNSPTINWARKIYWPREVLRDEFIAIAEAQKKNFQKLAEKADWLLYGDSQSKEKNGETFHVFFKSTEARNPGVLGLRWPRFDNRGPALDSLQPVDEQGRPLHVVRKNKEAFGNAQWELALMNFRVLDVETRQKRDPRNDFPIFIENVRNEWNKKGKVTEARLKKLAEPFKEKFLLIEDQKPLTPDHGGGRARYSSTTLNLIHKEISEGRRVDPPQPILRRKGENAEQALNRYLADVKHPVVQHRLVLFRRLLMQLVSRYGQPDMIVLEAVRSLALGQKAKNELNQRNEKFRKERENAREQLLSNNESFSRKAIQRYRLWQEAKGRCPFCLQTIERTDLGHGADIEHLVPRAIVDCNEFYNLTVAHIKCNRELKGDRTPLTAFGGTSQWEGIKANAEFCFTGRKLEIFLSPDAEQLIEQKSDLQHTAYIARVIRHISLIQLGWLNDAGRDPTPEKQNPALSFQVTNGQLTSRLRKAWGLNQILHPLPPGKRWDELTDEEQNQFTEKNRGDLRHHSLDAMVIACTLPWLAHRTHGATDEFGRHGWWTQDEKQRSKAVNPLFPNEGQMHEVVKKEIEQVVVRHHVSRSNHQQAYATTLYAKKAKDTYVAREVFTSLTPKNLGSIWPETFASYCEAAWRRYSDESADLAGELKRTKNCVPESFTRKLCFSHFQKWRQDDCPEFYWPKEIKIPIRNVRLISVKDDIAVAPFSPGTHAYVKRTGYKEVQIFLAEDEKSFVPVFIPYWKNDKIVSEKSIKQNTKPIAIIRRGMVVETKKAFSAGQPAGKYRVLVTGQLQVKLLPHHVANKEEAIISFGLGKKGIQPMWADFIRVLGHELPHPPSVKP

SEQ ID NO: 15846 - protein, 1048 aa, unidentified
  REGION 1..1048: note = Cas Enzyme sequence
LKGTEVQEKTNYRLALDLGSTSLGWAVFRLNDAKEPTAIIRAGVRIFSDGRHPKDGSSLAVVRRQARAMRRRRDRLLQRKTQMLHRLVKFGFFPDDEKERKLLERLNPYELRAKGLDEVLTPAEFGRALFHLNQRRGFQSNRKTDRNADDSGALKQAISGLRSQMQATGMRTVGEWLWKQRMQEDVGGIKGKGVRARYREEKIQTETGKNRIDKSYDLYIDRVMVAQEFDALWRVQTQKNPSLFSQDAYEALRHTLLFQRPLKPIKSGRCTFFPDQERALLALPSMQRFRIYQEVNNLRILQDGLSEQALTLEQRNAVVDLLEHSGKVTFKTIVKTLGLPSNTQFNLEDAKRSELKGNATSAVLGKKNLLGAKWWALSEAMQEAVVLQLLTQESEDELLVWLQSELGMDEATAQQLANAKLPEGYGRLSRQAIDVILPQLYQAVVTYDKAVLAAGLGSHSDLGFDFPFTADEVVTLGERIHPSTGEITQRFAFKQLPYYGRVLQRFVSFGSGNPQDPEEKRFGKIANPTVHIGLNQVRVVVNALIRRYGLPQEVVIELARNLKQSSEQKQEAQREQADNQKRNERIRQAIAEVLDIAPDRVRTMDIQKWRLWEELNPQDALARLCPYSGVRINTQMLLSDEVEIEHILPFSQTLDDSMNNRTVSMRRANRVKGNRTPWQAREDFAVQGWAYTDIQARVQSMPARKRYRFAADGLQRWQGEDQGFLARALNDTRYLSLISVQYLRLVCPGTATRAIPGQMTALLRERFGLNSVLGLDGIKNRNDHRHHAVDACVIGVTDQGLLQRISQVSAQAREQGLSRLLQNMPLPWPTYRDHVQRAVQHIWVSHRPDHSYEAGLMEDTAYGIAKDGTIKQRRQADGSEGRIVSNVIRISAPQQAQRHGTDAAGQPLPYKGYIGGSNYCIEITADDKGKWQGHIVSTFDAYQIVRKHGVKQLRHPHRSQTGQPLVMRLNKGDVLRILHEECWMTLRIGQMKTAGTLMLVPIQEANFDARARAKEVSYVSKTAGSLQKAQAQAVRISPIGDLKVIPTS

SEQ ID NO: 15847 - protein, 1001 aa, unidentified
  REGION 1..1001: note = Cas Enzyme sequence
MTNTLNVLGLDLGPTSIGWALLHLECDEDGKILRDQEDFLINAKIKDIGVRIFPATTDDKTKAPKNQKRRASRLQRRLVARKAQRRNDIRSFLMEHGLLPELSAATSAARFDELGDPFELRVRALDEKLEPHQIGRAIYHLAKRRGFLSNRKSGTTKEDGVVLGGIKEVREAMEAGGHRTLAEYLVTLPKKRKHFTHRAMTEDEFETIWNVQYQFHPDILTNELHAKLKNAIFYQRPLKLQRGLIGKCTFETDKKRCDIARQAAQRMRYWQDINNLAWQDQQTLSWQTLTQEQKILLAEEFEQSKEVSYKKLRKLLKLSDDININLDKKLYGNKTAYAFRKAIPARWDALNEEEQDRLTEDLFRIQNENGLRRRLKEFWQFSDEDIKKLEDVWYQLEDGYSRLSLKAINKVLPKMKEGLRYDQAVLEVYGDHRKQFGGDESQKLPLPPKDLRNPIVFKALCELRKVVNAVIREYGRPDIIRIEMARDLKLTEKQKEKAIQQNRSNEKANQEAAAYISQRMGISPENVSGTDKFKYRLWKESNERCPYTGKLIPLSSLFDDGVVDIEHIIPYSRCYDDSYMNKTICDAKFNREVKLNRAPGEIFDTESEEHYQLMQRISCLPRGKQRKFTMTAEQLNTTDWVGRQLSDTRYICREARGYLLQLFPSSNDENAYVQVVAGGATANLRRVWGINAILSDGDIDVKNRWDHRHHALDALVVALCDRGLYQMISKLAGRNRDMMRYILKGIGEPWRGFLDDVNAAAEGIVVSHAPTRRVRGQLLEDTAYGATQTPGVYVVKKALASITLPAIKAIVDKGVKELVELRLSQYGGDLKKAFADTLYHKDGKTPIRNVRCFVAMSPDTVVGIKDAEGKEYKYYPLAGNHHVDIFENIDTGERKAVLVPRFYAAKRGWKPADLGSEWNKLFSLCANDYVEFRGDKGELRILRIQKMSGGGDTRVDMRPPEDARSDYIKGTSVALTTSNGLRKIVRKLQVDPLGRLREAKD

SEQ ID NO: 15848 - protein, 1035 aa, unidentified
  REGION 1..1035: note = Cas Enzyme sequence
EILLVIRSSVFSYLLNFDNLIFTDKKNQVDLGLFMTNTLNVLGLDLGPTSIGWALLHLECDEDGKILRDQEDFLINAKIKDIGVRIFPATTDDKTKAPKNQKRRASRLQRRLVARKAQRRNDIRSFLMEHGLLPELSAATSAARFDELGDPFELRVRALDEKLEPHQIGRAIYHLAKRRGFLSNRKSGTTKEDGVVLGGIKEVREAMEAGGHRTLAEYLVTLPKKRKHFTHRAMTEDEFETIWNVQYQFHPDILTNELHAKLKNAIFYQRPLKLQRGLIGKCTFETDKKRCDIARQAAQRMRYWQDINNLAWQDQQTLSWQTLTQEQKILLAEEFEQSKEVSYKKLRKLLKLSDDININLDKKLYGNKTAYAFRKAIPARWDALNEEEQDRLTEDLFRIQNENGLRRRLKEFWQFSDEDIKKLEDVWYQLEDGYSRLSLKAINKVLPKMKEGLRYDQAVLEVYGDHRKQFGGDESQKLPLPPKDLRNPIVFKALCELRKVVNAVIREYGRPDIIRIEMARDLKLTEKQKEKAIQQNRSNEKANQEAAAYISQRMGISPENVSGTDKFKYRLWKESNERCPYTGKLIPLSSLFDDGVVDIEHIIPYSRCYDDSYMNKTICDAKFNREVKLNRAPGEIFDTESEEHYQLMQRISCLPRGKQRKFTMTAEQLNTTDWVGRQLSDTRYICREARGYLLQLFPSSNDENAYVQVVAGGATANLRRVWGINAILSDGDIDVKNRWDHRHHALDALVVALCDRGLYQMISKLAGRNRDMMRYILKGIGEPWRGFLDDVNAAAEGIVVSHAPTRRVRGQLLEDTAYGATQTPGVYVVKKALASITLPAIKAIVDKGVKELVELRLSQYGGDLKKAFADTLYHKDGKTPIRNVRCFVAMSPDTVVGIKDAEGKEYKYYPLAGNHHVDIFENIDTGERKAVLVPRFYAAKRGWKPADLGSEWNKLFSLCANDYVEFRGDKGELRILRIQKMSGGGDTRVDMRPPEDARSDYIKGTSVALTTSNGLRKIVRKLQVDPLGRLREAKD

SEQ ID NO: 15849 - protein, 954 aa, unidentified
  REGION 1..954: note = Cas Enzyme sequence
RGFQSNRKIDKADSKKETEKAKEKLKLALEGQTLGQFLWAQHEKRETVRFRPIPLANNKNSYDLYPTRDMYADEFDKIQAVQGKHQKLSAAQWEKLKDKVIRQRPLKESKVGRCQLYFEKDCVDLKTGEVSAYLRCPVALPSAQLFRIVQEINNLKIRAGSFGAFAPLDQDKEKLQEKREMLLTLFCGKGEVSFEDIRKTLQLSEDVEFNLAAKRSKLKGDAVYATLKKYFGKEWLSFSIEEQDKIVLSLLDIEDERTLYKKAVHEWGMKEDKARALVDNISPLSFPDGYARFSQQALHDLLPLMRDGLRYDEACLKLGGSHSVRDSDGTADSLSYYGLAIPESVVEPHNPDTASEEERRGKIGNPTVHIGLRQLQKIVNEVIKTHGKPDIIRIEMARDLKMSKEDKDKFSKNQSQNERDNERIKKELTERGVWVGDKKGEKHLKYRLWEELNLSDVNDRKCPYTGKTISMDLLFSEEVEVEHILPFSRTLDDSRANKTVSFYVANREKGERSPYEAFSHKQPGRSVDGDYSYECILQRAENLPKNKRWRFSTDAMQKFSDENKFLDRQLNDTRYLSKVAKRYLSLVSKNVTVSPGRLTAMMRRAWGLNEVLGHNRKNRDDHRQHAIDAIVVALTDIGAVQKVMTLSGQGENLNKIKAEDLPVGFWEQIRDRIIGSEEKPGMVVSHRAEHGMGGALHEDSYYGVLYHPDFPPEMDRRTKWEKENGFNIVTRKELSGLSQNEVGQIRDPLIREKLEEILEGLPAIVKKKSGGKEKRIVDTDALKKALYQFGKNNQIRRVRILKKDASIKVIRHKQGEVEHIKGVSPGDIHHVSFWRMPDGKMESLGVSLFDANQKDHNAFRPHPAAKLLMKVHKGDLLRLEHKGEEKTARVMSLRPANGQMVLVEHFEGGDVVKRQKEEQIQIFLSFSKVIEAKARKIFVSPTGKTYDPKSLKVA

SEQ ID NO: 15850 - protein, 1013 aa, unidentified
  REGION 1..1013: note = Cas Enzyme sequence
MLHKMRYRLALDLGSTSLGWAMIRLNANNEPCAVIKAGVRIFSNGRNPKDGSSLAVTRREARAMRRRRDRLLKRKARMMRTLIEYGFFPNEESERKALETMNPFALRTKGLDAPLTPAEFGRALFHINQRRGFKSNRKTDKKDNDSGALKTAISTVRATIVAEGCRTVGEWLNKRDVAGQTVRARYRQNKIIKDDGKAKIEKYYDLYIDRAMIEHEFDALWAKQAEFNPVLFNEAARADLKDVLLHQRQLKPVKPGRCTFMPDEERAPLALPSTQRFRMYQEVNNLRILCEGLKEEPLTLKQRDDLITALEKNNKCTFTKIKRLLGVGGAVLFNFEDPKRQELKGNSTSAKLSEDKHFGSAWFKFDETKQDAIVLQLIKEENEAKLVRWLQNETGVDEKRAEAIANVGLPEGYGSLCTQALARILPELRHDVVTYDKAVLAAGFDHHSHINPSATGEILLELPYYGESLQRHVGFGSNDPKDSDEKRYGKIANPTVHIGLNQVRVVVNALIKRYGHPSEVIVEVARDLKQNKEQRDEESKQQAKNQERNKRIRKDIASVLQISEERVRRDDIEKMILWEELSFDPADRRCPYSGVQISATMLLSDEVEVEHILPFSQTLDDSLNNKTVALRHANRIKGNRTPWDAFGAQSTSGFDYSGILARAEHMPKGKRYRFAEDGYQRWLKDDSGFLSRALNDTRHMSKIAFEYMKLICPNTRVIPGRMTAMLRAKFGLNDVLGLNGEKNRNDHRHHAVDACVICVTDQGLLQRFAKASASTRERQLNRLVDEMPLPWQSYREHVQRAITAIWVSHKPDHSHEGAMHNDTAYGLLGNGKVSVHKMVEGKRERIEENLKVIEITNFKANDRHGVLPDGKPKPYKGYKGDSNYCIEIVRNEKGKWEGEVISTFDAYQLVREHGTARLRHPNLSVSGKPLVMRLIRDDFLRMEDEEGITTLRVCKMREGQIALADIVQANVDARTRTKEISYILKAASSLQKAKARRITISPIGELHDPGFKE

SEQ ID NO: 15851 - protein, 1052 aa, unidentified
  REGION 1..1052: note = Cas Enzyme sequence
LKSIIHQGDLFMSHKMKYRLALDLGTTSLGWAMLRLDKNNQPCAVIKAGVRIFSDGRNPKDGSSLAVTRREARATRRRRDRLLMRKASMMRTLIEHGFFPTDEAQRKALEKLNPYTLRAKGLDEALTPAEFARALFHINQRRGFKSNRKTDKKDNDSGALKTAIKKLRDTLDTENCRTVGEWLHKRDAAGQTVRARYRQEKELKEDGKPKINKYYDLYIDRAMIEHEFDELWKKQSELNPTLFNEKACADLKHVLLYQRPLKPVQAGRCTFMPEEERAPRALPSSQRFRIYQEVNNLRILREGLKETPLTLQQRVDLAAELETKNKLTFTKMKKLLGLGGNVQFNFEDPKRTELKGNTTSATLSKADHFGKAWFAFDEAKQDAIVMQLLKEENESKLIRWLQDETSIDEQRAEAIANVALPEGYGSLCEKALERILPELKREVVTYDKAALAAGFHHSQLNDNQAIEGRTFSVERVNTETGEIQTFHLFHELPYYGEALQRHVGFGTGKPEDKKDRPEKYYGKIANPTVHIGLNQVRMVVNALIKRHGHPNEIIVELARDLKQNREQRKEETKRQADNQKRNTRMRTDIANTLKISEERVSRDDIVKMILWEELSDNVADRRCPYSGVQISMAMLLSDEVEIEHILPFSQTLDDSLNNKTVAMRQANRIKGNRTPWDASNDFANQGWQYEEIIARAEKMPKSKRYRFGEDGYQRWLKDDKGFLARALNDTRYLSKIAFEYLKLICPDTRVIPGRMTAMLRGKFGLNDVLSLQGEKNRNDHRHHAVDACVIGVTDQGLLQRFAKASASAREQQLNRLVDNMPFPWGNYRDHVQRAVGRICVSHKPDHSHEGAMHNDTAYGLRENGKVVTHKIVEGVRVRDESNLKVIEMTSAEKMTAEKAISRHGENTDGQPKPYKGYKGDSNYCIEIVRNDKGKWDGEVVSTFDAYQIVKQQGVKRLRHPSLSISDKPLVMRLTRNDCIRLSDNSNTRTLRVCKIRKGQIAFAEVYEANVDARTRTKELAYLLKSASSLQKSKARRITVSPVGELRDPGFRA

SEQ ID NO: 15852 - protein, 1054 aa, unidentified
  REGION 1..1054: note = Cas Enzyme sequence
MRYRLALDLGSTSLGWAMIRLNADNQPCAVIKAGVRIFSDGRNPKDGSSLAVTRREARAMRRRRDRLLKRKARMLRTLIEYGFFPAEEVQRKALETLNPYVLRAKGLDEALSPAEFGRALFHINQRRGFKSNRKTDKKDNDSGALKTAISKLRETLKTENYRTVGEWLYKRDLAGKPVRARYHQDKEIKEDGKTRINKYYDLYIDRAMIEHEFDELWRNQAELNPSQFNEKARDDLKDVLLHQRPLKPVKPGRCTLMPDEERAPLALPTTQRFRMYQEVNNLRILRNGLKEEPLTLQQRDTLITALEENNKCTFTKIKKLLGVGGAVKFNFEDPKHEELKGNTTSAILGKNEHFGPAWFKLNETEQDAIVMQLLTEENEGKLVHWLQNETGVDEQHAEAIANAGLPEGYGSLCAKALALILPELRKDVVTYDKAVQAAGFEHHSKLTTNSEIPGVTVKVEIIDQDTGEIKAFHIHKELPYYGEYLQRHVGFGSGKPEDSPEKRYGKIANPTVHIGLNQTRLVVNSLIKRYGHPSEVIVEVARDLKQSREQRKEEQERQAKNQKRNERLRKEAAGILNISEEQVHRDDIEKMILWEELSDDIADRKCPYSGTPISATMVLSDEVEIEHILPFSQTLDDSLNNKTVAMRKANRVKGNRTPWDARQDFANQGWNFEDIVARAGNMRKEKRYRFAEDGYQRWLKDDKGFLARALNDTRHLSKVAREYLNLICPNTRVIPGRMTAMLRGKFGLNDVLGLHGEKNRNDHRHHAVDACVIAVTDQGLLQRFAKASASAREQQLNRLVENMPLPWESYREHVQRAIENIWISHRPDHAYQGGIFDATIYGLRGEGKATYRQEIDGQRQRPILNRDVVSFTDDKAKSLNGYRHGLLENGSPKPYMGLWSRSNYCIEIIRTENAGWTAEVIERYRAYQIVAQFGEARLHHPTLSISEQPLVMRLLIGDYVRAEVDGITQLMCVLKINSTGAITFVLHNESNISARYTAKLAAQKGRKAGKPFNLSALEDNFFQKSISPDSLRGFRARRVTISPIGELRDPGFKE

SEQ ID NO: 15853 - protein, 1058 aa, unidentified
  REGION 1..1058: note = Cas Enzyme sequence
MQNRMRYRLALDLGSTSLGWAMIRLNADNQPCAVIKAGVRIFSDGRNPKDGSSLAVTRREARAMRRRRDRLLKRKARMLRTLIEYGFFPAEEVQRKALETLNPYVLRAKGLDEALSPAEFGRALFHINQRRGFKSNRKTDKKDNDSGALKTAISKLRETLKTENYRTVGEWLYKRDLAGKPVRARYHQDKEIKEDGKTRINKYYDLYIDRAMIEHEFDELWRNQAELNPSQFNEKARDDLKDVLLHQRPLKPVKPGRCTLMPDEERAPLALPTTQRFRMYQEVNNLRILRNGLKEEPLTLQQRDTLITALEENNKCTFTKIKKLLGVGGAVKFNFEDPKHEELKGNTTSAILGKNEHFGPAWFKLNETEQDAIVMQLLTEENEGKLVHWLQNETGVDEQHAEAIANAGLPEGYGSLCAKALALILPELRKDVVTYDKAVQAAGFEHHSKLTTNSEIPGVTVKVEIIDQDTGEIKAFHIHKELPYYGEYLQRHVGFGSGKPEDSPEKRYGKIANPTVHIGLNQTRLVVNSLIKRYGHPSEVIVEVARDLKQSREQRKEEQERQAKNQKRNERLRKEAAGILNISEEQVHRDDIEKMILWEELSDDIADRKCPYSGTPISATMVLSDEVEIEHILPFSQTLDDSLNNKTVAMRKANRVKGNRTPWDARQDFANQGWNFEDIVARAGNMRKEKRYRFAEDGYQRWLKDDKGFLARALNDTRHLSKVAREYLNLICPNTRVIPGRMTAMLRGKFGLNDVLGLHGEKNRNDHRHHAVDACVIAVTDQGLLQRFAKASASAREQQLNRLVENMPLPWESYREHVQRAIENIWISHRPDHAYQGGIFDATIYGLRGEGKATYRQEIDGQRQRPILNRDVVSFTDDKAKSLNGYRHGLLENGSPKPYMGLWSRSNYCIEIIRTENAGWTAEVIERYRAYQIVAQFGEARLHHPTLSISEQPLVMRLLIGDYVRAEVDGITQLMCVLKINSTGAITFVLHNESNISARYTAKLAAQKGRKAGKPFNLSALEDNFFQKSISPDSLRGFRARRVTISPIGELRDPGFKE

SEQ ID NO: 15854 - protein, 1166 aa, unidentified
  REGION 1..1166: note = Cas Enzyme sequence
MPKYYRYNLGIDLGIASIGTALVLTDEAGNPTKPLDLGVRTFSVPEGAATRRAKRLERKHIRRRRQRITKLRLFLQQHGLLPQDAAQLPSLMRKPPYILRAQGTSAAYQTLYDLGRSLLHMAKFRGAGFLTQSEETADDGLADETEKKKDRQKTANVYRNLEKIINDSGKTLSHFFAQRLEDKRPVRRREHHVKTLAVDYAVPRFLVKDEFRKIWAKQSQHHKNLTPELEQEIYTLIFGDHPHAPYATGNCTLIPAQKRLPKMHRLAEQRRIYEQLANVRYITAKGEYALSREMRDHLALLAFGEGNNLTTAAIKKYIAQTAGQTVVRVNLGDDDKTIRGFCQIRAFADIPTWQTLSQQERDNIIDFIANPSVKPEEENSVLLPEDEMIAEVCKRLGLAAANKEKTVSIALARLTPDRSKLGIKATQRILEKLIEGQQVETADPITGEVTSAWRPHTHRTAADACGFESEEQALSKKYGTFSQLPYYGEVLRQDVTPIHPWHTKQAAQEEAAHGRIPNPVVHTALNQLRKVVNEIVGLYGKPQRIHIELARELGMSAVKREELQRDMQKRERENATIDEALAKLGLSPTRTNRTKYRLWEEQGKRSLFSYTEIKQSDIAACEIEHLIPQSHGGSDSYMNLALVHSNENFAKGNSFPYQFIQKTAPDAWQHIAKVIADKSYPKAKAWRFSADACNRFEEQGDENATDSRLSNTSYMARIAARYLRMLCADVVAVKGGTTAKLRHLWGLDGIEYELLGLPIRKHQYDPVTGEVQLNNFGYPVRNPLWVAKPRIDHRHHAVDALVAACTTRSMVSRMVRDEKTTWRKKDGGPDFPSPFGSDTGWFRQQMLEALKKVVVSPKKEHGKAGELHEDTKCRILQQDTRNGSDKMLIRYRRAMDKLKDKKSVAGILPGATIPNDLPAVQTAHAQCKAIIYAIESRYIAASDNLEARRQQAIKAGGRLRDLTPQAREASIVAEAIAMAQQAGAIGATYPALKFKTLVAVNDALQFGFEPKNNYCMDFYETPNGKVGWECITRIDANTPAFVPEWKSNGGRFIWNLCIDDVIEVELTPELKANIKAPCPVGNCYMVVQKMSGGRLQCNLLNDARPLDGKISTVKSGTAAIEEYKRWKSGELGLDKWCQLKARKVDISPFGKILHKHKKLWHGKKTQ

SEQ ID NO: 15855 - protein, 1320 aa, unidentified
  REGION 1..1320: note = Cas Enzyme sequence
MKDYTLTPSLESKSELQENLRILALDLGIGSYGIALQERTGHGDNRRFHFPVVRSCTLPPDWAELKDERTRRRMWRTRLAHKEREGWLRQVFERCGLQAAVLRGRQLKKIAVEEISPTGVKTTKLRWTQDADSPPHYRLEREFPPQPGQRTRDGAPSDEPGSRTVYSGAALRCLLLLGEKAQEAAQGRVLEPWQIYKALHSAIQKRGYDPHVPWARTPTVKPSDSADPTRTKIRKGKKAETANESGDGVPVLSEAEAKEKKEEQASQERALTMKGIVEGLSPLARFHHPCFWEAYRMGLWDTKAPESVLPRQTYHARSCKWADQEDPANKFKNANERDPYARLPAIFPRQMVEAELIALCEAAARQLPALSVSAYEIAYGPTEMAYPNIRRRDPAKQEEETERRKALQALPDDQRKKFVRGKAAEWQGALSQKAPTFDNRGPAPCALIPRFNVAKCDLRFDAQGVPVSDSTLAAEVTFLLQLKNFRFVPEVLDPSKPGGVRDSFNPQELKQLYEDHFTATVLTRMTAGTKGGAMTEKMLCAWMSEHIGPKTTAKPGQEGKGKEIIDMPKATGRARFSRPALRLVKELLLSGLSPAEFKAALLDLNNATWQDLRKAVKLVLEPRNGTSLVPPDAAKDSPVFNTDPMRGMVVSDLDFLDNIGTSWDKISIRDERLEAISEMTHAEKDVRQNAITRMISMEINPKIRHRLTLLDHILDEIIADGNLPNRVVLEFAREEWLGPKRRKELEAFQKERRDQNIIAKMNLGGEVTHKAILKHQLCGEQGGRCLFCGKNFSNPETTSVIHGELSFENAHIAHIVADSKGGPRAYVNLVLACDGCNRAQENRYHADAFTQNCFPRGWDSFVTDVEKCTAMRPFKKKLLCTKSADEAALMVQNKTALQETAWIAKLARVLICLKFGWKLDSEGEQRHVVVVTGSVTNRVATKYGLYSLLGGPERVKKLADERVMIEAAMLETETGTDDDFEKLCDGAPSAWKLKKRKGEDHWDRESIFKELRKLQIKNEDAINEKDRKDKRHHALDAMVLSFLTHWAGNPGKSLYFGLPPGKNWKEEFRHYLDILYPEILIPEPPELEQSFYGSRRIGMLSVATKRFVLREIAYSGQPLAYSATALEKAVESITDTLIRGKVLAFVNTNPKEAEWLAFCAQMEREGLRKGGPRLLKVRRAVSKNLDEFADFSKDGTGAWRKGASNVGWFICKMRTEPVRYAVETVYVHQSKEVRAAEIAAHPDYCGVVGYFIKGEWIETSLPIKGLKMPLPEGTYLIRSMRTRNQQTEGMMELKSIQGTEYKPISVTRLMEAGMKKVKTH

SEQ ID NO: 15856 - protein, 1078 aa, unidentified
  REGION 1..1078: note = Cas Enzyme sequence
MAYRLGLDLGTNSAGWWAVTLDGDGRPNGSLAAGVRIFTDGRNPKDGTSLAVQRRGPRGMRRRRDRYLRRRKELMHALIALGLTPPDETERHALAALDPYALRAKALREPLAPYELGRALFHLDQRRGFRSNRKTDSGEDNKLTEKIGELKRRIEESGAKTLGDYLYHRRLKDKMVRARPEAGFYPDRQLYEAEFAAIREAQKPHQNLRLEQWDQLADIIFFQRPLKPVDPGWCLLEDGERRAHRALPCAQEFRMVQEANNLRISVAGEPARPLDRTERDKVLKELRAKKELKLEGLWKLLKLPTGTPVNLLDEHRKALKGDETAERLSRKDLFGKTWRELSFARRTEIARKLIETAEPEEIEQLAQADWGLDAAAAGKLSTTALPEGYARLSEKAIGNLLPVMEEQGLNYAEAVAQIPEYGHHSDFRPGSALDRLPYYGEVLERHCVGGDPTKPKLDEVAHYGRIANPTVHIGLNQLRRVVNKLVEAYGKPEEIVVELARELKMSKEDKDAERQKIKDNGAANKRRIGLIEGARGVPSPELLRKLRLWEEQTFGTAQVCPFTGAPISFEMAISDATEIEHILPFSKTLDDSMANKVVCLREVNRVKRDRSPFEAFQSNPTAGKHRCVYDEILLRADKLPANKRWRFHPDAMERFADEKGFLDRQLNETKYLSRIARNYLAHLYNEKAEGRLRVRAIPGKLTAMLRGKWGLNALLGDHNRAGDAENGPARKNRDDHRHHALDAFVIAMTDQGLLKRISDLNSNQDRTRLIEAVPDPWPGFSRGDLRAHLDKLIVSHKPDHGTPGQNGKTTGALHNDTAYGLVAPGKNGAWQVVSRAALASLSSPKDMDAGLAMIRDAALRKALIAAWEDFKSRAPDDKDSHGTSEPRKKKNPAGLFADRVATEGVALNGRRAKVRRVRMVEELTVVPINSRKTGLPYKAYRPDANEFAEVWQMPDGEWRTMIVRRFDANQPGFDLSVRRPHPAAKKLMRLQIDDVGAIYNGADRRIVRVCKMSTESGTTYTYLAGHREANVDARVRAKEIKYLKESATGLRKKQFRKVGVDEIGRLTDPGPRAGKSNR

SEQ ID NO: 15857 - protein, 1078 aa, unidentified
  REGION 1..1078: note = Cas Enzyme sequence
MAYRLGLDLGTNSAGWWAVTLDGDGRPNGSLAAGVRIFTDGRNPKDGTSLAVQRRGPRGMRRRRDRYLRRRKELMHALIALGLTPPDETERHALAALDPYALRAKALREPLAPYELGRALFHLDQRRGFRSNRKTDSGEDNKLTEKIGELKRRIEESGAKTLGDYLYHRRLKDKMVRARPEAGFYPDRQLYEAEFAAIREAQKPHQNLRLEQWDQLADIIFFQRPLKPVDPGWCLLEDGERRAHRALPCAQEFRMVQEANNLRISVAGEPARPLDRTERDKVLKELRAKKELKLEGLWKLLKLPTGTPVNLLDEHRKALKGDETAERLSRKDLFGKTWRELSFARRTEIARKLIETAEPEEIEQLAQADWGLDAAAAGKLSTTALPEGYARLSEKAIGNLLPVMEEQGLNYAEAVAQIPEYGHHSDFRPGSALDRLPYYGEVLERHCVGGDPTKPKLDEVAHYGRIANPTVHIGLNQLRRVVNKLVEAYGKPEEIVVELARELKMSKEDKDAERQKIKDNGAANKRRIGLIEGARGVPSPELLRKLRLWEEQTFGTAQVCPFTGAPISFEMAISDATEIEHILPFSKTLDDSMANKVVCLREVNRVKRDRSPFEAFQSNPTAGKHRCVYDEILLRADKLPANKRWRFHPDAMERFADEKGFLDRQLNETKYLSRIARNYLAHLYNEKAEGRLRVRAIPGKLTAMLRGKWGLNALLGDHNRAGDAENGPARKNRDDHRHHALDAFVIAMTDQGLLKRISDLNSNQDRTRLIEAVPDPWPGFSRGDLRAHLDKLIVSHKPDHGTPGQNGKTTGALHNDTAYGLVAPGKNGTWQVVSRAALASLSSPKDMDAGLAMIRDAALRKALIAAWEDFKSRAPDDKDSHGTSEPRKKKNPAGLFADRVATEGVALNGRRAKVRRVRMVEELTVVPINSRKTGLPYKAYRPDANEFAEVWQMPDGEWRTMIVRRFDANQPGFDLSVRRPHPAAKKLMRLQIDDVGAIYNGADRRIVRVCKMSTESGTTYTYLAGHREANVDARVRAKEIKYLKESATGLRKKQFRKVGVDEIGRLTDPGPRAGKSNR

SEQ ID NO: 15858 - protein, 1080 aa, unidentified
  REGION 1..1080: note = Cas Enzyme sequence
MRYRLGLDLGTNSIGWWMVKLDQEGRACGSLGGGVRIFSDGRNPKDGTSLAVQRRVPRGMRRRRDRFIGRRSDLMNHLIAFGLMPGDEGERKALEALDPYELRAVALDRALTPHELGRALFHLNQRRGFKSNRKTDSDDNETGVVKERIGELRTRIEKSGARTLGEFLHKRRLKGRMVRARPEAGFYPERAMYEDEFDLIRQQQNSHHSLTAEQWDTLKDIIFFQRPLKPVDPGWCLFEAGEKRAHRALPLTQEFRMVQEANNLRVTSPGSPARRLTLEERDKVLGHLRKKKELKLDTMLKLLKLPSGSTVNLFDDHRSTIKGEETAARLAHKEIFGDAWFNLSAEERTGIVRTLLDTEKPEEIERIAQRQWGLSEAAAKKLAGKSLPEGYSRLSEKAIAKLLPIMEDQGLNYAEAVEQVPEYGHHSDFRPDEARDALPYYGEVLARHCVGADPSAPKIDEVAHWGRLANPTVHIGLNQIRRLVNRLIEVHGKPEEIVIELARELKMSKEGKDKERKKNSENEAANRRREEQIRAAGTAPSPHLLRKLRLWEEQKVGTANLCPFTGQPISFEMAISAATEIEHILPFSKTLDDSMANKVLCLIEANRAKRDRSPYDAFHTDPTLAGRKYVYDDILFRADNLPANKRWRFYPDAMDRFNNDERDFLDRQLNETKYLSRIARSYLSNLYNEKEEGRMRVRAIPGKLTAMLRGKWGLSALLPGHNLSGGEEAPRKNRNDHRHHAIDAFVVANTTQGLLKRLADLNDDADRQRLVDAVPDPWDNFDREELRQQLARLTVSHKADHGTPGSKGKTTGALHNDTAYGIVGPGKNGNTIVVSRTPLSRFTTPKDMDKGLEGIRDAALREALTTAWNTFKAAPPEASNSDDKDSRRKPKNPAMAFAEMVATKGIEIGGRKVTVRRVRMCEELGVVPIKDRKTGKPYKAYKPDGNAFNEVYELPNGNWISVVIRRFDANQPDFSSADFRPHPAARKVMRLHIDDLVAVDDGGQRRVLRVVKLSGQKITLADHFEAGALKSRDADKEDPFKYLEKSANVLKSMGLRKVGIDEIGRLTDPGPQQAKSGGKA

SEQ ID NO: 15859 - protein, 1083 aa, unidentified
  REGION 1..1083: note = Cas Enzyme sequence
MRYRLGLDLGTNSIGWWMVQLDSDGHACGSLGGGVRIFSDGRNPKDGTSLAVQRRVPRGMRRRRDRYLGRRSDLMNHLIAFGLMPGDEAGRKALEALDPYALRAAALDRPLLPHELGRALFHLNQRRGFKSNRKTDSGDDDKETGVVKERIGELRRLIDKSGARTLGEFLHKRHRKGRMVRARPEAGFYPERAMYEDEFRLIREQQQTHQTLTDEQWEALQDIVFFQRPLKPVDPGWCLFEAGEKRAHRALPLTQEFRMVQEANNLRVTSPGEPARRLTMEERDKILGHLRKKKELKLDSMLKLLKLPSGSSVNLFDDHRTTIKGEETAARLSHKDIFGEAWFSFSFEKRTEIVRTLLDIEKPEEIERIALAEWGLSEAAAKKLAGKSLPEGYSRLSEKAIAKLLPIMEDQGLNYAEAVQEVPDYAHHSDFRPDEARDALPYYGEVLARHCVGADPSKPKEDEVAHWGRLANPTVHIGLNQIRRVVNRLIEVYGKPEEIVIELARDLKMNKEEKDKARKANSENEAANRRREEQLRSAGTAPSPHLLRKLRLWEEQKVGTAHLCPFTGDPISFEMAISEATEIEHILPFSKTLDDSMANKVVCLREANRAKRDRAPHDAFHTDPAIGGRKYVYNDILFRADNLPANKRWRFHPDAMDRFENEERDFLDRQLNETKYLSRIARSYLANLYNEKAEGRMRVRAIPGKLTAMLRGKWGLAALLPGHNMAGGEDAPRKNRNDHRHHALDAFVIANTTQGLLKRVAELNADADRKRLVDAVPDPWEGFDREELRTQLARLTVAHKADHGTPGHKGKTTGALHNDTAYGIVGPGKNGNTIVVSRTPLSRFANPKDMDRGLTAIRDKALREALTAAWEAFKAAPPELSNPDDEDSRRKPKNPAMAFAEMAATQGIELGGRRVKVRRARMCEELGVVPIKDRKTGKAYKAYKPDGNAFNEVYELPNGNWVSVVIRRFDANQAGFNSGDFRPHPAARKVMRLHIDDMVAVDDGGQRRVLRVVKLSGQKITLADHFEGGALKTRDADKEDPFKYLEKSANVLKGMGLRKVGVNEIGRLIDHGAPRIEPSGNAG

SEQ ID NO: 15860 - protein, 1090 aa, unidentified
  REGION 1..1090: note = Cas Enzyme sequence
MTERQHAPYRLGLDLGTNSIGWAAIRLNDDNDPCGILDMGVRVFPDGRDAKSKESNAVTRRMARGARRRRDRYQKRRADLLRRLTDYGLMPADRGERRTLAARHDPYELRARALDDPLSPYELGRTLFHLNQRRGFKSNRKADQDSGESGVIKEASEALEDQMAESDARTLGEFLNHQRCEGQPTRFRNLSTGATAKYEFYPTRQMLLDEFDQIRTAQAPYHDVMPEQWDTLRDQVIFFQRPLKPVDPGWCQFEEGEQRAARALPVAQEFRLLQEVNNLRIRVGIDPERRLNADERARALERLRSGKDINLAKPTRDLKLPSQTAFNLSRGGRSIVKRDETTDRLTSKKERGKPRQDLFGARWRDLSLDQRNQIVRFMLDTDEPADVQHQALADWGLNEAQAKAVAAVGLPDGYSNLSEKAIRKLLPHLEQGLIFSDAVQAAGYKHHSDFRSGKALDCLPYYGKVLERDAIGADPTKDPKIHGEPARYGRFPNPTVHIGLNQIRRVVNRLIQVYGKPDDIVVELARDLKANREQRQQWLQRQRKGRESNERYEEMLTSAEADNTPEVRRKLRLWEEQGPAQAHVCPYTGRPISFAMAVDSRTEIDHILPFSRTLDDSPANKVVCLAGANKDKGDRSPYEAFRDNPPGYDYDEILVRAAALPDNKRWRFEPDAMQQFESEDRFLDRQLNETRYLSRTACKYLAHLYDGMTESRRRVRAIPGYMTWVLRRSWGLETLLWRADESTGVIRKQRDDHRHHAIDAFVVANTTQGLLHRFASASATSARYDEAEINLTAVAGRVRPWETFRCEDLRPFLDRLVVSYKLDHGTRGQPGRTTGQLHNETAYGLIERLENGSSKVVVRKLLRSIKRSDLTPVPDGNPRKGVRDLALRAALLELWDKVGGKAAEFAQQASNEGVLLNGRHQLVRRVRVLDEQRVIPIRDSHGTAYKGYLPGGNEFADVWRMRDGSWQTIIVPKFEANQQEFDIERFRPADKKTGRADPAAKRLMRLRIDDMGALGEGPNRRIVRVRKMWTARNGGLVVLDGHTESNVDARVRAKELREEKHSARQLKTLGFRKVHVDEIGRVLDPGPSTK

SEQ ID NO: 15861 - protein, 1090 aa, unidentified; identical to SEQ ID NO: 15860
  REGION 1..1090: note = Cas Enzyme sequence

SEQ ID NO: 15862 - protein, 1072 aa, unidentified
  REGION 1..1072: note = Cas Enzyme sequence
MQTYRLGIDLGVNSLGWCALTLDRDGNPNGILDIGVRLFTDGRAPKTGTSLAADRRIARQMRRRRDRYLKRRTRLMTLLVRHGLMPADPDERKKLEALDPYELRARGLDERLEPFAFGRALFHLNQRRGFKSSRKTDKGDDKERGKIDAGARKLKEALVESGLRTLGEYLYKRHVAREAVRVRPIGKGAKAEYPFYPLRALVEDEFERLWSKQAEFHPDLLTADAKAAIKEAIFFQRPLRPVDPGRCTLDPTDERAPWALPLAQRFRMLQEINHLEIIGRDLKPRKLTLAQRDKIYAKLRTARTDPTFDQIRRLLGLDSDQRFNLENERRTALKGDAVGRALSDKSRFGKAWWTYSDSEQDEIVETILAADDEEELAAIARRDWRLDDDHARAVARVGLPHGYCRLGRKALSRIVDELVAGFVEVTDPATGEVYRAPLTYDQAVRRAGYHHADFRGDGAAPELDYYGKPLQRHMIGATGAPDDPDEKRYGRFPNPTVHIGLNELRRVVNALIRQYGKPAEIAIELARDLKLSREERRRVEEKIKENTERNEALRKELVALGQKVNRENLQRLKLYHELPPQQRCCIYTGKPISVEMLFSDEVVIDHILPFKDTLDDSLANKVLCLRSANHDKGKRTPYDAFRHHPGYDWTGILLRTELLPKNKRWRFAEDALQRFADNADFIARHLTDTAYVARVAKEYLGQICPSDRVWAIPGKLTSLLRGKWGLNGILSDSNLKNRADHRHHAIDAFVVACTDRALLQRMSTAAGEARLDRTLEDLPDPWDGFDRDAFRDRIRSVVVSLKPDYGRQGRLHEATAYGLVADPAKEDGATVVYRKSFADLNENEIARIRDRDLRARVQAHVAAAAKGTKLSQAQLSQALAAFAANDEKYRGIRHVRLLKTEDPSTLIRLKDRQGRLYKALIPGENWCVDVYEQCKGKRAGKWIGVPVTMFEANQPQFAEERLNRLRRNGTLDAGARKIMRLHKGDYLRLEIDGEPRVMRIVRLEVENQRLRLAEHKESGNLEERHKDPDDPFRWTFVSFDQLRKRNARRVSVDLLGRVSDPGSPQLRRAAGA

SEQ ID NO: 15863 - protein, 1035 aa, unidentified
  REGION 1..1035: note = Cas Enzyme sequence
MGKRVGLDIGANSIGWIVYDLDDAGRPTAISDIGVRIFDDGRNPKDKTSKAHARRIARGARRRRDRYLKRRERLMAALVRHGLMPADLDERKALEDLDPYELRARGLDGALTPYEFGRAIFHLNQRRGFQSNRKADAEDDESGKVKEGGARLRDLMAEAGARTVGEFFAMRHADRGWVRARLVGEGAKAEYVFYPQRAMIAEEFDALWAAQTAHHPELLDEDARADIRDTLLFQRPLRPVRPGKCLFFPEEERAPWALPRAQRYRIYQEVNNLRLGRAGETQRALTIEERDKIARALLRTQKRTFDQLRKLLGLDSDFRFNLESERRKHLDGDKTATVLRAKKRFGKAWDDLDLDSQTVIVERLLAETDEEALVAWLIEEWNLDETAARRVSGASLPDGHATVGRTALTRIEAALERAVIPMSDAVVAAGLPHHSDFRTGEVMDSLPYYGRELDRLVAFGSGVPEDDEQDRFGRIANPTVHIGLNQLRRVVNALIARHGHPDQIVVELARQFGVGAKGRSEIERNQTENQKKNDARRARLADLGYPDNGENRMRLRLWEELDLKDEMARACVYTGEVISIHRLFGDEVDIDHILPFSMTLDNSVANRIVCLSRANRQKRNQTPFEAWGDGPEWADIAVRADRLPANKRWRFAPDAMERFDRENRGFLDRHLQDTQYLSRIAREYLTRVCHPDRVWVIPGRLTALLRGVWGLNSLLSDHNLKTRVDHRHHAIDAAVVGVTDKALLQRIATNAARLEDKFDDRLLEGVPVPWEGFRDDLGAALGRIVVSHRADHGAGGRLHEDTAYGLVRDPEAEGGHNLVHRKPLADLNDNEVERIRDPDLRAALSEYLAAATRDGEDRKAALKSFAERNADRWPGLRRVRLLKKDDPVVPIRDRAGKVYKAVVPGENFALDIWSLPGGGWTGTAITVFDANQKGASGPERPHPAARRVMRVFKGDLMALDMADGPEVFRAVRLEPSANRIRLVGQYESGNLTQRHADPDDPFRWVFASYAKLREWRARKVTVSPDGVLNDPGFRP

SEQ ID NO: 15864 - protein, 1041 aa, unidentified
  REGION 1..1041: note = Cas Enzyme sequence
MERTHYRLGLDIGANSIGWCCLSLDEDRRPCAVLAAGVRVFPDSRDPQTLASLAAERRAARAARRRRDRYLRRRRALANALVRHGLMPESGSVSGSDPWPLRQAALVRPLSPHELGRVIFHLNQRRGFASNRRTDGSNEEERGKIRDAADRLRGELSRAGAPTLGAWLAERHAARKPVRARLRGEGAQAHYDFYPTRELVLAEFDAIWAAQAAWNERLTDAIRDEIRRILFHQRPLKPPVVGKCWLEPEEDRAPRALPTVQRFRIAQELAHLRITIPGFPDRPLSDTERALLLARLNAGCDISFEQVRRALGLPGEARFNLESLNREKLEGAATARRLAIGTKKRPAPLAEVWDSLDDATRDQIATVLVEVETEDEAFARLLALGLPEEAARRTAGIVLEDGRASLSLTAIRRLLPFLEQGLRYDEAVRAAGYAHHSDDRTGELLPELPYYGEVLKERLGTGTNDPKDPEEKRLGRAPNPTVHVALNELRRVVNALIARFGRPAEIVVEVLRELGHSAVQRREIEKAQKENRERNERAKRAIESLGLKVTGGAIRRYRLWEDQAQDPKDRCCPITGTLIGIEALFSAEIEEDHILPFAITLDDSNANRVLVTREANRRKARRAPFEAFGHTPEWPEILRRVALLPPAKRWRFQEGALERWQGEEKDFLARHLTDSAYLARLARLYLRVICDPDRVWAVPGRLTALVRGALGLNGLLGGPGARKDRTDHRHHAIDALAVALTDRSLLQRVSAAARRAQEVDRRLLADLEEPWPGFHAEAKAAIERVVVSHKPDHGTGGKLHNDTAYGEVRGADETGPNVVVRKPLSAFLRATPEEARAAIRDPVLAEKVAAALAANADAKSRAAALAALEHGAGTVRRVRTWERLETRPIPSAPWKRVKLDANHRIEFWRLPGKGGKPGKVVTQLVPLLDAAAEAEAKRLGRKVAERKPHPAATLLMRLHKNDMVAFGEGEARRILRVVKMSKGQVVLAPHHEGGNLKARDADTADSFKYINGSVAAFRRERARLVRVDPDGRVHDPGPRAW

SEQ ID NO: 15865 - protein, 1039 aa, unidentified
  REGION 1..1039: note = Cas Enzyme sequence
MISMKYRLGLDLGTNSLGWTALKLDGDNRPVDVLASGVRLLTPNQEAGRDPQSNVSLAADRRAARAMRRRRDRFLRRQDRLMRALVDAGLMPADEAARKALESRDPYTLRADALDRPLDAYELGRALFHINQRRGFKSNRIADSDDTEAGATKDGMRNLEEALAAENARTLGEFLARRHAAREPVRFRPQSQGTKNIYDFYPSREMTERELDAIWSFQHPHHSQLTDELLGKLKHIIVAQRPLKKPLVGKCTFRPDEDRAPRALPIFQRYRILTDLGNLMIERPGAAARRLRCAERDALANKLMTQASTVSFESMRNALKLHEDARFNYEGGNRKGFEPDQTAKVLAHKNRFGKAWRGMNRDRQSEIVDMLLTEPDEDVLGAWLEGECGLDAKAARLVSSARLPQGHGHLGRSMLADMVDALENESVEAVDPETGEVYRAPLTYDQAVEAVQGKHADFRPAKQLPRLPYYGKVMERHVIPTPDAPTGSQEAIGKLPNPTVHIALNQVRRLINALIDEYGPPHEIVVELARELKWTQKRKDEHNRTIKKNTDANERRVAKLKELGQIDNGENRLRLKLYEELPADERVCVYSGKSIAVEDLFSGAVEIDHILPFSTTLDDSFLNKVLCTREANRRKGARSPADAFSPDDLQEVAERAGRILDRRKAKRFAPDAMEKLAGETNWQARHLTDTQHMARLTKEYLGHICDPNRVWAIPGHMTAMLRGLWGLNSLLGDHNRKDRNDHRHHAVDAFVVACTDRALLQRAATAAGRTEKLEADRLFADGVPEPFPDFRATLARSLEALIVSHKLDHGVEGQLHEDTAYGLVNEEIDGKRFNLVTRKSISSLTAKEVSQVRDTDLRAQLMAVAEQAASSGAKLDQALAAFGKKWNIRRVRVLKTESSIITVRHGNGFEKALVPGAVHRMEVFCLPDGQWDFEAVTVFDANQTGYAPAWQRKNPDASLVMRLHKGDTLEADLRGKPEYWVVYRLNPASNRIWVAPHMDAGDQSSRAWQRPTIKKLQAVGAKLVRVDMLGRIKKQTTAA

SEQ ID NO: 15866 - protein, 1078 aa, unidentified
  REGION 1..1078: note = Cas Enzyme sequence
MHGGVPRAYRLGLDLGSNSIGWFMVMLDTTESRRKPVSLGPGGVRVFPDRRDRHSGSSNAVDRRAARGMRRRRDRLLARQKALIAALTEHGLMPTEENQRKALEALDPYELRSAALNEPLPLHHLGRAIFHLAQRRGFLSNRKAERKDDEKGAIKEAAAKLRKEMEKVSARTLGEYLWARHRQRKSVRARNIATGSKADYEFYPTRALIEAEFNAIWEAQAAHHPMNREARDAIHRTIFFQRPLKQPPVGKCSLDPATQPFELDPEGYRVSWAHPLAQRFRILQEVRNLDVGETGGPRRRLTKEEGDTIALALLQNDKVSFDKMRVLLKLPAEARFNLESERRTELKGDETAERLAHRSRFSKAWRNFSLDRQCTIVERLLAGADEEALVDWLQTECKIERAVAEEITDAPLPESHCRLGLRAIRKLLPHMDAGLNYPDAAKAAGFDHSKQPTGEMLGRLPYYGRWLPDAVLGSGDPRDLKEAQFGRFPNPTVHIGLGQLRRIVNDLIDDWGEPTEIVIEFTRSLKLSPDEKKDLLREQRQNQAKNAERIAKLRETLGQAEFDPSPRDLLKVRLWEELNPRDPLDRKCPFTGETIGLKRLMSHEVEIEHLIPYQLGLDDSPANKTVCLAEANRAKGRLTPFQAFSSSPTIAGIHYDWEAIIQRATALPRNKRWRFDPDAHEKYKEMGGFLGRQLNETGWLARVAKQYLSAVCDPNAIWVVPGRLTATLRRQWGLNSLLPDHNYGGVQERDETFRAATDELEFSGVKNRTDHRHHSIDALVVAMTDRSLLQRMASSYDDRRDKIDVQEPWQGFRDQVKSRLNQMTVSYKPDHSRQGKLHEDTAYGLVKEPEKEGANLVRRKDLVALTENEIDMIRDRRLRDMVRGHVTKAREAGVDLASALRSFRDNVRDPHIANGLRRVRLLKVEDSEYLVPIANRSDGTVYKTYSAGENFCVEMYEMPDGRWRGEAIRRFDANQSSYQPRWRKLHPDASFVMRVHKGDLLSLDHDGKRQVMVVHRLDAAAGRFKLAAHNETGKLDRRHAAANDIDPFRWLMASYGTLKKAGAERVRVDPLGCIWRVR

SEQ ID NO: 15867 - protein, 1042 aa, unidentified
  REGION 1..1042: note = Cas Enzyme sequence
MEAIEMMRLGLDLGTNSIGWALYRLDAEGEPEALITGGVLIHSDGRNPRDQSSNASERREKRGPRRNRDRMLRRRKRAAQRLHKLDLLPSDKQDRAASRKLDPLRLRAEALDRPLTPHELGRALLSFVDRRGFKSNRKADGGEDGQIRSEVDKLRMRMAQSGARSLGEFLWKRRRRGKTIRARLGNGLYPDRDMIKHELDKIREAQTAHHAQVSDRDWDTIIETILFQRELKPVERGSCTLIESQPRIYKAEPLFQLFRIWQDVLNLEFSPPREGYRPLDERQRGLVVRKLLEVKSRKFEQLATLAGLPEGSRFNFHTTARDKLDGDQTADVLGAPKCFGKRHWANLGAERQQEVVERLVDEKDHGALTQWLRDEFGLSAEAANAVAEAKLPPGTGHLSKAAIERLLPYMEEEGLPYVQAVISAGLGHHSDIHGDGKAKRLPYYGAVLTRDVVGGTSKNDDPDVKRYGRIGNPTVHIALGQVRRLFNAIADQYGKPDEVVVELARDLKQNEKQRLAHQRQQNDNRKRNEKLREMAANAGVPEPSQLEMRKLRLWDEQGPENGKLCPFTGTTLSIGRVLSEETEIEHILPYSRTLDDSMDNTVVAMRDANREKGRRTPHEAWGHDPVRYEQILARAELLPQKKRRRFHADAMEQFEERGGFLDRQLNETRYLSRAIKQYLEAVVEPNRIWVTPGQLTAMLRVAWGLNSILSDTDQKERNDHRHHLIDAAVVGMTSRSLLQRISRDSARGVDDLSQRVAKSVADPWENFRQDAKDLCERVVVRHRPDHFQPKPGCTTGSLHKETAYGPIFDTDGKLQYDERGNVLLVETKPLDALDEKKLETVRDPALRERLQAIWRQVESEAGEGKLNERFADRARRDLGVRRARVLVRLKEDSLAFIHDKAGKIYKAYKTDGNAYMDVWLLPNGKTTGETVSRFDAHQPGFRSQVKAKHPTAKKLMRLHRDDMIAIGEGDERNILRVKELSGQRIISVDHNQGGKAKEMTLISKRATRVFQEGLRKVSVNILGQVHDGGPFDQSGRGTYGRR

SEQ ID NO: 15868 - protein, 1031 aa, unidentified
  REGION 1..1031: note = Cas Enzyme sequence
MLRLGLDLGTNSIGWVLYRLDGGEPVELVDGGVLIHSDGRNPKNRASNAADRRSKRGPRRNRDRMLRRRRQVARLLHGLELLPEDEKARALLRNLDPLMLRAEALDRPLKQYELGRVLLSFADRRGFKSNRKADGGEDGAIRKDVSELRRRMEQSGARTLGEYFWKRHRDGKTIRARLGNGLYSDRAMIADELEAIHKAQIPHHSKVGPDDWDKIISTLLFQRPLRPVERGHCTLIPEEKRAYKAYPVFQRFRILQEVANIEVTPLGGSSRPLEREERERVIASLLSKKQRTFEELVRYAKLPEGTQVNLRSTARDRIDGDLTASVLSKKKLFGKKWQHLDLERQQEIVERLIGDEDSLEFEEWIRDEFDLSEEEAEAVSTARLPQFTGNLSKMAIERLLPHMQSGRRYHEAVSDAGLGHHSDLRGDGGRDRLPYYGEVLVRHVLGGRPDGRKDQERYGRVANPTVHIALGQVRQLFNAIVDRYGKPSEVVVELARELKQSEEQRRDYERRQGENRERNDRLRALAEAAGNPEPSEQDMRKLRLWEEQGPVNSRVCPFTGRTLSVEMVLSGATEVEHLLPFSRSLDNSMNNTVVAMRDANQEKGNRTPFEAWSHDSARYSSILARVSSLPKEKQWRFDEDAIESWEKDNRFLDRQLNENSYLSRVVREYLEAVVPQNRIWVTPGRMTAMLRHRFGLNGILHEEGNGKKNRDDHRHHLVDAAVIGLTSRSQLQRVARATGRGDNGESVVEQLELPWMDFRTDLEDLVEQCVVRHRPDHFRPVQGGTTGSLHNETAYGIVDGPDKQGWMTLVETKPLDSLSAGKLDRVRDLALRDRLKTLWQRIDEEHHSESGQVVWNTFVDRAREELNVKRVRVLVKPKLNKDSLAFIRDETGYAYKAYKTDGNAYMDVWLLPNGKSRGDTVSKFDAHQPHLHSYVKIKYPTAKKLMRLHINDLIAVGEGSERRIMRVQKLSGNTITAVDHTAAGRSESLSAYRKSAGQVLQAGLRKISVDVLGRVKDGGPFSPDGRGKKER

SEQ ID NO: 15869 - protein, 1031 aa, unidentified; identical to SEQ ID NO: 15868
  REGION 1..1031: note = Cas Enzyme sequence

SEQ ID NO: 15870 - protein, 1079 aa, unidentified
  REGION 1..1079: note = Cas Enzyme sequence
MNASSRPYRLGLDLGTNSLGWFLVWLERDRERWRPIGLGPGGVRVFPDGRDPQSGTSNAVDRRTARSARKRRDRFADRYFGRRTELMNALVRHGLMPADVNERKGLEVLDPYELRANALHGSLPAHHIGRALFHLNQRRGFLSNRKADKKEDDKGAIKQGASRLKEAIQAENARTLGEFLWHRHRNRESVRARNTASGPKAVYDFYPTRDLLQSEFDAIWAAQAPHHAAMTDAARKEIDRIIFYQRPLKQPPVGKCSLDPAAEPFDKDPEGYRCPWAHPLAQRFRIYQEMRNLEVGEAGRTMAKLTKEQGGLVALALLQSKEVKFAKLRTLLKLPTEARFNLESERRVALDGDETAARLSHRALFGKTWRGLGVERQSAIIEKLLNEPDEIELAHWLKGKCDLDGETAEKIADVALPDGHCRLGLRAIKKLLPLMEGGLRYDEAATKIFGDHAKLPTGEILDKLPYYGEWLSDAVVGSGDRRDDNEKRFGRLPNPTVHIGLGQLRRLVNNLIAEFGPPTEIVIEFTRALKLSPQQKAEHQSDQRRNQEKNEARAKDLAEHGLPATPRNLLKMRLWEELNPRDSLDRKCPFTGEQIGLARLMSDEVEIEHLAPFKESLDDSAANKTVCMRYANRAKRKQWPYMAFGSNPTIDGFTYRWDEIGARAALLPKNKRWRFDADAREQFEKRGGFLNRQLNETGWLARLAKQYLGAVTNPYDIWVVPGRLTSMIRGKWGLNSLLPDHNYAGVQDKAEDFLAATDDMEFSGVKNRADHRHHAIDGLVAALTDRSLLWKMANAYDDDRERIEIPTPWDKEKLREALKAALERMVVSHKPDHGVQGKLHEDTAYGFVKAPEKEGANLVYRKPIETLNENEIERIRDRRLRDMVRTHVMAEKANGIALADALRKLHAKTDDPHIKHGLRRVRLLKPEKPQYLVPVHDRRTGAPYKAYSAGENFCIEIFETPDGRWNGEAVRRFDANQNGDGPRWRREHPDAKLVMRIHKGDLIRLENDGNGAIMVVHRLDAAARRFKLAPHNETGNLDRRHATDNDIDPFRWLMASYGALKSMGAVPVRVDELGRPWRI

SEQ ID NO: 15871 - protein, 1042 aa, unidentified
  REGION 1..1042: note = Cas Enzyme sequence
LGSNSIGWFVIWLDEDGKPCGLGPGGVRIFPDGRDPQSKTSNAASRRVARSMRRRRDRYLKRRTRLMDQLCEFGLMPLDETERKSLEQCDPYELRAAALDRPLPLHHVGRALFHLNQRRGFKSNRKTDGGDAESGPIKEAVSKLERTMEAEGARTLGEFLWRRQRERRGIRARSNGTATKVAYDHYPSRAMLVNEFDALWTAQAPHHPEMTDDARDALRETIFHQRPLREQPVGKCALDPARDLEDVDGFRLPRAHPLAQRFRILQEVNNLEYGEVGRESIKLDNEQCRMLVLALSERNKLSFDRARTLLNLPEGARFNLESDKRKDLKGDETAAKLSHRDLFGRQWRSMERARQCTVVERLLAAQDENELVAWLRVETGLDKARAQRVSDAALPNGHSRLGHRAIARLLRHMETGLRYDEAARLEYGSHSERRTGEVVDRLPYYGAWMPDAVTGSGDVRDGNLKRWGRLPNPTVHIGLGQLRRVVNALAKGYGQPTEAVVEMTRGFKLSPDEVRRIEREQAENQVKNQERDDIIQSHGHAPNARNRLKMRLWEELNTDDPLDRRCPLTGEMISIRRLFSEEVEIEHLIPFSKSWDDSAANKVVAMRFANRAKDQRAPFEAFGDSPTINGCRYVWEAIAERAANLSRNKSWRFAPDAMQRFEERGGFLARQLNETGWFARLAKGYVEGLTGPDKVWVVPGRLTEMIRAKWDLNSLLPDHNFTDRKNRADHRHHAIDALVAGLTDRSLLQAMANAYDGQRERIMVPEPWEGLREDLGRTLDAMTVSHRPDHAASDKLHEATAYGLVKDPCREDGNLVYRKDLARLSKREVGLIRDLRLRGMVEHHVKRERAKGKSHADALASFNVAHEGHPHVRQGVGRVRILKPEKPEYLVTVGDPEGRAYKAYSAGENAFVDIFETPDGKWHGEATTVFQANRPDHLPRWQDRDEVTFVMRIRKGDFVALDYEGRRQAMVVHRLDASSGRFKLAAQNEAGNLDKRHTDPADPFRWLMASYNPLKKHGAERVRVDDLGRVWRILPEEAVRAL

SEQ ID NO: 15872 - protein, 1033 aa, unidentified
  REGION 1..1033: note = Cas Enzyme sequence
VIWLDEDGKPCGLGPGGVRIFPDGRDPQSKTSNAASRRVARSMRRRRDRYLKRRTRLMDQLCEFGLMPLDETERKSLEQCDPYELRAAALDRPLPLHHVGRALFHLNQRRGFKSNRKTDGGDAESGPIKEAVSKLERTMEAEGARTLGEFLWRRQRERRGIRARSNGTATKVAYDHYPSRAMLVNEFDALWTAQAPHHPEMTDDARDALRETIFHQRPLREQPVGKCALDPARDLEDVDGFRLPRAHPLAQRFRILQEVNNLEYGEVGRESIKLDNEQCRMLVLALSERNKLSFDRARTLLNLPEGARFNLESDKRKDLKGDETAAKLSHRDLFGRQWRSMERARQCTVVERLLAAQDENELVAWLRVETGLDKARAQRVSDAALPNGHSRLGHRAIARLLRHMETGLRYDEAARLEYGSHSERRTGEVVDRLPYYGAWMPDAVTGSGDVRDGNLKRWGRLPNPTVHIGLGQLRRVVNALAKGYGQPTEAVVEMTRGFKLSPDEVRRIEREQAENQVKNQERDDIIQSHGHAPNARNRLKMRLWEELNTDDPLDRRCPLTGEMISIRRLFSEEVEIEHLIPFSKSWDDSAANKVVAMRFANRAKDQRAPFEAFGDSPTINGCRYVWEAIAERAANLSRNKSWRFAPDAMQRFEERGGFLARQLNETGWFARLAKGYVEGLTGPDKVWVVPGRLTEMIRAKWDLNSLLPDHNFTDRKNRADHRHHAIDALVAGLTDRSLLQAMANAYDGQRERIMVPEPWEGLREDLGRTLDAMTVSHRPDHAASDKLHEATAYGLVKDPCREDGNLVYRKDLARLSKREVGLIRDLRLRGMVEHHVKRERAKGKSHADALASFNVAHEGHPHVRQGVGRVRILKPEKPEYLVTVGDPEGRAYKAYSAGENAFVDIFETPDGKWHGEATTVFQANRPDHLPRWQDRDEVTFVMRIRKGDFVALDYEGRRQAMVVHRLDASSGRFKLAAQNEAGNLDKRHTDPADPFRWLMASYNPLKKHGAERVRVDDLGRVWRILPEEAVRAL

SEQ ID NO: 15873 - protein, 1040 aa, unidentified
  REGION 1..1040: note = Cas Enzyme sequence
SNSIGWFVIWLDEDGKPCGLGPGGVRIFPDGRDPQSKTSNAASRRVARSMRRRRDRYLKRRTRLMDQLCEFGLMPLDETERKSLEQCDPYELRAAALDRPLPLHHVGRALFHLNQRRGFKSNRKTDGGDAESGPIKEAVSKLERTMEAEGARTLGEFLWRRQRERRGIRARSNGTATKVAYDHYPSRAMLVNEFDALWTAQAPHHPEMTDDARDALRETIFHQRPLREQPVGKCALDPARDLEDVDGFRLPRAHPLAQRFRILQEVNNLEYGEVGRESIKLDNEQCRMLVLALSERNKLSFDRARTLLNLPEGARFNLESDKRKDLKGDETAAKLSHRDLFGRQWRSMERARQCTVVERLLAAQDENELVAWLRVETGLDKARAQRVSDAALPNGHSRLGHRAIARLLRHMETGLRYDEAARLEYGSHSERRTGEVVDRLPYYGAWMPDAVTGSGDVRDGNLKRWGRLPNPTVHIGLGQLRRVVNALAKGYGQPTEAVVEMTRGFKLSPDEVRRIEREQAENQVKNQERDDIIQSHGHAPNARNRLKMRLWEELNTDDPLDRRCPLTGEMISIRRLFSEEVEIEHLIPFSKSWDDSAANKVVAMRFANRAKDQRAPFEAFGDSPTINGCRYVWEAIAERAANLSRNKSWRFAPDAMQRFEERGGFLARQLNETGWFARLAKGYVEGLTGPDKVWVVPGRLTEMIRAKWDLNSLLPDHNFTDRKNRADHRHHAIDALVAGLTDRSLLQAMANAYDGQRERIMVPEPWEGLREDLGRTLDAMTVSHRPDHAASDKLHEATAYGLVKDPCREDGNLVYRKDLARLSKREVGLIRDLRLRGMVEHHVKRERAKGKSHADALASFNVAHEGHPHVRQGVGRVRILKPEKPEYLVTVGDPEGRAYKAYSAGENAFVDIFETPDGKWHGEATTVFQANRPDHLPRWQDRDEVTFVMRIRKGDFVALDYEGRRQAMVVHRLDASSGRFKLAAQNEAGNLDKRHTDPADPFRWLMASYNPLKKHGAERVRVDDLGRVWRILPEEAVRAL

SEQ ID NO: 15874 - protein, 1153 aa, unidentified
  REGION 1..1153: note = Cas Enzyme sequence
MQIAQGTRYRLGIDVGSNSLGWFVVWLDDKGNATGLGPGGVRIYPDGRDPQSKTSNAVQRRMARGARRRRDRYLKRRSNLMSLLVRFGLMPEDEAARKALEKLDPYELRAKALDEPLPAHHVGRALFHLNQRRGFLSNRKTEKRDDKESGAIKLAASKLQQAIDNASADTLGEFFHGRHSSRDLESRQTAIRVEMQRTGKDHLTGNARKKAWGKIRRRLFPDAQPLGSPHPVRARNLSTGPKAEYDFYPTRQMVLDEFNAIWTKQAPHHPTMTDEARQDIQYGVNGIFYQRPLKQPPVGKCSLSPAIDNGDEEGFRCPWAHPLAQRFRIWQEVRNLIVVETGRPDRRLTLQDGNNIATILIHDGKPSLTKEGRLSFDKIRNILGLPEEARFNLETDKREYLLGDLTAAKLSQKHLFGKSWREFPLERQIEIVNKLLDTEDEMELIAWLIVNTGIAEPTAKEVVSAFAGLPDGHARLGVRAITKLVPRMEAGATKTEAEEAEYPGQNRPTGELSPDGYLPYYGQWLPDDVVGSGDPNDIDEKRWGRFPNPTVHIGLGQIGRIVNALIEEHGPPAEIAVEMTRDFKLSPKLLDKLNKEQTENQQNNDRRAEAIRKLGQKVNRDNLLRMRLWEELNPDDAVDRCCPYTGDRISCERLLSAEVDIDHLIPFSDSWDDSASNKVVCMRYANRAKGDRTPFGAFGTNPRIDGHQYDWNAISLRADNLPNNKRWRFKPDAAQRFEKMGGFLARQLNETGWLARVAKKYLSAVTSPNKIDVLPGKLTAMIRAKWGLNDLLPDHNFSDAKNRKDHRHHAIDALVVALTNRPLLHRMSSANDDQERERIIIPKPWETLREDLGVKLKAMTVSHKADHGKQGRLFKDTAYGAVRKPEQERDANKKYLARISSISEAATKKTKKIAPADNLVYRKPFLSLAPGEIVRIRDIRLRELVRKHVESKKPASALELKAALQSFTESADVTGLSAGIRHVRLVDIKEPTYMIPIRRKSGEIYKSYFGGENAFVEIFETLDGWWDGEAVSVFSVNQEKGPTMEWPEKSPGAKLVMRVFKGDLIALDFNGQRTVMVVRQLDASASRFKLAAHNEAGQLQDRHEKKKNEYKGDPFRWLMASYSSLKAMKAELVRVDELGRPWRVKPQRPQPPV

SEQ ID NO: 15875 - protein, 1031 aa, unidentified
  REGION 1..1031: note = Cas Enzyme sequence
MLALPVKSIVTTETSMKYRLALDLGSTSLGWAMIRLNTENDPCAVVKAGVRIFSDGRNPKDGSSLAVTRRNARAIRRRRDRLLKRKARMTSMLLQYGFFPKDEASRKDLELLNPYELRAKGLYEALKPEEFARALFHINQRRGFKSNRKTDKKDNDSGALKQAITGLRAQLDAQGANGKARTVGELLWRRFQTSSGVRARYKEERIAKDDGKTRIEKSYSLYIDRAMIEAEFDALWAKQSALNPSIYHDKARDDLKDALLHQRPLKPVKAGRCTLMPEEERAPLALPSTQRARILQEVNHLRILREGLQQEPLTLQQRNDLVQALEANSKRSFTQIKKLLGLGGLVQFNFEDPKRQELKGNVTSAILSKAEYFGDAWVKFSEAKQDEIVWQLVKEESESALVRWLVENTGVDESTAEELAKVSLPEGYGSLCLKALQRIIPALREDVIPYSEAVVRAGFDHHSQLNPSSTGEILPSLPYYGDPLRRFVAFGSGNPNDPPEKQFGKIANPTVHIGLNQVRTVVNALIERYGHPSQVIVEVARDLKQSKDQRDEANKKQAENQKRNERVRKSIAETLRISPQRVRRADIEKWILWEELSFDVADRRCPYSGEQISASMLLSDRVEIEHILPFSQTLDDSLNNKTVALREANRIKKNQTPWDAREAFAAQGWDYDGILLRAERMPRNKRYRFAHDGYAQWLKKDKDFLARALNDTRYMSRVAREYVSLICPQGTRVIPGQMTAMLRAKFGLNDILGLEGEKNRNDHRHHAVDACVIGVTDQGMMQRFAQASASARERQLDKLVDNMPLPWPTYREHCERAVNAIWVSHKPDHGYEAAMMEETSYGIAKNGSIRQKRKTDGTEGREVSNLIRLSEASQPKRHGVDTQGQPLPYKGYIGGSNYCIEITRDEKGKWQGDVISTFRAYEIVRLSGLEQLRHPRLGQNGVPLVMRLVIDDTVKMEVEGKAQLMRFVLVSAGNGQMVFCPVQEANTDKRNRDKTDSFAYVTKLAGSLQKTKARRVTISPIGELRDPGFKE

SEQ ID NO: 15876 - protein, 1058 aa, unidentified
  REGION 1..1058: note = Cas Enzyme sequence
MAWRLGLDVGTNSIGWAAVELTDGRPCGLIDAGVRIFSDGRNPKDGASLAVQRREPRSARRNRDRYLKRRCEFMDRLVEHGLMPREDSERKALESLDPWMLRARGLDEKLSLQEFGRALFHLQQRRGFKSNRKTDRGDSERGAIAEATQRTRERLEEEGARTLGQLLGRPRMEWAARNASLPAGQREPQPATRVSPYRSKGKTAYDYYPTRALIRDEFDCLWARQREFHGDALSEKARAALADTLFFQRKLKPQPVGKCTLDPAQERASKALPSVQRLRIYQEANHLAILRLDAGSEPLSREQRDRVAAKLLSTSKVTFDSLRKTVLKLPGNVRFNLESEKRRHLDGDATAAVLAAGKCWPDWRSLPLSDQDRIVEQLLEVEDEAQLIAWLCDEYGMARETAQALADAPLPDGHSAFCRDVAGKLLAELERDVITYDKAVERAGYPSHWRLDHDGEVLDRLPYYGEVLGRHVAFGTGEPADPPEKRFGKIANPTVHVALNQMRKVVNALVARFGAPDEIVVELARDLPLSGQGRRDLERRQKENQDANDKRRTELEALGEPDSYQNRLRLRLWEELNPSDILDRRCPFTGEQISIKRLFTDEVEIEHILPRSRTLDDSPANKTLSMRRANRQKREQSPWEAFGHSPDGYDWDNIAARAANMPPNKAWRFAPDAMERFESEERDFMARQLHSTQYTARLAANYLVWLIGDPARLCVTPGRLTSDLRHHWGLNSILAGHNLGEARAADIKKNRNDHRHHAIDAVVTALTDRSLLQRIATEAGKSEHAGDARLIHDLDDPWPGFRDRVIEVVSRIVVSHKPDHGVQGALHNDTAYGLVGNAEKTGKRGVVHRVPLATLNRPDKLDAIRDDCLKKAFRAATEGLNGKDFVDAIVAAGEAMSPPVRKVRIEESLSVIPIRDGNGHIYKAYKGDGNYCYDIFAGPNGEWTGEVISRFEANAPDFDPSGRVSQTGEPLVMRIRGNDLLRVDHDAPRQVMRVVKFSKGRIVLAGHNEAGSLKSRDEDKADPFNYLTVSPSRLKKIGAQQIYVDPSGRAFVNPAGSS

SEQ ID NO: 15877 - protein, 1064 aa, unidentified
  REGION 1..1064: note = Cas Enzyme sequence
MGRRSFMMRLGLDLGTNSIGWALYRLAEDGEPKALVDGGVLIHADGRNPQSSSSNASQRRQKRGPRRNRDRMLRRRKRVARLLRGLGLLPSSKREQAEQRKLDPLQLRAAALDRPLTPHELGRVLMTFVDRRGFKSNRKADGGEDGTIRREIGKLLQRMEQAEHDALLHGRHAARTLGEFLWRRRQQGKTIRARLGNGLYPDRALIEQELRAIQRAQAQYHPTVTEEQWDEIINQAILFQRDLRPVARGKCTLIEGELRAYKAEPLFQRFRIWQDVLNLEYAPPREGMRPLDERQQWLIVGKLLEAKSQTFKQLAKLVELPEGSRFNFDAIARDKLDGDQTAAVLRSPKRFGRRDWANLGTHRQQQVVDRLLEESDHDALVSWLQGEFSLDKGTAEAVATAPLPQGTGNLSKVALERLLPYMEEEGLPYHRAVVESGLVHHSDIHGDGKADRLPYYGAVLTREVVGGSNDRKDNDLKRYGKIGNPTVHIALGQLRQLFNAVADEHGKPDEVVVELARDLKQTRKERERDQRGNNRNRERNERLRELAATAGFPEPSALDMRKLRLWDEQGPPDLRVCPFTGEPLSIERVLSEAAEIEHILPYSRTLDDSMANNVLSMRSANQEKGSRTPHEAWGHDSFRYEQILARAELLPANKRWRFQANAIQQFENSGDFLSRQLNDTRYLSRAVKQYLEAAVPPNRIWVTPGRLTAMLRVAWGLNPLLSADDRKERIDHRHHLIDAAVVGLTSRSLLQRVARDSALGVDELGERVAKTVADPWEDFRLELKALVDRVTVRHRPDHFKPKQGGTTGSLHNETAYGPLFGPDGELRHDERGNVLLVETKPLESLDRKRLGDVRDHALRERLIALWERTEAEAGEGILSERFAQQAQQELDVRRVRLVVRLGESSLALIRDKNGRVYKAYKTDGNAYMDIWLLPNGKTTGETVSRFNAHQPDVQSKIKALHPTAKKLMRLHVDDMIAVGEGEERRIMRVQFLSGPNVTAVDHNEGGNLHARVRSKDPATRYVPFRVSASRALNVGLRKVSVNILGRVADGGPFDQSGKGTHGRS

SEQ ID NO: 15878 - protein, 997 aa, unidentified
  REGION 1..997: note = Cas Enzyme sequence
MFDSRIVLGLDLGVTSVGWSLLKDNFENGEISSTEIIAAGVRIFPATIEDKTKAPKNLKRRTSRGARRLLRRKRERKNNLRELFTANKLLPKIEKGESSKKFDALGNPYELRVRGLSEELEPHQIGRALYHLAKRRGFLSNRKSGKSKEDGAVLGGIAKVREEIETKHLKTLGEYLNTQDKKREFYTARQMVEDEFEAIWTAQSAFYPEILNEPLKAEIKQVVFFQRPIQSQRGLIGKCGFEKGKKRCDLARQEAQRLRYWQDINNLQFQMRESLEWRKLTLEEKAKLAAEFEKKNEISYKGLRKLLKIGEDTRINLEANEKKLYGNKTAVAFRKAIGNVWDELSEEKQTLLTEDFFRIESELSLEKRLKEFWNFNDAQIKELLKIDLESGYSRVSLKAIRKILPKMQEGLRYDEAATEIYGDHRKQFDTNSSEKLALPPKDLRNPIVSKALHELRKVVNAILRTYGKPDEIHLEMARDLKLTAKQKERAIKQQNMNQKANDEAAEFYKKKFGLENVSGTDKLKYRLWKEAGETCPYTGEIIPPETLRDDQYVDIEHIIPYSRSFDDSYMNKTICLAKFNRDTKKNKTPFEIFGGDEQGYYKMLKRIENLPFGKQRKFQTKEVNFDEMIGRQLSDTRYICREARGYLLQLYDNEQAVMVVAGGATANLRHVWGLNSILSDGDLDVKNRYDHRHHAIDAIVIALISRRLFQYISRLAGQNRERMKRNLSAMEMPWDNFLTDVSEAIDSIIVSHAPIHRVRGQLLEETAYGATADEDLFVVRKSLESLSKANIEKDEIVDETVREIVRERYDQFNGDLKKAFVEPLFHKDGKTPIKKVRLYVKMSPETVVGIKDEFGKPYKYYALGGNHHVEIFENPLTEERKAVLVPRFKAAQNVRESIEKGNAPSAVSRNLGENWQFLFSLCPNDYIEFLGDDGKLRLYRIQKMSGGQTTVVTARPLEDARSEYISGISLNIQGKGFNKIVRKLQVDPLGHLTQAND

SEQ ID NO: 15879 - protein, 951 aa, unidentified
  REGION 1..951: note = Cas Enzyme sequence
VNKQYSLGIDFGSNHIGLALVCQTDDANHPQFAGTLHYSPAQLKKKLGPRPQLRRMRRTRKSKRSRLKKLTNRLRSIGLDESQINKLVVFCRRRGWKSLFGESEIEDKQDSEEIVFRYSREDFFLALEKEITSLIPLDRQTKTLSVCEKVLNRHGNTHDEMRQLRIDNRGVSRCAWKGCHLITPRRHNAIKEALAQFVYLIIDIDQVKNDNTLKENIDAGLERLEELGKRLRSANIANHPPERHDAIKTERKVLLKKIRAELVPIKDLANSDTWKTNRANIMNIIEKSRGRNRYCRHHSGEFVKYQIAGKPIPFKNTLLDRDLISRLEQVLFQRIWRYIEGRILPLADAPINRLVVERVAIDLLAGSWKQIQKTSATAREDMYQSGPKKGFDSTLAMLKEEFNGLCAYCGKKHTNILEREHILPKREFVFDSYLNLVPSCPDCNRKLKGGRSLTAARLTIHPDAYDEYQKYLSKKFRNKPLHHLHAIKKGILNLMKDKKRTWEAERYLALVAMNFSETTGTQRGPRPLARYLSEKLKLKFGAPPKIDFIAGRHTALWRQVAFPGFDKAEDKTKDNSINHALDAMILACKLPKPNLLEGANLPLRLFKSWVEGVKRAAPVPGENGIPTIPATEFAVPGFEDVYPGNYISVDMAKFNWNSRESSVQRQGIYGWNNHVNIPTMRSAASVCAADFIEADKTKSTSGRQVKINKVIDNILHPHLKAALIEARDKDKTRDACANALTEWIRKTIKGSLKTASFSKHPADQSRKQLLQDFADGKINAIPETIGIKMLRPSHTNAIDLLRMNSRGHVIHRYWSDPAVIAKIAAYPKNGDRVDRSKLIDFDWRQNWAVIPIKKRIPLPEEVILMGRAFGQPLPDEKAWLEGLERYLSKIGVKEYAFIQKGCVAVYENGTQFYVRNFSSTQGFKTSLLKGIVGIKRTPFVDNITFNRVIDI

SEQ ID NO: 15880 - protein, 1110 aa, unidentified
  REGION 1..1110: note = Cas Enzyme sequence
MKNTTQNIQLAFDVGHNSIGWSVLKVQGEAPEIAGCGSVIFQKDGCLATKRRGYRRQRRNIRATRQRITRLKQLIFSLGVLSHEQLNRVSSSSPWHLAAGVLEGTRKLDWAELWDVLRWYAHNRGYDGNRQWATNGTVEEEEDTEKVENARGLFAKHGTTTMAQTLCAELELDAKGGKAASRIRFKGLNAAFPRESVTAEIRAVLDAHKGLLPRVDDAFIRALIGKDHSDGDAWKAVPVAGLKIPNRFHGSLLMGQNIPRFDNRIISRCTVLFDRILQQKLDEGMDRESAQAEAQKLSKVPSKKAPEFLQFRWAMLLANVLVTGVDGKSRSLAVDERKAVHLKIRERGAFTPTQFKLEVMTATGAIRSNLEEMLSHPDADKALVFDYATRETQRGTLGLVWPSIDDLNKTRIKRLLRDGKTITIRDVVVANDSAISALENSLTASATRKTTAKAGAATKSLDVLLSETVCIHPINGRAPFSRQIMKEAVADVMEKGIHPTTEGGVLYRGESIRLAQVQRKLDDQTNNHLVRHRLLILERLHHDLLEEYAEGNPDLVERITIEVNSDLREMSGKNAKETAQEEGLKLADFKGVSKLLEAQLDGQGIQITAGLIRKARVAHDQGWKCPYTGKDFDVFDLVHRRVDKDHIIPRSLRQSDSLDSLVITFSEVNRMKGQRTAVTFIEEFGGKVVDGRPELSIMGLASFEEGVNKLDSRRGHDDDKRRKKNRKRLLMLKDYVDKEFTPGDLTRTSQLVRLGAQLLERPYLGCEKKPVITSLPGSVTGAVRKSWRVLGCLSKANPAVTAESTKTDVRSITHLHHALDASVMALASHFLPRDGGIWELIVKRKLSASEQQLLLKKGQQFARDSEGRVSLIDLPTFLKNQLSNRLAEQRVVQHISADMSGLASEETVYRVLDPKDSHPSAKKLMKLCAARGIEVPDAREEVALLVSRKRRSTIESGDLLHETPIWRWAYRIEKKSKLLGLESKEPTSGKLKSLKAVKIIGENFGLALDPEPEVLQLSSVWKRLRELRLAHGRPVRILRNGDLITLSSADVPEQRRGNWRVMSVKNNTTGLALDLARPDEIKATWINTLVQSHLRNGLKIVDARLSGVMK

SEQ ID NO: 15881 - protein, 1357 aa, unidentified
  REGION 1..1357: note = Cas Enzyme sequence
MKNSKIYLGLDIGTDSVGYAVTNDQYDILKFHGEAAWGSTVFDSASLSAERRGFRSARRRLDRRQQRVALVQELFSSEVNSVDPAFFKRIKESSLFRDEVNYQHTLFNDDDYTDVEYYDQYPTIHHLISDLMNNKESHDVRLVYLAIAWLVAHRGHFLSNIDINNIDKVKDFGEVYAKFINFFEFGFYDKPWGEIDTDEFGAILKSKNSITIKNKLLTELLFGGEKPSKEATDGFPFNREAMVKLLAGGTCKLKDLFNEEAYEEFGSVSLNMDDDKLGEIADNIGDDFELIESMRLLTDWAMLVDILGDGNSISEAKVEIYNQHEKDLTELKRFIKKYIPEKYDEVFRALDKPNNYVAYSYHVEGMSNTKPKKKANQEDFCKYILGLIKTIDIDEDDAEAFEIISNRLQLAIFMPKQKTTSNRVIPYQLYAYELKKILHNAEQYLEFLNQKDEDGLSISDKVYSIFTYRIPYFVGPLNKKSEHSWIRRKAGKIYPWNFKEMVDLDESEQAFIERMTNKCTYLPDQPVLPKDSLLYHKFMVLNEINNIRINQEKISVELKQDIYNDLFMNIKKVTRKRLTDYLISRNVIKKGEEDIVTGIDITINSNLSSQIAFKKLINSGALSEVDVERIIERASYAEDKSRLLKWISKNYPHLTDEDKKYISRVKIKDFGRLSRKFLSEFIGANNETGELVTVIGELWNTNNNMMELLSDKYTFVKKLDEYRQDYYQDNKMSLNNRLDEMYISNSVKRSIYRTMAIVKDVEKAFGKPDRIFIEVARGASEDQKNKRTQSRKQQILDLYSKCKDEDVRILKQQLEEMGEYAENRLQGDKLFLYYMQQGRCAYSGKSIELEKLGTKAYDIDHIYPQAYVKDDSILNNKVLVLSELNGEKSDTYPIKAEIRDKMSGFWNLLKERGFITEEKYKRLTRSTPFTSEEKLGFINRQLTETSQSTKAVATILKEKYPECEIVYCKARLTSEFRKEFNLPKSRLLNDLHHAVDAYLNIVTGNVYNMKFTKRWFDVNSKYSINTVPMFTKPLIRDGITVWDGEKMLAKVIKTAQKQNAHFTKFAYMKHGGFFDQMPVDASDGLVPLKKGLDTEKYGGYNKAGVMFFIPVRYKLKKKNEVIIMSVEMLYGKRFLEDKEFAKEYAFKRLNHILGKQVDDVEFPMGFRPWKVNTMLSLDGYRVCIAGIGGGGKCLIAQPCTQFMTSPYWNYYVKKLENFVEKTTKNANYIYDETFDVINYDKNIELYDLFIDKYKNSIMKNRVNAPIGTLEKGSDSFNSLDIKEQARVLLNILLSFNRSSSSGVDLTSINGAGRTGATVNFSSSISNWKKAYSSVRIIDNSVTGLWSKISDINLLELV

SEQ ID NO: 15882 - protein, 1225 aa, unidentified
  REGION 1..1225: note = Cas Enzyme sequence
KKNKLNELFGVSSSKTSKKIIDIVMGGKVNLTELFGKEYYEKEEVKGFTMAEEWESIEDLQLIKDNILHIDIIDTIKQIYDWVTLNEMLKGKQSLSSAMVEIYETHKQDLHDLKEFIKDYAPNDYERVFGEIKNEKGKIDNSICNYSCYIGGGRYNGDKIGANGRYGSTCTQEDFYKFIKKIIESVTVEEATALRDDLLERIANKDFMPKIVSKNNSTIPFQLNMMELDGILDKARQNPKFTFLNDVDNGWTIADKIKSLLSFRVPYYVGPVKEYEDNDNNKRYAWAVRKESGRITPWNIDDKIDKKQSNEIFIRRMTNRCTYLKLADTLPKNSILFSKFMCLNEINSMKINGDAISCKEKKAIFDNVFCKKNPTIKNIKKYLIENFGYEKGIVLSGIDNEIKSSMKTYIIYKNKLGNKVDADPNMIERIIFLSTIHEDSQMLEKSIREEFGDKLTEDEIKAIKGFKFNGWGSLSAEFLTGYKNNGIKLMFDGEMLDIIDIMYEYNLNLQQIIFNEKCNFSEALEAYNLEHNIVEDSNVSYNKDIADYPCSPSVKKCVWQSFKLVKDIVKQTKIVPDVVFIESCRENNDFKKNQRTSKRRDMIVAIYDEARKKINELQRDKKAEFSIQELEGLSEDIDYCQKTLDNYSDSELKKENLYLYFMQLGKDMYTGKAIDLNQVLFGNMYDHDHIIPQAVIKDDSFTNLVLVAKKENAEKSRTYPLESQFRQTTLWKKLYKIGLLSNEKYSRLIRQTPITDEEQEKFINRQLVETSQTVVLLRDLLNRYFASKNVEVVLTKAGNVSMFRKEFDLTKSREVNDFHHAWDAYLNIIVGNILNKEFNHNWFIRQDNGKDKSYNFLRVLRKQATANNNEILNIIETTMNNIDFQMVKLPEEKKGNFYSEVLKTHENDKDSSLIPMCDSKIVGGKEIHPKCDTTKYGGYKTANTAYFILADSIDKKGAVQRNIVAISIFDDARIKNGKITYKEIFERIGLKDGKLANVEGMKVPIIKTGSLLDFGAYCLRLAGMTGNRLTFHNANQLFVSKDQNRYIKELGILVDKVVKESKKDTKEDKKEAMALEIIEEIIRRKNNPDNKNSNIIVVNRKDNLKLYDFFVYKLSHNPYKDIPTYSSLLDILQRGKEDFEQKEIYAQVLLLFNIIKAFQCNAQKVDVSALSYVNKKGIATKGGAGQCSIAINSDITEIDKLILINQSMSGLKEQRIQLNLKKVDK

SEQ ID NO: 15883 - protein, 1098 aa, unidentified
  REGION 1..1098: note = Cas Enzyme sequence
VGADVGLNSLGFSAIQLDANGTPTALLKTLSYIHDGGVDPTQNKSGTTRKAMAGIARRTRNMRKRRRHRLNQLDRQLYQLGYPVDEVPETEHGLYEYWNVRSALATAYVSDKDKRDRMMVMAIRHIARHRGWRNSYSRVETLFEDVEPSDQYKDLKQRVETRLGVKLDEDMTPAQLVALTLNERDKNFMRVRTSTKYGEGILPNRLMQSDNARELRRIFTVQQVPEDVWKPILRTVFHCASPKGSAEKHVGTDPLDQTQKRALKASIAFQKYRILNVITNLRIRRKSEAPRPLTVNEKQDVYELLTTAKEDLEWLDVCAVLDIERNELKGVGTLTHDGEERIGNKPPVLDTVIRLHGIKNTKLRKMMDAWWNSATEDERAAMIRLLSNTVDLDKVRDLIEYASPIEFIDGLDEELLTPLDSISLPVGRAAYSEKTLDRLSKRMLETEDDLHYAIRHEFDVPADWKPPVPPVQEPTGNPAVDRVLKAFNRFLSQCEQEYGIPESIAIETTKESFSSIAFGRTLDYERRQRRDKDNQTRAAIREDMRKQLSNGGSFKVHDYDIRRWEIVQSQNNTCLYCGATSPRFSFDKSELDHIVPRRGVGSDSKRTNMAAVCPECNANKSNIPFAVWVHSDYAREHGITMNDVIARVNQLMFPPSMNRKQVGQVKKTIISRLKQTEQDEPLDNRSIESVGWMADELHRRLDGRYANKTVKVSTFPGSITYEARRASGIDGQIHFIGAQWKTRLDRRHHAVDASVIAMMNQSVALRLAERHYLRESQRLCGTPFGQADWKQYPNENTPGYDQYQQWSGQMKNLLHLLNKSLDEDTIPVVRSRRLRLGNSTAHDATVKPLQYVRLGDAMPTSLIDHALTPQVWKALTGLSDYDPQNGLPANPKRVITALGEVCHAKDEIGFLPGNNAQLFVNGGAADIGGTIHHARIYRCEQVLKNGKRKTFYGMVRVFQCDLMKRRKNTDLFRTPLHPADVSIRYADGKVRDAIRQGHATCIARLTINDEIKLTPEMMRDMCPEYANMFHTDSGVERRFIVAGFPSPIQFRLVPSVIAGEGLSKMVEQGLEVPPKVEKMFKLHTFVPVVNKIGHVLEQ

SEQ ID NO: 15884 - protein, 1325 aa, unidentified
  REGION 1..1325: note = Cas Enzyme sequence
MKGEYYLGLDMGSSSVGWAVTNEKYEILRAHGKTLWGVRLFDSAQTAEERRGFRTAKRRLDRRNWRIELLQKIFAEEVEKIDDGFFRRMKESRYWPEDKRDRQGKCPELPYALFADDDYTDKEYHKQFPTIYHLRKWLMETDETPDIRLIYLALHHMMKHRGHFLLNGNIEQVREFQTTFEQFLEAVRAEELGFSSEIGVERSKEIEAILKDRTLTKSAKKTKAVKAMRAETSCEKEWLGLITGGTAKLGNLFGEKQMDTLERPKLCFADAGYEEYAGEIEAELGEKYVLIEHAKAVYDWAVLADILQNYSSLSEAKVALYEKHKKDLKDLKKLVRENLSREEYQRLFAKKDEKANYYAYIKAPKQCSQEDFYGYLKKNILGKISDVTKASCMQKEMEMGTFLPKQTVKDNSVIPYQIHLYELNAILKNLEDKVPLLKENGEKIQKIFTFRIPYYVGPLNGIRKKGEKSNWAVRKEGKIYPWNFDEMVDLEASAEQFIRRMTNKCTYLPSEDVLPKYSLLYSKYEVLNELNNLRLDGEKISVEQKQKIYEEVFQKSRKVTQKKLKNYLVKEGITGKEVEITGIDGDFKSSLTAYHDFKEKLTNLSLNQAEKECIILNVTLFGDDKAILKQRLKKLFPELTEKQRDSISKLPYRGWGRLSKVFLEETEAPAPETGEAWSIIRALWETNDNLMQLLSEKYLFASAIEEKNGNEQKKRDISYELVEELYVSPAVKRQIWQSLLIVKEICKVMGNPPKRVFIEMAREKTDQGRTSSRKKKLLELYKKCKAEEKDWIDEIEKRSDAEMRRDKLYLYYTQKGKCMYSGETIELEELWDNQKYDIDHIFPQSKVMDDSLDNRVLVKKKCNQMKEDKYPIDETVRKKMQPFWKSLVDAGLISEEKYKRLIRGNGFEPSELAGFISRQLVETRQSTKAAASILQQVIPDTQIVYVKAPTVSKFRKDFKFLKIREMNDYHHAKDAYLNIVVGNAYFVKFTSNPIHFIKENPGRSYNLKKMFEQEKIERNGEIAWESGNGTIATVRNFMEKNNILVTRRSYEATGALFDQQIVKKGKGQVPIKSSDERLCDIQKYGGYNKEAGAYFVLAESEGKKGKKIRTIEYVPIRLKKEIQKSEENIIRYLEEERQLKNPRVLVPEIKIDTLFCVDGFYMWVSGRSGDQLLMQGANQLVLSQEETEILKKIVQYVERKKQNKELKIYDSDHLEEKKVVMLYETFLNKLTNTVYAKKLGAQAKTLTEKREKFKELCIEEKCIVLYEILHFFQCQSVTADLKLIGGSGRAGILYLNKNITDCSRIEMIHQSPTGIYEQAVDLNAL

SEQ ID NO: 15885 - protein, 1325 aa, unidentified
  REGION 1..1325: note = Cas Enzyme sequence
MKGEYYLGLDMGSSSVGWAVTNEKYEILRAHGKTLWGVRLFDSAQTAEERRGFRTAKRRLDRRNWRIELLQKIFAEEVEKIDDGFFRRMKESRYWPEDKRDRQGKCPELPYALFADDDYTDKEYHKQFPTIYHLRKWLMETDETPDIRLIYLALHHMMKHRGHFLLNGNIEQVREFQTTFEQFLEAVRAEELGFSSEIGVERSKEIEAILKDRTLTKSAKKTKAVKAMRAETSCEKEWLGLITGGTAKLGNLFGEKQMDTLERPKLCFADAGYEEYAGEIEAELGEKYVLIEHAKAVYDWAVLADILQNYSSLSEAKVALYEKHKKDLKDLKKLVRENLSREEYQRLFAKKDEKANYYAYIKAPKQCSQEDFYGYLKKNILGKISDVTKVSCMQKEMEMGTFLPKQTVKDNSVIPYQIHLYELNAILKNLEDKVPLLKENGEKIQKIFTFRIPYYVGPLNGIRKKGEKSNWAVRKEGKIYPWNFDEMVDLEASAEQFIRRMTNKCTYLPSEDVLPKYSLLYSKYEVLNELNNLRLDGEKISVEQKQKIYEEVFQKSRKVTQKKLKNYLVKEGITGKEVEITGIDGDFKSSLTAYHDFKEKLTNLSLNQAEKECIILNVTLFGDDKAILKQRLKKLFPELTEKQRDSISKLPYRGWGRLSKVFLEEMEAPAPETGEAWSIIRALWETNDNLMQLLSEKYLFASAIEEKNGNEQKKRDISYELVEELYVSPAVKRQIWQSLLIVKEICKVMGNPPKRVFIEMAREKTDQGRTSSRKKKLLELYKKCKAEEKDWIDEIEKRSDAEMRRDKLYLYYTQKGKCMYSGETIELEELWDNQKYDIDHIFPQSKVMDDSLDNRVLVKKKCNQMKEDKYPIDETVRKKMQPFWKSLVDAGLISEEKYKRLIRGNGFEPSELAGFISRQLVETRQSTKAAASILQQVIPDTQIVYVKAPTVSKFRKDFKFLKIREMNDYHHAKDAYLNIVVGNAYFVKFTSNPIHFIKENPGRSYNLKKMFEQERIERNGEIAWEGGNGTIVTVRKFMEKNNILVTRRSYEATGALFDQQIVKKGKGQVPIKSSDERLCDIQKYGGYNKEAGAYFVLAESEGKKGKKIRTIEYVPIRLKKEIQKSEENIIRYLEEERQLKNPRVLVPEIKIDTLFCVDGFYMWVSGRSGDQLLMQGANQLVLSQEETEILKKIVQYVERKKQNKELKIYDSDHLEEKKVVMLYETFLNKLTNTVYAKKLGAQAKTLTEKREKFKELCIEEKCIVLYEILHFFQCQSVTADLKLIGGSGRAGILYLNKNITDCSRIEMIHQSPTGIYEQAVDLNAL

SEQ ID NO: 15886 - protein, 990 aa, unidentified
  REGION 1..990: note = Cas Enzyme sequence
AFPCEGVEGEVERVLHTHVGVLPQVDDRLINALMRDHTALPSPDRPPPARYGQRLNDGSLSPGGLLFGQLVPRFDNRIIARCPITFERVYQAVKTETGNEGKAKREAEKQAKVPSVDCVEFHRFRWAMELAKIKVATGNSGAPRNLTVAERQTVNTEMERHGYLTPGELKKVVRAQTGGAPDNLDQILTHPDAERALVLDPVRRYIQSDQLVSALWPALPRRLQKRLSGQWRRGHAVSLAELLDDCGEVRDAIEVICERYLDAQNTKKRKKDEPLTREQLLRTPLHVKPPNGRAPHTRAVMREVVGFVFSTDRHPAEEGGPIFRSEAIRQAQIQRALDEQTNNHLVRHRLKLLVGETEEEAKKHPKQRRLKGLFRDLVDSYAAGEFARIVRITIEVNREVREMSGKTAQEQAKLLGQQLAHFKSVAKKLAEDYEGLGIHVGPGLIRKGRIAEDLGWTCPYTGKPYDALDLLHRHVDKDHIIPRSDRASDSLDSLVITFSEINKWKNKRTAYRFVEEEQRKPVPGLPQLTIKPLSTYLKDVEALETFKGHDDDQRRKKNRKRLLLLRDYVEKEFTPSDLTQTSQLVRLGAQALQKQYADCEQQPVITSLPGSVTGAIRKSWNLIGCLAAANPQVLNPDELDQDGRPKVRTKTEIRGITHLHHALDACVLAFASYFLPRDGGAWELLVKRRLNADEQRRARQLLGWAAEVTKDGELRLADLPPTVKAQVCERLKERRVVQHLPADLSGLRCKETVWRIFDPADPHPNSRQLARWLAQKNVPVPAADAKTALIICRKRRNSDPEGEDGAGGKVFRETKTWRWVYDIKDKTALLGLTPAGDPAAAKLKRIKGVKVLGDNFGLALDPEPTLIRPHKVWHQLDALRIRNHGKPVRVLRIGCLIEVKEKTPRSDYRGVWMVRGVQLNQRSGYLLDLSPADQILYRGQPGCFQQVSVATLLKCGLKILKTPLCGVPPASEIMQRNISKSGACPTTSSA

SEQ ID NO: 15887 - protein, 1564 aa, unidentified
  REGION 1..1564: note = Cas Enzyme sequence
MKTISPAPDLELAFDVGHSSIGWAVLQSVGRASSRAETPRVNILGCGVVTFPADDCLAIDRRNKRRQRRNIRSRKQRIERMELLLEAMGVSGIKQQHLQGKGNKKGAAGGFSFPWLLAARLLAAPESGRQKHLLTWPQLWDVLRWYAHNRGYDGNLRWSGDYVVHGYSPENKLHADVLGGMTKKPKSPDEAEDGSTEKTPKDKKEGEEDDSEKLKMGARLMGEYDFPTLTFAESVAKFLLGPDRTVAPPKLPGEAGQLKNTTEKFTKEEFHHKLFGLAEEYRNHPKHLQNYYKGLKAAFPRRHIVEENGKRILAGGTEWEVHTIIRAHFNAPKGKANCDATFERAICGDMPENSDDWKAYEKKFPQLYLSSADKTKLKQLRGSKPDSKEDKERKQSERKKITFSKIILPKRYQGGLLFGQLVPRFENRIIAECPVTYGRKLPMLLRLIDGEKPYSEADVWLDEYNKGKNKNETQLDLEIAFFQKKLAKLPATVTSDGKTQLAKDFAADLAKVPGKNNLAFLDYRWAMLLANIKIRKPDIFQNGETLRPLTAKERKDVDAAVRKLGFLKYQREERDKKTGKVTKKEINELAGIIKDITGCDIGDTNLDGFFIPPDMREALKFVPIEKGGEAFQFVWKHLDDRPDKPDGQLRRRFIIQLLNGKVLTAEIICGELRKLKLSEIADAIESDARTKTADKKSKPDGEKFKKLMFAEFNCKKLEGRARYHHDVLRQVWHEVMRGEDPRKKIGDEIFLILAKMPKKRDGCLVIGNEPQRLLDEKPLASQSNNHLVRQRIQVLAGNMQLHSDGTIRRDKQTGNIVARNSLLDDILTEFAEGKTAEDRMAKVARITIEVTRDLQEMSGKGNEAKKQIEGWKRSEHRKIANMLVEKLVDSEGERLKVNGVPVKIGKFINKAWIADDLDWLCPYTVGGSPIMIEPRDLVFPRDDYHRLEREHIIPQSKRVSKAMEAQVVSFRAVNQMKGQRTGLQFIKECRGRPVPGLPGRRVRTEEEYRVFVDGISIKGATKHDIVRRKKRKELLLTEHWNEQEFVPRDLTNTAYVVKLAAEKLRSRFRHLGEKAPSVVYVPGSVTSTFRDKSWRMFRELAAVHPGVKAEMDKGDERFRIGFDGDSQKERKETGKQIQSLGAGLKKFLETFGKESFIEAEKDAKNKELDSLFQDCGHPELRRKVFWLKSSFNLKQAMREITHLHHAVDASTLGLVTHYLVPPQCGSLDGTLAKYIVKGSLNNTERKDFEQIYYSLQLSSFFEFEQERRLRFVGKDYEEQQGNRENFIASCGEELRELIDKDAREPISPDERARFEKLVSELGLPRLFYFDTKSRLHIRDLSNEMKQQLHTMLREAMNQRMAQHVPADMSVMSVKENIKGYEELDDKWVLVHQQERDAITGKPKKKKPQKVAKDKLVGLDGIQGKLAAVKGVLEVTENMAVAFVEQSKDQEEPPPMLVIPLHGAWKRLQKFRGDHPRQCVILIRKGALIRFTTGLHSGPIWKVFGVDNPQKEGPQLKIAAIDTVSLQDEPKLNYKRLTLRNRWQDIELIRPPFTGISPRPTISSG

SEQ ID NO: 15888 - protein, 1088 aa, unidentified
  REGION 1..1088: note = Cas Enzyme sequence
MAISIKKNLMGTKTIQDLELSFDVGHSSIGWAVLQSSAGVSPVANAPRVNILGCGVVTFGADDCLASKRRDYRRQRRHARSTRHRIAQMEKLLAHLKVLSAEQLKQKHQQAGGHTAPWFLAARVLASNGDAKHLLDWPQLWDVLRWYAHNRGYDGNRRWSAQEAEAQSEDTEKEKQAIALMEKHDTTTMAETLCKALGLEPLGDRQSSKDNFKRLNAAFPRPIVEKEVRRLLELQQKKLPAITDAFLKSLFEDWRAAKISDLKLPDRYQGGLLFGQLVPRFDNRIISTCPITGEKVPSKNCPEFLNFRWAMTLANIRVAGAKEKELRSLSAAERKQINAVMESEGALTPKELTKLVRETTGCTRDNLDTMLMHPDAKDGLLLNPIQKLVRGDKLKTLWPTFSPRVQKRARDLWERGKPVTLERICSITKKLGESLANFEAELNKLADSANTKRSKKGGSFNRDDLLKEPLTIKKSDGRAAYARPLLVRAYAEVMAGKHPKEEGGCLFITEEMRQAQLQKQIDHQTNNHLVRHRLLILERLLKDLIAEPAFANGDKSRIARTTIEVNRDLREMSGMSAQDIKKDLGRRLDNHHKVAAKLEADLDGRTFNGKPIQITAGLIRKARIAEDLGWTCPYTGKTYDAIDLVSRQVDKDHIVPRSLRPSDSLDSLVITFAEVNKMKGQRTAWEFVSDEQGKVVEGSPQLSIVSLTRFKQWAEGLETYKGHDDDKRRKKKRKELLLLPNYEEKGFVPRDLTVTSQLVRLGAQIIKKTFAGSEKPPMVVSLPGSVTGTVRKGWNLLGCLELAAPQVKEADGSIKNKTDIRDVTHLHHALDACVLGLASHYLPNNGGLWEVMIKRNPNDAEKALLRSTGYFDFDSQGRFGLTELPDALKEQIRQRLAEKRVVQHIPADMSGMRVEENTRGITAIKDGRVFLRQQTRDAKTGKLSVKPTEESANKVIGLKPGKLTPQKGVRVITDNFGVAILDHAAEGEEKFVIVPWHKVWPRLQELKKRNSGKMPCLLRNGQLVKLATGKRKGTWRIFSIKNNSSGLALDLGLPDELYPSWINSLLKSLLRDGLTLFQTSFTGCEKSA

SEQ ID NO: 15889 - protein, 1121 aa, unidentified
  REGION 1..1121: note = Cas Enzyme sequence
MSIKDKISLGTDANLQLAFDVGHSSIGWAVLQSSTGVAPVSVKTAKDNLSVNILGCGSVVFRADDCLASSRRAYRRQRRHIRSTKQRIARMKIILKQLGVLKENELNQLGCAWPWQLAARVLQGGKSLTWTELWDVLRWYAHNRGYDGNRRWSAAEAEAQKEDSEKEANARTLMGKHGVHSMAETFCKELGVEPLGKKKSSMKRFKGLNAAFPREVVESEVRKILQMHSGKLKGVDANLEKVLFSDWCAIPCPDLKLPKRYEGGLLFGQLVPRFDNRIISTCPICDQKVPSRNCPEFLNFRWAMQLANIKVGKNKDRELQPLKAEHRVTLDKQMRERGYLTPKELKDAVRSITSCERDNLDTMLMHPDAKEALLLDPVQKLICSDDLQPFWKLLPERLQKRLRGQWRRNKVFTLAQIRKQLESLGDVSAFDAELQKQLDTQNSKAKKKEKQVTHEELLQKHFPSKPLKLDGRAAFARHLLKQAYEDVLAGKPHPKEEDGCLFITEKTREAQLNRAIADQTNNHLVRHRLLILERLLADIIKEYAAGDKKRIGKITIEVNRDLREMSGKTAKEKAQDLGLRIANHHAVAEKLEKAFAEERNGKSIPITAGLIRKARVAEDLGWRCPYTGVDYEPKDLVTRRVDKDHIVPRSERASDSLDSLVITFSAINKWKGKRTAWQFVSDEQGKPVPDLPNLSIVSLTRYKQFVESLETYKGHDDDKRRKKRRKDLMLLPKYEEKEFTPRDLTQTSQLVRLGAQVLRKNLPHLTTGDVTSLPGSVTGTVRKAWKVLGCLATANPQVLDENGDVKNKTDIREITHLHHALDACVLGLASYFIPNNGRVWELIVKRNPNDLEKRQLEALGVFGFNAENRFEMHDLDNKLKEQIRQRLAEKRVVQHIPARMDGLRVEQNTWGVGPKNQDGTVLVHQRIRQPDGSRKKKEVPEKKVKLLGLTPSSDVGKLSSNNGVLVIPDNYGVAILDHAEDKEDKFVIIPWHKVWVRVFKGFKDKDGKVLEKSLVERNGGKMPRILRNGQIVRVPRGTYKDKGAWKITSIKNQKSGIKLNLGQPDTVNTEEEVLDSEAGKKVRKVRPDCKHEASLVSIVSGGLQILTLPLTGFCIQPLGTK

SEQ ID NO: 15890 - protein, 1118 aa, unidentified
  REGION 1..1118: note = Cas Enzyme sequence
KDKISLGTDANLQLAFDVGHSSIGWAVLQSSAGVPPVSIKQKENAPSVNILGCGSVVFRADDCLASSRRTYRRQRRHIRSTKQRIARMKIILKCLGVLKENELNQPGCAWPWQLAARVLLGGKSLTWPELWDVLRWYAHNRGYDGNRRWSAAEAEAQKEDSEKEANARTLMGKHGVHSMAETFCKELGVEPLGKKKSSMKRFKGLNAAFPREVVESEVRKILQMHSGKLKGVDANLEKVLFSDWCAIPCPDLKLPKRYEGGLLFGQLVPRFDNRIISTCPICDQKVPSRNCPEFLNFRWAMQLANIKVGKNKDRELQPLKAEHRVTLDKQMRERGYLTPKELKDAVRSITSCERDNLDTMLMHPDAKEALLLDPVQKLICSDDLQPFWKLLPERLQKRLRGQWRRNKVFTLAQIRKQLESLGDVSAFDAELQKQLDTQNSKAKKKEKQVTHEELLQKHFPSKPLKLDGRAAFARHLLKQAYEDVLAGKPHPKEEDGCLFITEKTREAQLNRAIADQTNNHLVRHRLLILERLLADIIKEYAAGDKKRIGKITIEVNRDLREMSGKTAKEKAQDLGLRIANHHAVAEKLEKAFAEERNGKSIPITAGLIRKARVAEDLGWRCPYTGVDYEPKDLVTRRVDKDHIVPRSERASDSLDSLVITFSAINKWKGKRTAWQFVSDEQGKPVPDLPNLSIVSLTRYKQFVESLETYKGHDDDKRRKKRRKDLMLLPKYEEKEFTPRDLTQTSQLVRLGAQVLRKNLPHLTTGDVTSLPGSVTGTVRKAWKVLGCLATANPQVLDENGDVKNKTDIREITHLHHALDACVLGLASYFIPNNGRVWELIVKRNPNDLEKRQLEALGVFGFNAENRFEMHDLDNKLKEQIRQRLAEKRVVQHIPARMDGLRVEQNTWGVGPKNQDGTVLVHQRIRQPDGSRKKKEVPEKKVKLLGLTPSSDVGKLSSNNGVLVIPDNYGVAILDHAEDKEDKFVIIPWHKVWVRVFKGFKDKDGKVLEKSLVERNGGKMPRILRNGQIVRVPRGTYKDKGAWKITSIKNQKSGIKLNLGQPDTVNTEEEVLDSEAGKKVRKVRPDCKHEASLVSIVSGGLQILTLPLTGFCIQPLGTK

SEQ ID NO: 15891 - protein, 1091 aa, unidentified
  REGION 1..1091: note = Cas Enzyme sequence
MPPKLEFAFDVGHSSIGWAVLQNNAGALLVPNGTRMNVIGCGVVTFGADDCLASKRRDYRRQRRHARATRQRIAQIEKLLAHLKVLTSDQLKKKHDQAGGHAAPWLLAARILASNGDEKYLLDWPELWDVLRWYAHNRGYDGNRRWSAHEAQAQADDTEKEKQAHTLMEKYGTDTMAETLCKALGLEPLGDKQSSKENFKRLNAAFPREKVENEVRRLLDFHQKKLSAINEVFLKSLFEDWRAAKIPNLKLPARYHGGLLFGQLVPRFDNRIISVCPVTGEKVPSKNCPEFYRFRWAMTLANIRVSSNGEKELRPLTTDERKKINAVMENDGALTPTQLKKAVRETTGSARDNLDTMLMHPDAKEALLLDPIKKLVRGDKLATLWPTFSPRVQKRARDLWLRGKPVTLKQICSFAKKLGESLANFEIELNRLTDAANTKRGKKDGAFSRDAFLNEPLTVKKTDGRAAYARPLLIRAYAEVMAGKHPKEKEGCLFITEEMRQTQLQKQIDQQTNNHLVRHRLLILERLLKDLIADPAYGNGDKTRIAKVTIEVNRDLREMSGKSAKEIQQDLGRRLANHHSVATKLEKDLGGRTFNGKPIQITAGLIRKARIAEDLGWACPYTAKTYDAIDLVSRRVDKDHIIPRSRRPSDSLDSLVITFAEVNKMKGQRTAWHFVSDEQGKTVEGLPQLSIVSLTRFKQWAESLESYKGHDDDKRRKKKRKELLVLPNYEEKEFIPRDLTVTSQLVRLGAQIIKKTFAGTDHPPLVVSLPGAVTGTVRKGWNLLGCLELAAPQVKEVGGGIKNKTEIRNLTHLHHALDACVLALASHYLPNNGGLWEAMIKRNPNDAEKVLLRSTGYFDFDSEGRFGLTELPGQLKEQIRQRLAEKRVVQHIPADMGGLRVEENTRGIIAIKDDRVFLRQQSRDLKTEKLSIKPTEESVSKVIGLKPGKLTPQKGARVITDNFGIAILDHAAEGEEKFVVIPWHKVWPRIQELKTRNAGKLPRLLRNGMLIRVPNKAGRSDYRGTWMIRGTKFNRKSGVLVNFTAPDTIETVGSGRNDIFENVRLQALTDGGLEILKTPLTGMVSSIAQPG

SEQ ID NO: 15892 - protein, 1205 aa, unidentified
  REGION 1..1205: note = Cas Enzyme sequence
MKTSPPPAAPNLELAFDVGHSSIGWAVLQAAGRASPRAEAPPVNLLGCGVVTFGADDCLASKRRQYRQQRRHARATRKRIELLARFLSHHLQGENDPATTHFREQLKPYLEQTAATRQMQGDGDSFAWQRAAEILAAARESKPLPDLGWSELWDVLRWYAHNRGYFAPPWANRGDESAATDTDDEVPDTEKVEHANALMRELGTRTMVETIAAYTLRYEHEAAQWQQGQRKEKPKHFKGLNAAFLREKIVWPEVHALLTALKSKLPKLDDTLIRTLLGSDVDPMKDRDAWRTLPCPAIKLSGRYHGGLLFGQVIPRFDNRIIGVCPIHYAKRRAELLAAGFSPADAQKEATKQSKLPSKGTPEFLRFRWAMQLANIFGAKPGERETRPLSANERKQLTEHAERQGAFTKGEFKQAVREITGWPEKPSRDNLDALLLHPDAEKALVFDPAQREIHNSKLATALAALPERFRKRLLGKLRRGQTISLKQVRDWLTGADADAFDAEVQRLIEAANTKRSRKQAPPTRDELLAEKLAAEYPKGRAPYARPVLRQAFEEVMKGWDPRAEKRDNQPRGCLCQTDELKEAQLQRRLEEQTNNHLIRHRLLILERLQRDLIAAPEFANGDPSRIAGMTIEVASDLRDLSGKDREAQKKELGAKLGDFKRVAAKVEEACKRRNLRVTAGIIRKARVAEDLGWRCPYTGKEFCIDTLLDGVMDKEHIIPHADRQSDSLDSLVITWNEVNKWKGKRTAMEFIREEGGKPVPGRPELEIMSLAVFQKHVANLDTRKGHDDDRARKKRRIRRLLTEHYEEKEFTPRDLTVTSHLVRLGAQVLQRAFPKDQRPPVVSLPGSVTGEVRKAWRLTGCLEAANPAVMEEVEERNPDTGELQKVRRPKKKDEIRGITHLHHALDACVLALAAHFFPRNGTVWATMVKAGVDREADDDRRLWLAMTKRRPTPQEAALLKATGLYKADAEGRMHLDELPLELRNQLRQRLAEKRVVQHVPADMSGVKTEENTRRVLRVREDGRVDLRQQAPRDAKTGVRPPPKTTEEAAGKLLGLNPANGGGKLKRQNGVRVITDNFGVAILDHAPEGEDTFVIIPWHKVWPRLQELRAKNSGKMPRVLRIGTLIRVPQKAGRSDYRGTWMIRGTKLNRKSGVLVNISFPDTIETEGSGRDDIFENVRLQALVDGGLEVLKSPLVGIASKPELPT

SEQ ID NO: 15893 - protein, 1254 aa, unidentified
  REGION 1..1254: note = Cas Enzyme sequence
LIPVKCLSKLIAYSRGKIMGAKTIQDLELAFDVGHSSIGWAVLQSVGRESARTDSPRVNLLGCGVVTFGADDCLASKRRDYRRQRRHARSTRHRIANMEKLLAHLKVLSAEQLKQKHQQAGGHSVPWFLAARVLASNGEKKHLLDWPQLWDVLRWYAHNRGYDGNRRWSAQETEAQAQDTEKEKNANALMAQHGTQTMAETLCKALGLEPLGDQQSSRKNFKRLNAAFPRSVVEKEVRRLLELHQKKLPAINDAFLKSIFEDWRAGGVPDLKLPARYQGGLLFGQLVPRFDNRIISTCPISGEKVPGRNCTEFFNFRWAMTLANIRIGFGNEIYANGEKLRRLNPSERAKVDALVRKLGFLKLETDKPDKAGLVRKGKNELLEIILAETKCNRHNLDSLLFTDEFKESLKLTPIEGDSTAFRIAWGSFGDPQHDATGNYHDDSLRHRFTTQLFRGKKEKPKMLTLREIIRQLEKLGKTDVISKIQQAVELEIKGKKREADPVKIEALLDAKFYGDRLNGRARFSREKLNEAFRQIFHKTNPIHPLESGGCLEQTDKIKAARKQELAQQTNSHLVQHRLLILAGNINAKPKAKEGLIQHLIAEFAGGDKSRIGRVTVELARDLQEMSGMTNQDKKKAIGLKLSHYKQVSESLAEKLRDAEGNLLKGPNGKPFFSNPGLIRKARILDDLENKCPYTKQDIEFIHLVTGHFRNGVSHTVDKDHVIPRSQRLSDALEAQVITFSEVNRMKGQRTALEFVKQFGGKQVDGIPSLHIRSEADFRSYVNSLWPSKDPFKRAHASGAKVSDDEARCWRRKKLLLTEKWEGKEFTPADLAKTRHIVKLAKQQLETVFFDLPKEQQPPVISITGAVTATFRDKGWKLLGELAAVHPMVKETLEKGRREENEGKIFNPKKAIREITHLHHALDAIALGLITNYLVPAKHQSLDGELSRLIVKGKLTIDKEKGIDELANLQAICSKLFIKLPLQVDSKNLLHVEDLPDEIKIQIRHELAKKRVAQHLPSDMTGLGKRIRQNTTGILRVISPLGETLWKKESNSDEELESLRQEIAKAKNRDEFRLEITAPVGEEDEGDAPAKVKKTAVKSISHVLGFLPTGGKGKLTPQRGVREIRDNFGVAVLNHAKDAEDKFVVIPWHKVWHRIQTLQARNDGKPPLILRIGTLIRVIKPKNKEYEGVWMIRGAQINQRDGYLVDMSRPDIIDSRKNGKPNVRLQSLVDGSLEILKTPLNGIPSGPIKPQESAA

SEQ ID NO: 15894 - protein, 1107 aa, unidentified
  REGION 1..1107: note = Cas Enzyme sequence
MSITQTTIAFDIGYASIGWCVLNSQNNNPDPEILGTGVVTFPTDDCLASKRRDLRRTRRHIRSTRQRIERLKLWLSSCGLLSRADLDKPGHPAPFLLAAAALQGHRKLNNHELWTVLRWYAHNRGYDGNSLWARDESNDDDTEKETNAKSLMAKYGTKTMCETVCACLELNPVDHAIRISSALPYKTLNAAYPRQIVRAEVAELLRRQEGIKPETVRMLLKSEALTKEERTNLTTAGINLPLRYHGGLLFGQLIPRFDNRIISRCPITWAKTYDEAIECGKTEKGARHLAEKFSKVPASKSAEFLEYRFARILANLRVNGEAISPDARLNLFDLAKQQGSLTPTDLKKCLTALYPKAKTNIADYFTLHPDSAKALVLDPVADAVRKASGKTSKLAPIWHLLDGDTQEKIKARWSKNQGISLAEILQMSGNADALLKELEPAYAKANKPKNGKTKFADINQYLLRTSIAPEFPTGRAPYARPVLKQVVAEVLAGSDPTKPAQKTSASEGENKPADGILYQLQNPRSRANELRAERPIDQLTNNHLVRHRMLILDRLVADLAKEFTIPENPNVIVEVARELKEFSGKTAKEISAELNSKLKDFKATITYLEKHAPDLPLNGSLIRKARIAMDMDWQCPFTGDRYDAYDLTKLEREHIIPYATRNTNALHALVLTWPEVNRMKGKRSAIQFIGEEGGKRVSNKDNLYILPAKAYETLVDKLKVTGHEDDRRRQKARKALLLTTQLEEKDLGFTDGQLTQTSQLMKLAMRGLKKQFPAAQIDPIPGPVTAEIRKVWRLIGTLSLVCPEILDPEGKPKPKDEIRSLTHMHHALDAATLAFISHYFPLRQHGQDQTGKLWKAMLKRNKSSEEIDLLARTGIYRRAARPRLQPDGSIKEQADAQLRDLSPDIKNALAHSLAQARVMQHIPADRSGAKAELTTWGVVKKEGEGEDARFTLRQNSSVVEDGIRIRTAKERDERAGKLLGPNPKNDKGKLAEIKGAMIIGENYGLALDPTPTVIPFHNVTARLAELRKANGGKHVRVIRNGNLINVVNWPGKNGNWKVMSCKASMKLDLAQPHETKSSWREVAISSLLSRGVIILPQRYTGNPTSGL

SEQ ID NO: 15895 - protein, 1037 aa, unidentified
  REGION 1..1037: note = Cas Enzyme sequence
LKLWLSSCGALSRADLDKPGHPAPFLLAAAALQGHRKLNNHELWTVLRWYAHNRGYDGNSLWARDESNDDDTEKETNAKSLMAKYGTKTMCETVCACLELNPVDNATRISSALPYKTLNAAYPRQIVRAEVAELLRRQEGIKPETIRMLLKSEALTKEERTNLTTAGIKLPLRYHGGLLFGQLIPRFDNRIISRCPITWAKTYDEAIESGKTEKEARHLAEKFSKVPASKSAEFLEYRFARILANLRVNGEAISPDARLNLFDLAKQQGSLTPTDLKKCLTALYPKAKTNIADYFTLHPDSAKALVLDPVADAVRKASGKTSKLAPIWHLLDGDTQEKIKVRWSKNQGISLAEILQMSGNADALIKELELAYAKANKPKNGKTKFADINQYLLRTSIAPEFPTGRAPYARPVLKQVVAEVLAGSDPTKPAQKTSASEGENKPADGVLYQIQNPRSRANELRAERPIDQLTNNHLVRHRMLILDRLVADLAKEFTIPENPNIIVEVARELKEFSGKTAKKISAELNSKLKDFKATITYLEKHAPDLPLNGSLIRKARIAMDMDWQCPFTGDRYDAYDLTKLEREHIIPYATRNSNALHALVLTWPEVNRMKGKRSALQFINEEGGKRVSNKDNLSILPTKAYESLVDKLKVTGHDDDRRRQKARKALLLTTQLEEKDLGFTDGQLTQTSQLMKLAMRGLKKQFPAAQIDPIPGPVTAEIRKVWRLIGTLSLVCPEILDPEGKPKPKDEIRSLTHMHHALDAATLAFISHYFPLRQHGQDQTGKLWKAMLKRNKSSEEIDLLARTGIYRRAARPRLQPDGSIKEQADAQLRDLSPDIKNALAHSLAQARVMQHIPADRSGAKAELTTWGVVKKEGEGEDARFTLRQNSSVVEDGIRIRTAKERDERAGKLLGPNPKNDKGKLAEIKGAMIIGENYGLALDPTPTVIPFHNVTARLAELRKANGGKHVRVIRNGNLINVVNWPGKNGNWKVMSCKASMKLDLAQPHETKSSWREVAISSLLSRGVIILPQRYTGNPTSGL

SEQ ID NO: 15896 - protein, 1104 aa, unidentified
  REGION 1..1104: note = Cas Enzyme sequence
MKTSSLKVCVAAEAKPDSKLHLAFDVGHSSIGWAVLETGFNEIPELKGCGAVVFPANDCLASQRRLFRRQRRHIRATRQRIERMKVLLGHLGVLTREQLDANERSWPWLLAARVHAGGQRLTWSELWDVLRWYAHNRGYDGNKRWSAAEAAAEAEDTEKVNNARELYSKYGTTTMAATFCAVCGLDPLGKKRACALPGNKRPKGLNAAFPREDVEAEVRSLLETHVGVLPELGEGLIRSLFDDWRAIPCEGLKLPGRFRGGLLFGQLVPRFDNRIVGRCPIMFERVFQETLRETGDGARAKKKAEKAAKTPSKECREFYEFRWAMQLANVMVCGPDGKTVRLIQNKDWRRLVDAKMRDSGFLTPGDFKKVVREVTGGAPSNLGQMLLHPDAQKALLLDPVKKMVGGDSLIGKLWGLLPDRVRKRAMGKWRRGKTPTVTELLADIPQADRREIDAVIQRHLDGEGLRRRKKDSGFVPEKLLAEPLRVERLSGRAPYHREVLREAVSDVMERGIHPTEEAGCLYRSEAILNAQLQRGIDEQTNNHLVRHRLLILERLHRDILKEYAGDDKERVGRVTIEVNRDLKEMSGKTAKEVAQDLGKRLANFKGVSERLERAYEGKNVQVTAGLIRKARIAEDLGWKCPYTGKGYDEFDLLYRNVDKDHIIPRSQRPSDGLDSLVITFTEVNRMKGKRTAFRFIEEEQGKTVEGMPSLNIKTLSGYTKDVESLESFKGHDDDQRRKKNRKRMLMVRDFVEKEFIPGDLTQTSQLVRLGAQTLQKQYLGSQNRPAITSLPGSVTGAVRKSWNLLGCLSAANPQVLEPATGEVRTKTEIRDITHLHHALDACILAFAAVFLPGRGRDGEGWKLLVKRRLNAEEQRRARELFKTYVEFEKDGTLHLIELPFPLKEQIRHRLAECRVVQHVPAEMGGLRAEQNAWRVVSIENGEALLRQRLRQPDGSRVTKETREKIDKLVGLNPGSDTGKLERNKAALVIPENYGLSLDPEPTIIPFHKVWPRLEALKAKSGGKNPRILRNGSLIRVPRGKFSGVWKIFSVKNNSSGMALDIGRPDVVRLRNKVEGHKINVLLASLLRDGMGVQRRSLTGIRASG

SEQ ID NO: 15897 - protein, 1044 aa, unidentified
  REGION 1..1044: note = Cas Enzyme sequence
MNGSASSGDFLGGLVFGFDVGTGSIGYAVRKGAEFLDVGGLICPEDTNDLSGRRGLRRQRRTLRSRKYRREWFAAELAKLGLPKPAQSPHDPITLRLRGLKGEELKPEELHAALTHLFKRRGYSKVPWANTEARRTEGDAEKEEGKIKDAVAEITKKLGVLHPCQYLVKRRGEVGKSPTENWARKIYWPREVLRDEFLAILKAQENRFPELAKKADWLLYGDAHEVKGHHVFFTASESRNPGVLGLRWPRFDNRGPALDSFQPVDKQGRPLHVVRKNKEAFTKAQWELAVLNFRVIEVATGTLVAPDAKALVRLREMWESCQRKPRKPKKGSVGVPPTVSGVWPSATSDVKVSESLLKKWATEFATRYRLVEGQQPLTPQTGAGRARFASPTLNRLREIIAAGQRPETAQPVLRRAGESADAALNRYLSDIKHPLVRHRLVLFRRLLAELVKRFGPPDLIVLEAVRSLALSEKNKRELQNRIKENRDERASVRNELASRGASTSRNAILRFRLWKETQSTCPFCGDKITQEQLLNGEADIEHLVPRSVVDCSEFYNLTVGHIRCNRELKGNATPIQAFGNTEKWPQLRANAEKCFKGRKLQIFLSDKAEELIEQKADLQHTAYIARVIRHIALLQLGWLNDEGRDPTPDKQNSALRFQVTNGQLTSRLRKAWGLNQILHPLPPGKRWDELTEAEQKQFTEKNRGDLRHHALDAMVIACTLPWLAHRTHGATDEFGNHGWWTQDEKQRSKAANPIFPCEGQMHEVVKREIGKVVVQHHASRSNHQQGYNTTLYAKKDKDAYVVRKPFTSLTVKNLSSIYPKELAAYCEAAWERYAEESTDINAELKKTDKHIPGNFTKKLCFSHFQRWRADSAPAFHWPKTVKIPMKSIRLVAIKDDRAVVPFSKGTRAYVERTGFKEVRIHRSEDGKGFVPVFVPYWKGDAPFSSYPFASDSKPVAVIRKGQVVELKKPLAVGAPGGKYRVLVMGQEQIKILPPHVANKDEAKLAFQLPKSGLQPYWPEFIRCLGYELPHPPSAQSQSSSPAET

SEQ ID NO: 15898 - protein, 1048 aa, unidentified
  REGION 1..1048: note = Cas Enzyme sequence
DIGHRSIGWAVLKKEVQEATPEVLGCGTVIFRGGDCLNSQRASLRRSRRNIRATRSRIRRMEKALAHSGVLPQEQFDRLHAAGKGDPAPWWVMARWLTGVIPSLSPGEFWQILRWYAHHRGYDANRRWIKEDGEEDSKRTEETRKEMAKAGANTVAEFLCLKSGCKPSDRQPAFGKAFRGSKDSVLFARSTVEAEVRKMVDAHIGKIKGLDANLRNTLVGEADGSWGSTAWFGDKRLPKRYRGSLLFGQLIPRFDNRIISACPFEPEPNNKEVGRKVPSKANWEFLNFRWAMTAANIRIRVAGMERALTSDEMKKFFQACWDEGDIKPATGKDSKIQKNSDKLRAILKKAGLDFSSGDNLDQLVVLPDSLKAFRLVPIGSGLKAFRAIWACANDFQRRWLRNRLLKGDELTPAEIFAKPQPIFVEWKRNAATQTLFQGKDSVLLNESFKGEVPDGRAAYSRPILIKAFEEVMNGKDPREMKGCLFRQGETALEAAVPLDRRTNNHLVRHRIRIAEKLRKDIVKEYAGGQAKAFGQVVIEINRDLPSLSGKNAKEVASAESAKLKNFNDVKKQLESSLAGHKVHMTAGLLRKARIASDLDWTCPFTGQKYSAVELVRGVYDKDHIVPRSSRVSDSLSSLVVTKREVNKFKGNRTGLQFVKEEGGKKIPGTSLSVVSEDRYRSFVENLQPPTRMKDDVRRSDIRKRLMLTAHAPKVDDVGFLPKDLTQTSYLAKLALQELRKGFAADGAKVDVRPLPGLVTATARKTWKLLGCLVPACPEAKDAAGSNDKQAIRKLTHLHHALDAVVLGLSGLLLPREGNVLAALAARNQDEPSRRLLKSKMGEMIVISEDRAQLADLPKVLKDSIGAKLAEGRVAQHIPGTWSGTKSGPTMWGVVEKNEGRVTIRQRNKGMSSTSKTDNKGEWKSLVVPLESVIESSSLSGVLRIEENYGVLLSNPPEILPWNCVYRRLRKSKGLRVFRKGNLLNIPKGRYAGIWCVAGLTLNTKSGILLNLRKPPATDESYENVSLKTLQNNSMEILSSKLTGCPITL

SEQ ID NO: 15899 - protein, 1146 aa, unidentified
  REGION 1..1146: note = Cas Enzyme sequence
LEKGIIKLLSGGKQDLSNMFRDETLKNSNYKNLKFSDNRFDDERDGYAADLGDRINLLILLKQIYDASILESMMSQARVSIDGHKYISSAKVCAYEKHKSDLKRLKSLIKKYLPSEYNNIFRKITEKDNYVAYSKSNITNNKREKALKYVEYVDFTKYLTKKLKTIKTQDAEDDKEIFEIKGELEKQSFLPKQRTLDNSIIPYQLHLMELKKILDNQSKYYDFLLAKDDQEGITVKDKIISLLTFRLPYYIGPVNPAVHGKFAWVKRLANGKVTPWNYKEKIDIDASHEEFIKTKLSKCSFLIGCDVLPKNSLLYQKYMVLSELNTIKFNGVNISEKLKDDIYQNLFKNIQKVTKKRLQNYIKEHENIIGDVIVTGIDNAFKQGLVSYLKFKKIIGDKIDDDRYQKVLEKIIRDITLYDECAGKKIKKEYKDSDLFTEDELNKIVKLTFNDWGRLSAELLDQLEGEDTVSGETGKIIEFMQKHNYNLMQLMSKKFTFKYKIDEINKSYYQHDKFNYKSMIDSLYVSPATKRILWQSLKVVHEISKIMKHDPEKIFIEMARSKEDHPKRKLSRKADLKQVYKDSKKQIISIIGKDKYQDLSNELDNKDDRDLRWDNLYLYYTQLGRSMYSLKPIDISELMNKNLYDQDHIFPKSKKYDDSIENRVLVEKELNVKKSDIYPISDANIIPQKIKGQVESFWKMLYDHKLIGDKKYARLIRSKAFTDDELAGFIARQLVETRQATKETADLLKRLCPKSRIVYAKAQNASIFRQKFDIPKSRTINDLHHAQDAYLNIVVGNIFDTKFTQDPRNFIKNTKDSRNYNLEKIYDYNVERNNYVAWIAPDSKTNGTIANVKCNLSTKDFRVTRPSFYKKGALFNQNLSRKGSNLAPIKEHSPKSNPLKYGGYSGKNNSFFVVVAGKDNKGKDIVKLIPVNTLIYNKMLHCDYKAKQELLTSYVANNFAINNFRIVKDDIKMYSLVKIDGAYYYLVGGTDERIEVKNAMQLLLSKDSIKAVKILEKESKDQFANIKNYKDIDIKLGRTFNEVVSKYTNSVFGKSMLISDKYRKDIFKSVDKSILEFNSLNTIAKADNLLKFVTSMRPAGSVDALKMVGLIERIRKSNVISNFNEFKLINQSVTGLFENEEDLLKL

SEQ ID NO: 15900 - protein, 1332 aa, unidentified
  REGION 1..1332: note = Cas Enzyme sequence
MKNFNNDYYTGFDIGTDSVGYAVADTDYNLCKFKGNAMWGVDLFEESNSAAERRTLRSARRRGLRKRNRIEWLQMLFDEEISKVDNAFFQRLKESCLYLDDKSSNVPYAVFADGNYTDKEFHTDYPTIYHLRKELIKSSQPHDIRLVYLALHHIIKHRGHFLFDNMGSDFESESSFETLFDDLKLYLKEEYEIEFECNDSLRFSEILKDKTLKKTAKSSESYKLFGYSKRNNPYETALIDLMCGRNVGFSDMFGDKSFDSEEVNGITFESGYDDNENTYRDLLQEKFEPIEKAKAVYDWAILADILNGEKYNGKKYISFAKVKTYEEHSSDLKMLKDFVKERCKSLYGEIFRITKDKLDNYTAYCGKYKENGRNGVIQYRTNQADFCKYLKKRFEKLDKTGYEEMFDKIENGTFMPKIVVKDNGIIPMQVNRSELKAILKNASTYLEFLNKKDENGISVSDKIVKIFEFRIPYYVGPLNNHSLKSWLVRSDEKIYPWNFDSVVDIEQSAENFINNLTSKCTYLPTKDVIPKNSILYSAFTVLNELNNLRLDGKKPDVSLKQAIFNDLFMTHKKVRRKDLLNYLKSEKGITPDITGIDGDFKSSMRSAIEMSQFNLTDSEKEDAIKAITVFGDDKKLLRKRLKRQLGSKLSDEDIMRISKLKYKDWGRLSKEFLTEVYNVDKNTGELQFNIIHALWQTNDNLMELLGSKYGFEQSRQNYLDGIQTGQSLEKMVENLYISPAVKRPVYQSLKIMHEINKIQGHAPEKIFVEMTRKDGVKGDKGRKESRKTKLVDLYKKCGEDSGELWESLEKTPDDEFKRDRLYFYYTQFGKCMYTGEPINLSELYNQNIYDVDHIFPRSKVKDDSLDNRVLVKKQVNAHKDNTYPLDSSIREKMKGFWHLLMDKGLISKKKYERLTRATELTDSELSDFIARQIVETSQSTKAVASLFKELYPDTEIVYVKASTVSKFRHKYDFLKCREVNDFHHAKDAYLNIVVGNVYNERCTHNKSIFIKGLQTKTYSLNKMFSFNTPNAWSIDDNKSIKIVRKTMNKNNIRFTRYALTRNGGLFKMNPLKKGSGQVSLKQNSPLSDISKYGGYDRPTSSYFSFVKYEGKKGKEMRRLVAIDSYIKARYEANPEKYLSENLGLKNPVVLIPVVKYNACIEIDGFRMHISSKSSGGKQIVYKPAMQLTVSYDTEKYIRNVVKLNSKPENYNITELDKVSADENLKLFDILTSKMTDTVLKVKFGDMGAKIISHRDAFEKLDIRKQCFVLAEILKIIHCNISEGNLRFIGGAKQSGSIKMSSVISGIKGVKSIYLVHQSVTGLFEKKIDLLHM

SEQ ID NO: 15901 - protein, 1314 aa, unidentified
  REGION 1..1314: note = Cas Enzyme sequence
MENYYLGLDLGTDSIGWAVTDKNYNIPKFKGNSMWGIRLLEGGNTAVERREFRSSRRRLERNKYRLNCLEMLFNEEISKKDIAFFQRLKDSALYDGDKNVSGKYSLFNDPDYTDKDYYKKYPTIYHLRKELIESVEPHDVRLVFLALHHIIKNRGHFLFDNDDLGKNGNFDFTAIFTELNEYIKSNSNYESEGFSCNDLKPVEDIIKNSSLTSSKKKEALIKEFALNKKVDVFEVAIVTLLSGATAKAKDLFNTDKYDDTEGKSICFKSGYDDKATTYESVFGENFELIEKLKAIYDWAILADILNGKEYISYAKVDTYEKHKRDLKLLKEYVKAYVPEKYSHIFNENSDKVSNYLSYSGYSSKNPVMKKCDQETFCDFLRKQLPKELLDEKYAQMYKEIETSSFMPKAVTKDNSVIPMQLNRAELEAILSNAKNYLPFLADRDSSGKTVSEKIIDIFKYRIPYYVGPLNKHSEKSWLVRTGEKIYPWNFENVVDADNSAEKFINNLTSKCTYLPKEDVIPKNSLLYSAFTVLNEINNIKIDGEEISVELKQGIYKDLFEKSNKVKVFDLKKYLALNGYMNIEITGIDTTIKGSLKPFIDLQNIDLSYSDKEEIIKSVTIFGDDKKLLKNRLKRLYGDRLTADDIKKISKLKYTGWSRLSEKLLTGIEAVLPSTGEYTNIIHALWETNDNLMQLLSSNYDFMKKIDEENGDSTFTSLREEIDNLYVSPKIKRPIYQAMQIVEEIVKIQGHDPKKIFIEVARDEGEKKRTVSRKQKLIELYKYCKKDEQKLYEQLCNTDENDFRRDALYLYYTQLGKCMYTGKPIELSEIYNNNIYDIDHIFPRSKIKDDSLNNRVLVLKAENAKKGNIYPINSSIRNNMLPFWKTLFDKGLISKEKFERLVRNQPLTDEELSSFVSRQLVETRQSTKAVAQLLKKRYHDTAVEYIKASLVSDFRQENDFVKSRDVNDFHHAKDAYLNIVVGNVYTVRSHLAHFIDNVQSGKWSVNKMFDYTTNGAWIVENNKSINIVKSNMAKNNIRFTRYAFKQTGGLFDQNPLKKGLGQVPRKKDMDIDKYGGYNKPSSAYFAFVEYKNSKGEIVRSFEPVDLYAEKEYIRNPQEFIKRKLGVDYVKIIIPCVKYNALISINGFRMHISSKSSGGANLICKPAVQLVVSQEQEKYIKKISSYLAKCAELRKEKEITSFDGITEKDNADLYEALKHKTNHTIYNVKFSKLANILIDKQCEFEGLSLYEQCYILMQIINILHANVMSGDLSAIGEAKKSGVTTISNKMQPSYKTVKLINQSISGLFEQEIDLLK

SEQ ID NO: 15902 - protein, 1314 aa, unidentified
  REGION 1..1314: note = Cas Enzyme sequence
MENYYLGLDLGTDSIGWAVTDKNYNIPKFKGNSMWGIRLLEGGNTAVERREFRSSRRRLERNKYRLNCLEMLFNEEISKKDIAFFQRLKDSALYDGDKNVSGKYSLFNDPDYTDKDYYKKYPTIYHLRKELIESVEPHDVRLVFLALHHIIKNRGHFLFDNDDLGKNGNFDFTAIFTELNEYIKSNSNYESEGFSCNDLKPVEDIIKNSSLTSSKKKEALIKEFALNKKVDVFEVAIVTLLSGATAKAKDLFNTDKYDDTEGKSICFKSGYDDKATTYESVFGENFELIEKLKAIYDWAILADILNGKEYISYAKVDTYEKHKRDLKLLKEYVKAYVPEKYSHIFNENSDKVSNYLSYSGYSSKNPVMKKCDQETFCDFLRKQLPKELLDEKYAQMYKEIETSSFMPKAVTKDNSVIPMQLNRAELEAILSNAKNYLPFLADRDSSGKTVSEKIIDIFKYRIPYYVGPLNKHSEKSWLVRTGEKIYPWNFENVVDADNSAEKFINNLTSKCTYLPKEDVIPKNSLLYSAFTVLNEINNIKIDGEEISVELKQGIYKDLFEKSNKVKVFDLKKYLASNGYMNIEITGIDTTIKGSLKPFIDLQNIDLSYSDKEEIIKSVTIFGDDKKLLKNRLKRLYGDRLTADDIKKISKLKYTGWSRLSEKFLTGIEAVLPSTGEYTNIIHALWETNDNLMQLLSSNYDFRKKIDEENGDSTFTSLRKEIDNLYVSPKIKRPIYQAMQIVEEIVKIQGHDPKKIFIEVARDEGEKKRTVSRKQKLIELYKYCKKDEQKLYEQLCNTDENDFRRDALYLYYTQLGKCMYTGKPIELSEIYNNNIYDIDHIFPRSKIKDDSLNNRVLVLKAENAKKGNIYPINSSIRNNMLPFWKTLFDKGLISKEKFERLVRNQPLTDEELSSFVSRQLVETRQSTKAVAQLLKKRYHDTAVEYIKASLVSDFRQENDFVKSRDVNDFHHAKDAYLNIVVGNVYTVRSHLAHFIDNVQSGKWSVNKMFDYTTNGAWIVENNKSINIVKSNMAKNNIRFTRYAFKQTGGLFDQNPLKKGLGQVPRKKDMDIDKYGGYNKPSSAYFAFVEYKNSKGEIVRSFEPVDLYAEKEYIRNPQEFIKRKLGVDYVKIIIPCVKYNALISINGFRMHISSKSSGGANLICKPAVQLVVSQEQEKYIKKISSYLAKCAELRKEKEITSFDGITEKDNADLYEALKHKTNHTIYNVKFSKLANILIDKQYEFEGLSLYEQCYILMQIINILHANVMSGDLSAIGEAKKSGVTTISNKMQPSYKTVKLINQSISGLFEQEIDLLK

SEQ ID NO: 15903 - protein, 1386 aa, unidentified
  REGION 1..1386: note = Cas Enzyme sequence
MTKIKNEYIVGLDIGTNSCGWVAMDFQNTILRMHGKTAIGSHLFDAGNSAADRRAFRTTRRRIKRRKWRLKLLEEIFDPYMTEVDPYFFARLKESGLSPLDKRKNASSIVFPTALEDKKFYCNYPTIYHLRYDLMSEDKKFDLREIYLAIHHIVKYRGNFLYNTPVKDFEASKIDVKDSLEKLNELYERLDSEFTVELDSSNALEIEKIIRDKNVFKINKVKSIHQLLSLKTENKERTKLIKDVSKQIINAILGYKTKFETILLKNISKDEADDWEFKLTDVDADNKFENLIGDLNENEQEILLVIRNLANAITLSNIVEEGKTLSESMIDKYNKHSDDLKLLKQVISDHPDRDKVKKLALAYDLYVNNRHGKLLQAKDVLGSKKTLSKEDFYKEVKKNLDDSKASQEILDAIALDSFMPKQRTNENGVIPYQLHQLELDRIIKNQGKYYPFLKEANPVSSHLKQAPYKLDELIRFRVPYYVGPLISPNESTKNKQTKKNQNFAWMIRKEQGQITPWNFDQKVDRMASANKFIKRMTTKDTYLLGEDVLPANSLLYQKFTVLNELNNIKINGKRISVPLKQELYNNLFKKNSTVTTNKLKSYLKENYNLINVEIKGLADEKKFNSGLTTYNKLRNLKIFDQQIDDLNYDKDFERIIEWSTIFEDKAIYKDKLKTIKWLSDRQIDKLSKIRMQGWGQLSKKLLSQLTDNNGQTIIEQLWDSQNNFMQIVNQADFKDAIAVANQNLLVNTSVEDILNEAYTSPANKKAIRQVVKVVDDIVKAASGKVPKQIAIEFTRDADDKAKISQTRANKLRKVYKELSNELASEAIRNELERVAKDQKLLKDKYYLYFMQLGRDAYTGEPIDIDELEQYDIDHILPQSFIKDDSLENRVLVKKAVNNGKSDNVPVKLYGNHMAADLGITIRHMWEKWKDQGLITKTKYNNLIIDPDKINKYESSGFIHRQLVETSQIIKLASTILQSKYPDTEIIVVKARYNHYLRKHLNLYKSREVNDYHHAIDAYLSAICGNLLYQVYPYLRPFFVYGQYKKFSSDPKKEKIIYDKTRKYNFISQIFENKGNDIISLETKKKVFDKKDIIEKLKHAYDYKYMLVSRETETRDQEMFKMTVYPRLSRDTKKSRNLIPKKKDMPTEIYGGYTNNSDAYMVIARINKKKETEYRVFGVPMRELVNLRKAEKKGHYNAYLKQVLEPEIMYNKNGKKNKTISSFEIVKSKVPYKQVILDGDKKFMLGSSTYVYNAKQLTLSQDAMQAITDNCENDTDEEKALIEAYDEILTNIDKYLPLFDINKFRDKLHAGREKFINLSLDVKKDTILQVLNGLHDNAVMPKIKSLGLSTELGKLQIPTGVKLSENAKLIYQSPTGLFEKRVKISDL

SEQ ID NO: 15904 - protein, 1446 aa, unidentified
  REGION 1..1446: note = Cas Enzyme sequence
MYNIGLDIGTGSVGWCLTDNNGHLLKINRKGDNGKTYRNSAWGVRLFASADTAADCRIKRSTRRRYNRRRTRVIELRKIMSEMIMPVDPNFYARLDEAFLWNEDKSDKAKAPFLLFNDKELYDIKYYKKYPTIYHLRKYLLETKEKADPRFIYLALHHMMKYRGHFLFEGQSFEAIDNIKDTFIELEQLINVYVKGKEEIEDNNKNNDKYEAIKICLADNKVKNKDKKENITDIFIKAGYDNKYSKELAAAVLGYEFNVGIIVNDNSLTDEDGKALKAKFADARYEEQEEKLSDTLGERYYVVETLKKIYSWKVLHSILGDNKYLSYAMVDKYEKHSEQLKALKYLFHKYTSQDKYNDFFHKEKCYKNDKDEKDANEEKNNNEKKCDKWKYIVNYANYIKGIKRLSNETNKKYNTKQQLYQSIKEKLGESAADDEVYKNILVEMEQETFLEKINNVDNSAIPYQLNLMEMDKILTQQGVYYKELRDNKELLLKMLSSKIPYYVGPLNNNSNGNRNFAWMTKKAGKENEKVYPWNVKDVVDIDVTAEDFITRMTNYCTYLPNEKVLPKESLLYQRYMLLEELSQIRIDGKKLSKEDRKAIIDDLFIGKGRVKVSDKDFKEYLDKVNYVKVNGKGYDVTGYQSDDGFACALSSYNKFRRILGYVDERNEKMIEDIIYWLTVFEDKDIVKRKINKQYADKFSDEQLKKILKLKFKGWGRYSAKLLNGIKGDMGTTIIEMLEDADERFAYCDYCPNFMRIINKDEKIKQIIDDNRSIYDGTKDLLDIIQDMHTSPANRRGIWQTMKVIEEIIEYMGEKPQQIYIEFAREDDFKAKNKRTDSRKKAVDKALNKLKEEVIDEYNENVYKELKQYEKRLDEEKVYLYFMQNGKSLYTEEKLNLNEPENLEIDHIIPYSLSDDDSLDNKALVLKDEKQKKGNKIVKETFPQSFSDIKMINYWKNLKKVGLISEKKYNNLQKNNVDDILTKGFINRQLVETRQIVKSVANLILDYYNEQIDVIEVKASLSTSVRKMLTYEKKDNNGFWEENKDNCMFYKNRDMNDYHHAHDAYLANIIGMYIQKNYPHLQKELNYSQYRRVWRKYYENTKNNNGVNWFATLGKFSINNKETAWYGEDIIAYMRKIFCYRDVIISKKLEENTGAFYSETKYPREDKADSKLVPLKQGNNMRGANNLKELDTRKYGGYKGGEKAYFVLVKYCIEKALKKKVKKEYHMEFVEIPVYIARDIKNKDINLYDYVCDILSEAYKNSVVDVEILRNKVPKYQMIIGENGEEYYLVGATEVINSKQFVLGGANQQYNRLLNYIMYGKNDKWQYIQTELLDEQLTGLYDLLLSKIKDEYKGFSKEAIRIQEDNSFYKLDVKNKKEFIAEMIKLVQPDSNYPYLGKYSTGLSDRMGRKSKEKVGKKITLVDKSVTGLYERRTTFELEDDSSTKSR

SEQ ID NO: 15905 - protein, 1065 aa, unidentified
  REGION 1..1065: note = Cas Enzyme sequence
MITYELKKVALQNQTDEIVWAFDLGKGSIGEAVRRGNEFLHKASLLIPAEFAETRTARDRRRMFRTREAHKAREKWLCKVMHEAGIEILHGRNYDAAGNWKLGEPAEKRLEQEFPAPGDDTCYTSCLLRIKLLRGEKLEPWQVFKAFHSAIQRRGYDKDIPWKTRESRNPKAKDGDDDDAGTEKRMHDFELALEKMAPGKTAFHFPAYFDAHEMGLWSPDKPDGLKLRSDCHAKTTRNQIVPRKLVEAEIRQMVEGAAKHYPALADKADYLLYGIAQQSYASYKPELRQKFKLREGGATDWQGVVGQKIPRFENRIIAKCALIPRLNVCKLREGEKGQPHEKSLVAVEVAFLMKLKNLRVQRPGGNGWLSAEEIRGILEDPKRKDWKITESVWRKYCVRIGAGWLLGHEEVKSPRFSGRSRFCRPALEVLKRLILSGQKPSKFLQEEIVRLNGNKDPLKGLVEADLKFIGDMAAKNDAWEGIYIPNQQLDALVELSSDSAEAITTLIGRQNDPIVRHRLSVFYKGLRELEQTTKSRPDQVVLEFVREDFMGKKAKIEYFSFIKRRAEERIKAREEAANAGATEKSAGLKLELLRAQDGCCLYTNEGLVPSRLDEYQIDHIVPRSKGGPDAVVNYALTTQKANEAKADRTPYDWFHQEMPDKWDAYVNRVRSRATHLRNKKVQLLVALNAAELADKYTALAETAWIAKLAQAIVGLHFGWRNGVDESGNKRVTVISGGLTGRIRRKYALNQILNPNAKTEEEAEKKNRDDDRHHALDAMVISFIPSWVRDAMKEKFFRFPEPIHQNAKGFFEKEIQSVKPRNIALQKAAFEETIYGQRTIDGHKFIVGRESLASLAIKTTQNSQTIKKVSDIEFGRIVDARIQKDVKEFWESNPAATLESWKKWCADYRLGANGPLVNFVLVKKSKEDAVEEYKNVSKAGVSSERGQYKRGAKHRGYYIYERPAPTRKEPNKMQVEVCPVFVFQSKKAVQENLLKQTGIKMHGYFESGCQVRTQREWEFQGKKYPADEFILGSVWANRNAKFRHPIHQEIGPVGLRILLDAGFERI

SEQ ID NO: 15906 - protein, 1117 aa, unidentified
  REGION 1..1117: note = Cas Enzyme sequence
  REGION 1106..1114: note = misc_feature - Xaa can be any naturally occurring amino acid
VQNGFLGITVSSEQVGWAVTNPKYELERASRKDLWGVRLFDKAETAEDRRMFRTNRRLNQRKKNRIHYLRDIFHEEVNQKDPNFFQQLDESNFCEDDRTVEFNFDTNLYKNQFPTVYHLRKYLMETKDKPDIRLVYLAFSKFMKNRGHFLYKGNLGEVMDFENSMKGFCESLEKFNIDFPTLSDEQVKEVRDILCDHKIAKTVKKKNIITITKVKSKTAKAWIGLFCGCSVPVKVLFQDIDEEIVTDPEKISFEDASYDDYIANIEKGVGIYYEAIVSAKMLFDWSILNEILGDHQLLSDAMIAEYNKHHDDLKRLQKIIKGTGSRELYQDIFINDVSGNYVCYVGHAKTMSSADQKQFYTFLKNRLKNVNGISSEDAEWIDTEIKNGTLLPKQTKRDNSVIPHQLQLREFELILDNMQEMYPFLKENREKLLKIFNFVIPYYVGPLKGVVRKGESTNWMVPKKDGVIHPWNFDEMVDKEASAECFISRMTGNCSYLFNEKVLPKNSLLYETFEVLNELNPLKINGEPISVELKQRIYEQLFLTGKKVTKKSLTKYLIKNGYDKDIELSGIDNEFHSNLKSHIDFEDYDNLSDEEVEQIILRITVFEDKQLLKDYLNREFVKLSEDERKQICSLSYKGWGNLSEMLLNGITVTDSNGVEVSVMDMLWNTNLNLMQILSKKYGYKAEIEHYNKEHEKTIYNREDLMDYLNIPPAQRRKVNQLITIVKSLKKTYGVPNKIFFKISREHQDDPKRTSSRKEQLKYLYKSLKSEDEKHLMKELDELNDHELSNDKVYLYFLQKGRCIYSGKKLNLSRLRKSNYQNDIDYIYPLSAVNDRSMNNKVLTGIQENRADKYTYFPVDSEIQKKMKGFWMELVLQGFMTKEKYFRLSRENDFSKSELVSFIEREISDNQQSGRMIASVLQYYFPESKIVFVKEKLISSFKRDFHLISSYGHNHLQAAKDAYITIVVGNVYHTKFTMDPAIYFKNHKRKDYDLNRLFLENISRDGQIAWESGPYGSIQTVRKEYAQNHIAVTKRVVEVKGGLFKQMPLKKGHGEYPLKTNDPRFGNIAQYGGYTNVTGSYFVLVESMEKGKKRISLEYVPVYLHEXXXXXXXXXSWT

SEQ ID NO: 15907 - protein, 1379 aa, unidentified
  REGION 1..1379: note = Cas Enzyme sequence
MSNKSYSIGLDIGTNSVGWAVITDDYKVPSKKMKVLGNTDKHFIKKNLIGALLFDEGTTAEDRRLKRTARRRYTRRKNRLRYLQEIFAEEMSKVDSSFFHRLDDSFLIPEDKRGSKYPIFATLAEEKEYHKKFPTIYHLRKQLANSKEKTDLRLIYLALAHMIKYRGHFLYEESFDIKNNDIQKIFSEFISIYDNTFEESSLIGQNAQVEAIFTDKISKSAKRERVLKLFPDQKSTGLFSEFLKLILGNQADFKKHFDLEEKAPLQFSKDTYDEDLENLLGQIRDDFADLFLVAKKLYDAILLSGILTVKDLSTKAPLSASMIEHYENHQKDLAALKQFIQNNLQEKYDEVFSDQSKDGYAGYINGKTTQEAFYKYIKNLLSKFDGADYFLDKIEREVFLRKQRTFDNGSIPHQIHLQEMNAILHRQGEHYPFLKENKEKIEKILIFRIPYYVGPLARGNRDFAWLTRNSDEAIRPWNFEEIVDKASSAEDFINKMTNYDLYLPEEKVLPKHSLLYETFAVYNELTKVKFIAEGLTRYQFLDKKQKKDIFYTFFKAEDKRKVTEKDIIHYLHTVDGYDGIELEGIEKQFNASLSTYHDLLKIIKDKEFMDDDKNEAILENIVHTLTIFEDREMIKQRLAQYNSLFDEKVIKALTRRHYTGWGKLSAKLINGIRDKKSGKTILDYLIDDGEINRNFMQLIHDDGLSFKEIIQKAQVFGKTNDVKQVVHELPGSPAIKKGILQSIKIVDELVKVMGHAPESIVIEMARENQTTARGKKNSQQRYKRIEDSLKNLASGLDSNILKENPTDNVQLQNDRLFLYYLQNGKDMYTGEALNINQLSSYDIDHIIPQAFIKDDSLDNRVLTSSKDNRGKSDNVPSLEVVEKMKAFWQQLLDSKLISERKYNNLTKAERERGGLNELDKVGFIKRQLVETRQITKHVAQILDARFNKEVTEKNKKNRNVKIITLKSNMVSNFRKEFGLYKVREINDYHHAHDAYLNAVVAKAILKKYPKLEPEFVYGDYQKYDLKRYISKSKDPKEVEKATEKYFFYSNLLNFFKEEVHYADGTIVKRENIEYSKDTGEIAWNKEKDFATIKKVLSFPQVNIVKKTEEQTVGQNGGLFDNNIVSKEKVVDASKLIPIKSGLSPEKYGGYARPTIAYSVLVTYKQNNKIKNTMVGIPVLTKLEFERDPNLYLRNLGINNVSHVIKLVKHTVLEFKHKYGTYRRFIVSNQELKRANQIFVTTKQMKLISQYTTLDKNEHDSLLKNNQQLIQSIWNQFLEFMLATDLVNKKQYDELILTNNQTIEECRNIMNRVITTLSFTNINAGQKKIIFDDTLSLPIKRWQFADSDKMVKKIIESTLIHQSITGLYETRIDLSKLGED

SEQ ID NO: 15908 - protein, 1298 aa, unidentified
  REGION 1..1298: note = Cas Enzyme sequence
MSTPQSETNTGRDDVRRILALDLGIGSYGIAFQKRTGEGKSAADYEFPLVRSCVLPGDWAELATERTRRRMWRTRTSHLEREKWLRRVFETSELEAGVLCGRRLKKIEQPKVHPKQKRKHYRWELDEPGDFRLEREFPPSDGEETRDKASTLPARTVYAGAVLRCLLLLGEKAQIAAQGRKLEPWQVFKALHSAIQKRGYDPDVPWKRARPVKSGDEEAEELTEAEKREKDEEKATAARAQRMDEVLHDMVKDVPHGARYQHPCFWEAARMGLWSPERPEQIHLRTNHDAASCKWAEAPDPAEELKKKREDQPKPPPHAVFQKKLPAVFHRATVQKELLELCIAAGELLPSLRGKEMYIMYGPPEVAYPNVPRKSQTEENKRREALQKLGIEQGKRYALGELRGNWVEYQGALAQKAPTFDNRGPGPCVLIPRYHAAKCDVQWDDEGKIVPNDRLLAAEVSFLLGAKNFRFTPEKPDQAIDKGYRDWLNAAELRRLYTEHFHSTVVERMSNVSAKDAITKTVLTKWLEQCVLENARPKPGLEDANDGKLIDKPRVKGRSRFSRPALRLLRALLVSGYSPQNFQERLLDLTNAAEAICDIPSIGTWGQLRYDIRLVNKEGAFYVGENADKRGMQKSDLDFFKSIGASWEQISIRDGRLESFDADARKDDSELRNQAIGRMIQAEINPVIRHRLGLLSKLLDEVVAKCGEPDRVVLEFVRKEFMGKDSKRKQKLVKFQNERRDANSSARAELESLGIRDPHESMVMRWQLVRDQGGQCLLCGCGIGNPGSALAPEKGVGFDQTHLAHIVAKAAGGPRAYNNLTVACGDCNAAQSKEWHGVWIRRSNMDWNTFVRRVESSNIGGFKKKLLCTVDGDEALKMVQSRASLQQTAWIAKLAQVLVCLKFGWPLNFEGQQRNVVIVPGSATNSVAQKHKLYRILGEPGRIAELEQKIEDERGKLRQLFIDDAPPEKKKAQKKAVREAFKALDDKCRADKRHHALDAMVLSFLPHWVADTQKRELWFGLPDKKQNWQTWFKSILDQVVPEPLRLPRPKLGETTYGMRKDDQGQIRAVLRQEVVKMAYAKESPQGDPQEFGIKTLRAAIKTVLRRVVRNRLEQVADRVEKAAKPETAWLDEVKELRIKEGGPRIHKVLCWDQKVREVVHYQNMSKATHADKGQWKRTKKESRGQWVFWIKPARGKKLSLKVRSVKVFESPQSIREQIQAMPEVVSVLGFFQSGCLLDVYEKRTIGKKKSELPKGRYELCSIEADCRITLRATSGEIFDRVSISQITTPEVPNLQRVP

SEQ ID NO: 15909 - protein, 1443 aa, unidentified
  REGION 1..1443: note = Cas Enzyme sequence
VEVKLMNFNRKCSENYCLGLDVGTASVGYCVIDENGKLFKINRKGDDGNNKRNSLWGVRTFKSGEPAKGCRINRSTRRRYSRTHTRILELRKIMSDMVCKVDENFFARLDESFLWKEDKSDKAKSDYILFADKDCTDKDYYEKYQTIYHLRKHLLGTTEKADARFIYLALHHMLKYRGNFLYEGQKFTELDDFKIIYEQFLTSLKEYLEIECNYDQISCEEIEEKLKEKKSKKEKNNEVSEILKKLGLDKKYAEAVANAIIGYKFNVATIMNDKNLCDENGKEMSVSFASANYEEEEQKLSDELGEKFSVIENLKRLYSWYVIKQIMQGSDKNRVNYLSQAMVAKYEKHHAELKELKELFRDYKTQKEYSEFFHKELKAEQKDGKMSPVFLKSFGKIKKGEYVPNYANYIKGMKRCGDTQSKARENLYKCIKALLGDVAKDDERYIRICAEMENDSYLEKINDVSNSVIPYQLNEMEMEKILDIQGEFYPELKKNKELILKMLTSKIPYFVGPLNPGSRFAWMSKKAGMENKSVYPWNVEEVVDVDKTAEKFITRMTNYCTYLPCEKVLPKHSIIYQWYEVLTELSQISIDKIKFGKEIRDDIIQNLFLKKVSVSGNNLKEHLKKSGTYNDIDNRVIKGYQGGDNFASSMSSYITFKKIFGEINMSNIDMIEQIIYWLTIFDDKKIIKRKIEQNYKDKINDSQLKRILKIKYTGWGQLSKKFLTGIKGDTGHTIIEMLEEGDLRWKEIPNLIQIINRDENIKTVIEENRLRYNGEDDLPDIIDKLHTSPANKRGIKQCMKVIEEIIEYMGRKPEQIFIEFAREEGEKVETKKVKDKLDKAIGKLKQEFKDYYNDDIKQELKDNEKRLDEEKVRLYFSQNGKSLYSAPSASNQLSLDNLNQYDVDHIIPYSISQDDSMDNKVLVKKIENQNKGNRIVSDAFGNKADYKEMQNYWEMLYKAGLISEKKYNNLNKSLDEVFSKGFINRQLVETRQIVKNVANLISDYYDDKIEVIEVKAQLSSYIRNKFTQEKKDDDGFWIENTENAMFFKNRGLNDYHHAHDAYLACIIGLYIQKVYPGWKNELNFKKYRREFEKYYEEQKKYNTKSKKEIYISMLNRFTKNYEKAGWNGEEIIEYMRKIFCYRDVMISKKTEENTGSFYNQTRYPKEKLDGNKKETKLIPLKSGNNLRGKEGLKELSVEKYGGYQGGECAYFVLVKYYTVKNKKKTEEKQWKMEFVGIPTYISYEINKGNINLKQYICDKLKNNTVEILRNKICKYQELMDEEGNRYFLVGPTEVANAKQFVLGSRYQKFNRLYSYINSENWHYIRTDELEKEIDEFFKLLQNKIHNEFKGYIKDIDKVIGANTSKLDIDKKIDYFNEIYKIVQANSSRPAVSKFNIAGISDGLGRKRSLPFKDKIIIVDKSVTGIYERRTCFELENGGNTKSC

SEQ ID NO: 15910 - protein, 1059 aa, unidentified
  REGION 1..1059: note = Cas Enzyme sequence
MLKKHYRLGIDMGSSSIGWAIILLDEDNEPCGVEKMGVRIFPDGREDKTPTPLSVKRRGFRGARRNHDRFLQRMRNLLDVLDKHGLLPKDQEERKSVFAQDPYRLRALALDQKLEISEFARTLFHLAKRRGFKSNRKTDDPDATTKFMTAIENLHDKLQQGNARTIGEYLYKKQTLSPNEHTKGAIRFRYDSKLYTEDELIFPHRDMVISEFELIWEAQSKYHPELINSLKEEIYHAIFYQRPLKPTVKGKCIFEPEEFRAPKAHPLFQEFRILQDVNNLLVEEIADQSYRPLTAEERSKIIDVLMNSKESKLSSLRNKLFGKNKEYYKFNYETNNRDKLLGNQTNCAFIKKKDSPLPKYWNSLSHEQQEFLVELLCSDLDEQDLSDSLTKICESSEIVEALLYMKLPTDFCNVSIKALKKIVPFLRQGYIYSDACSRAGYNHSEKWNGVVYHNADLPYYGELLKHSVLPLARPSYDLDADVHGKINNPTVHIALNQIRKIINALEKVYGPPAQIVIELARELKMNKTDKEEFDKRQRNQATANERIAKELKHFKIDNNYENRTRFKLWEELSNDPLERRCVYTGRIIPIEKLFSPEFEIEHILPKSRTFDDSIPNKTISYYAANRYKGEHSPYEAFGQSNDNYDWEAIVNRASTLPENKRRRFLKDSMERYSDEKEVLARMLNDTRYMSRVAKEYLQYVVGERNIWVVNGQQTSMLRGKWGLNRILNEDGSGTKNRADHRHHAIDAFVIGMMGHSTVNRLSTAVKQSRDRYLEKMADPYPGFDHKDLERKVHNIMVSYKPDQINPVKLRKRNQTAGPLLKDTAYGFVGPNPKNPQMYLYSERVAVTEIKLSDIERIIDPVIKELLKKQIASISDAKLLKTSLADWSKKTGIKKVKMLFNANPDTMIHVYDKSGKIYKCYASGENLFTDIYCIKPWDKSGKWSMEIVTSYNAHQLDFTPKWKQEYPMAKLIMRLFKNDVVCVDSEQGRQYRRVKKMSPGRVYLRDLNIAKRDKEERDDGESFSVSRLQTLNARKAGIDAIGRAFDPYVGDTNASTGDQS

SEQ ID NO: 15911 - protein, 1059 aa, unidentified
  REGION 1..1059: note = Cas Enzyme sequence
MLKKHYRLGIDMGSSSIGWAIILLDEQNEPCGIEKMGVRIFPDGREAKTPTPLSVKRRTYRGTRRNHDRFLERMRALLKIFEENSLLPTDPEERKKIFDLNPYELRARALDHKLEKAEFARALFHLAKRRGFKSNRKTDNADESTAFMSAIENLHQKLTEGKARTIGEYLYLRQNQNHIEHQKDSIRFRYDTKTYSEQDTMFPHRDMVVSEFEQMWAAQHKHHFELNNALKEEVYHAIFYQRPLQPADKGKCFFEPGEPRAPKAHPLFQEFRILQDINNLIVEDLSDQSCRQLTIEERDKLTDVLMNSKESKFSSLRNKLFGKSKDNFRFNYETESRDKLKGNLTSAAFRKHKDSALAKLWNSLSDEKQQELVELLCEDITDDVLRKRLADFSDSPDVIEDLFYLSLPAGFGNLSIKALKKIVPHLREGLIYSDACLKAGYDHSEDWNGEVYHDADLPYYGKLLKRSVLPLTRKSNDEEADIHGKINNPTVHIALNQIRKIINTLEKVYGPPAQIVLELARELKMGGKEKEEFEKKQRIQTATNDRIAKELEHLKVSNNYENRTRYKLWEELSEDPTQRRCIYTGRIIPIEKLFDSEFEIEHILPKSRTFDDSFANKTISHYVANRYKGERSPYEAFGQSADNYTWDTIVQRASKLPENKRRRFLKDSMERFADEKEVLARMLNDTRYMSRVAKDYLQYVVGKKNIWVVNGRQTSLLRSKWGLNSILNEDGSGSKNRADHRHHAIDAFVIGMMGHSTVNRLSTAIKQSRDRYLEKLGNPFPLFCHEDFARKVNEIMVSYKPDQINPVKLRERNQTAGPLVKDTAYGYLGPDPKDPKKHLYTERVSVAEINLKDTERIIDPVIKASLKAHILALSDTKKIKASLAEWSQKTGIKKVKLLMSANPNTMICIRDKTGEIYKCYASGENLFADIYCIEPWKDDSKWYMEIVPSYNAHQSGFVPNWKQKHPMAKLIMRLFKNDTVCIDGEFGRQYRRVKKMSPGSLWLRKINIAKREKDDEDRGEKFSISGLQKLHARKSGIDIIGRAFDPFAGGKHAGIGDQS

SEQ ID NO: 15912 - protein, 1059 aa, unidentified
  REGION 1..1059: note = Cas Enzyme sequence
MLKKHYRLGIDMGSSSIGWAIILLDEQNEPCGIEKMGVRIFPDGREAKTPTPLSVKRRTYRGTRRNHDRFLERMRALLKIFEENSLLPTDPEERKKIFDLNPYELRARALDHKLEKAEFARALFHLAKRRGFKSNRKTDNADESTAFMSAIENLHQKLTEGKARTIGEYLYLRQNQNHIEHQKDSIRFRYDTKTYSEQDTMFPHRDMVVSEFEQMWAAQHKHHFELNNALKEEVYHAIFYQRPLQPADKGKCFFEPGEPRAPKAHPLFQEFRILQDINNLIVEDLSDQSCRQLTIEERDKLTDVLMNSKESKFSSLRNKLFGKSKDNFRFNYETESRDKLKGNLTSAAFRKHKDSALAKLWNSLSDEKQQELVELLCEDITDDVLRKRLADFSDSPDVIEDLFYLSLPAGFGNLSIKTLKKIVPHLREGLIYSDACLKAGYDHSEDWNGEVYHDADLPYYGKLLKRSVLPLTRKSNDEEADIHGKINNPTVHIALNQIRKIINTLEKVYGPPAQIVLELARELKMGGKEKEEFEKKQRIQTATNDRIAKELEHLKVSNNYENRTRYKLWEELSEDPTQRRCIYTGRIIPIEKLFDSEFEIEHILPKSRTFDDSFANKTISHYVANRYKGERSPYEAFGQSADNYTWDTIVQRASKLPENKRRRFLKDSMERFADEKEVLARMLNDTRYMSRVAKDYLQYVVGKKNIWVVNGRQTSLLRSKWGLNSILNEDGSGSKNRADHRHHAIDAFVIGMMGHSTVNRLSTAIKQSRDRYLEKLGNPFPLFCHEDFARKVNEIMVSYKPDQINPVKLRERNQTAGPLVKDTAYGYLGPDPKDPKKHLYTERVSVAEINLKDTERIIDPVIKASLKAHILALSDTKKIKASLAEWSQKTGIKKVKLLMSANPNTMICIRDKTGEIYKCYASGENLFADIYCIEPWKDDSKWYMEIVPSYNAHQSGFVPNWKQKHPMAKLIMRLFKNDTVCIDGEFGRQYRRVKKMSPGSLWLRKINIAKREKDDEDRGEKFSISGLQKLHARKSGIDIIGRAFDPFAGGKHAGIGDQS

SEQ ID NO: 15913 - protein, 1042 aa, unidentified
  REGION 1..1042: note = Cas Enzyme sequence
MRLGLDIGTNSIGWWLYKTASNKDIIEHIAGGVRIFSDGRNPKSGQSLTVARREARSSRRMRDRYLRRRTVLMEKLSTGGLMPENPAERKALELLNPYELRDKGLSEKLPLSHLGRAIFHLNQRRGFKSNRKTDANDNEGGKIKEGAARLEIAMMADNSKTYGQFLNKRLKKDSSNPIRTRLGMVKSEDGKESSGYNFYPTRDLFEREFETLWDAQVQYYPEILTDDLHDEIQRIIFFQRPLKEQKVGNCFFEEESRLAKAHPLFQELRLYQTINALRVKESNITDRPLSIKERDTLILFARKKKKATFAGMRRALKLRPDQTFTLERGNRKDIDGDEIEAAFCKSYGSNWASLDLDQKWSIIQTIRNAEDNELLVAKLQSDYDVDTETAEEMAKVRLPDGYGRLGETASRKILKELIRDVVLYSTAASEIYGSHSDDSTGEVFEHLPYYGEVLQRHIIPGSFDVKQHDPDKNAAEYWGRITNPTVHIGLNQLRLLVNDILDIYGKPNKIVVELARDLKNSDAQKIQINKNIKKATEAAQKRSEKLEELGIKNTGDARMRLRLWEESHHDATKRCCPYCCKPIGVKNALDGIQMQIDHILPYSRTLDDSPSNKVLCHAVCNQQKRNKTPFEVWGTTPERWEKISANMKNLPDNKSWRFGPDAMDKFEGDRHFESRQLVDTQYLSRIARTYLSKLYPEKGSAPVQVVPGQLTEMLRRKWGLNEFLHDAELAGKEKNRQDHRHHAIDAAVIAATDAGLLQRVSKSAARNVDKGRSVLKNIEPPFGGFRDGLKRILERITISHKQDHGSVGTTQKTSGQLHNDTAYGLLEGGLVVTRKPFDTLKPNDISKIRDVNLRNILSKKVEGLAGKDHENELKRFSEIDHHYRGIRRVRIVEKLNTIPIKDKDGKSYKGYKGDSNHCVEVWRLPDGTWKSIVLTTFEANSNGLGSTRPQPTAKLIMRLYSKDQVAIEHPKLGSARLIIAKIDKNNIVLYQNNEANVDARHRDKNDPFKYVNVGLGTIKKYQLRKIGVDRLGRITDPGPFDS

SEQ ID NO: 15914 - protein, 1480 aa, unidentified
  REGION 1..1480: note = Cas Enzyme sequence
MRTILGLDLGTNSIGWAKVCVDDNGNYVREIKLGSRIIPMSQDTLSNFDKGVTDSPTATRTGFRGIRRIRERVLQRRERLHRVLHVMKFLPSHYEKAIGWNREEATTYGKFLDNGEPKLAWEKKEDGSMRFLFMDSFHEMMADFAKCQPGLVADGRKIPLDWTLYYLRKKALTQAIRKEELAWILLNFNQKRGYYQLRGEEEEEDPTKREEYYELKVVSVEAAEEGKGGNTWYNVTLENGWIYRRQSKIELNDWIGKIRQFIVTTEYEKDGITIKKDKNGEVKRSFRAPSENDWGLRKKRTESRLEDSGKTVGEFIYDHILSEPADKIRGNFIRTIERKFYKKELEAILREQSKHHKELKDPNTLVNCIKELYPNNKAHQDSLMKKDMIYLLITDLIFYQRPLKSKKSLIADCPYEYYEYVIKETGEIKRQGIKCIAKSNPSYQEFRLWQFIINLRLFDRTNDKEITSEYLSSMEDYTRLFTYLNDRKDINQETLLKDFFKQKKVKRGMEKEFPIRWNYIEDKEKKYPCNETRHELLAALDKAGIDHSWLDDKERFYRLWHLLYSVESKEEAEGALRKLNDNEDFVNAFLKIKPFKKEYGAYSEKAIKKLLAVMRIGTQWNEDDICEQTRNRIQSIINGDIDEKIKERMGRTFSQLSDFQGLPEWLACYVVYGRHSETTDIQRWTKPENLMAYINGFKQHSLRNPIVEQCILETLRTVHDIWKEAGHIDEIHIELGRSMKSTADQRARMSKSILQNENTNLRIKSLLMELKNAKEFENVRPYSPMQQEILRIYEEGALQELTKEDDQYPEISKISQMAQPSAKELLKYRLWLDQKYCSPYTGKPISLSKLFTSAYQIEHIIPQSRYFDDSFSNKVICEAEVNQLKSNMLGYEFIKKHSGEIVHCTMVGDVKILDAKEYYNFVTEHYANNRRKKEKLLLEDIPQEFLNRQMNDSRYISKKVMALLSNIVREEGEQEAKSKFVIACSGGITDRLKHDWGLIDVWNSIVYPRFERLNKLTNTENFGRWENKERKQVFQTSLPLELQRGFSKKRIDHRHHAMDALVIACASNNIINYLNNESAKSQEKREDLRKKLCDKNRIIRKPWETFTQDVRTALEDVVVSFKNYVRVINKATNYYEKYDKNGKKGIAEQKGQDMWAIRKPMHKETVFGQVNLRRKVTVKLKDALEKIPAIYDKELRDYINILVAKQFNKKQILAHFKSINYRLNMKSVDKVDVWQFSNEKEPMVATRKSVDTSFDAKRIATITDTGIQKILRNYLETKDNDPNIAFTPEGIAEMNKHITEYNNGKQHQPILKVRVSEPKGAKYQVGETGNKTSKFVEAQKGTNLYFAIYEDKEGNRSYSTIPLNEVIERLKQGLSPAKDLNKRGEKLKFYLSPNDLVYVPTEEEKLSGECKLNKDRIYKMVSSTGNECYFIPYTVSNVIFNKVEFESLNKMGRALTGEMIKAVCWKLEIDRLGNILKIIK

SEQ ID NO: 15915 - protein, 1480 aa, unidentified
  REGION 1..1480: note = Cas Enzyme sequence
MRTILGLDLGTNSIGWAKVCINDDGNYVREIKLGSRIIPMSQDTLSNFDKGVTDSPTAARTGFRGIRRIRERVLQRRERLHRVLHVMGFLPSHYEKAIGWNREEATTYGKFLDNGEPKLAWEKQEDGSMRFLFMDSFHEMMADFAKCQPGLVADGKKIPLDWTLYYLRKKALTQAIKKEELAWILLNFNQKRGYYQLRGEEDEEDPTKREEYYELKVVSIEAAEEGKGGNTWYNVTLENGWIYRRQSKIELNDWTGKIRQFIVTTEYEKDGITIKKDKNGEVKRSFRAPSEDDWGLRKKRTESRLEDSGKTVGEFIYDHILSEPADKIRGNFIRTIERKFYKKELEAILREQSKHHKELKDQNTLVNCIKELYPNNKAHQDSLMKKDMIYLLITDLIFYQRPLKSKKSLIADCPYEYYEYVIKETGEIKRQGIKCIAKSNPYYQEFRLWQFIINLRLFDRTEDKEVTSEYLSSMEDYTKLFTYLNDRKEINQEFLLKDFFKQKKVKMGMEKEFPIRWNYIEDKEKKYPCNETRHELLAALDKAGIDHSWLDDKERFYRLWHLLYSVESKEEAEGALRKLNDNEDFVNAFLKIKPFKKEYGAYSEKAIKKLLAVMRIGTQWNEDDICEQTRNRIQSIINGDIDEKIKERMGRTFSQLSDFQGLPEWLACYVVYGRHSETTDIQRWTKPENLMAYINGFKQHSLRNPIVEQCILETLRTVHDIWKEAGHIDEIHIELGRSMKSTADQRARMSRSILQNENTNLRIKSLLMELKNAKEFENVRPYSPMQQEILRIYEEGALQELTKEDDQYPEISKISQMAQPSAKELLKYRLWLDQKYCSPYTGKPISLSKLFTSAYQIEHIIPQSRYFDDSFSNKVICEAEVNQLKSNMLGYEFIKKHSGEIVHCTMVGDVKILDAKEYYNFVTEHYANNRRKKENLLLEDIPQEFLNRQMNDSRYISKKVMALLSNIVREEGEQEAKSKFVIACSGGITDRLKHDWGLNDVWNSIVYPRFERLNKLTNTENFGRWENKEGKQVFQTSLPLELQRGFSKKRIDHRHHAMDALVIACASNNIINYLNNESAKSQEKREDLRKKLCDKNRIIRKPWETFTQDVRTALEDVVVSFKNYVRVINKATNYYEKYDKNGKKGIAEQKGQDMWAIRKPMHKETVFGQVNLRRKVTVKLKDALEKVPAICDKELRDYINNLVAKQFNKKQILAHFKSINNRLNMKSVDKVDVWQFSDEKEPMVATRKSVDTSFDAKRIATITDTGIQKILRNYLETKDNDPNIAFTPEGIAEMNKHITEYNNGKQHQPILKVRVSEPKGAKYQVGETGNKTSKFVEAQKGTNLYFAIYEDKEGNRSYNTIPLNEVIERLKQGLSPVEDLNKQGEKLKFYLSPNDLVYVPTEEEKLSSECKLNKEQIYKMVSSTGNECHFIPYSVAKPIYDKFEFEAKNKMGRALTGEMIKAVCWKLEVDRLGNIHKIIK

SEQ ID NO: 15916 - protein, 1125 aa, unidentified
  REGION 1..1125: note = Cas Enzyme sequence
MCQDVFSLFRGKTTTEKENHMKKDIGPYKLSLDLGSTSVGWAVLKIQEHEANSQHKGGNHEVLALEALGVRIYDDGRDAKTKEPLAVSRRMARGARRNRDRKKKRVSRLMNTLIEQDLFPSSPDEQKELQNKNPYEIRDRALKETVSPHEMGRGLLHIAQRRGFKSNRKTDSKDNESTPLKEAIAKLDKNMMAEGASTLGQYLHNLKKGQPKRIRKTRNTQSQESEQKKNNKEEYSFFTSRDMYEREVDALLKSQERFSSHDKSRAYANAKDIIFHQRNLRPVEVGFCTFEYETKERRAPLALPVVQEFRIYQELANLDFRTYKKDELHLTKEQKNIIAQELFKKNKVSFKHMRKVLKIDGDLPFNLESDNRKELDGHHTHVLLAHEKAFGKEWYNFSGEDQQRIVLRILEEENEDILVSEFQAEFALEEEKARHIANLSLKDGYGRLSEKAIRKILPHLKEGCVYSEACTRAGYDHHSDFRTGEIKEQLPYYGEALPHRVIGGKPTSENEQFPEKFYGKINNPTVHIVLNQIRKLVNACIDEWGHPDAISIELARDLKEHPSELNKANAKNKRDNERIDAELSKLGVSQPKRDDRLRFKLWEETSSEPSSRCCPFSGKTIGFHEILSPAFEIEHLVPYSVCYDDGKGNKVLACKQANQFKGNKTPHEAFSHSPPGYKWNEILARVDAFKSNFKKSRFMEDARERFANQDDVIARQLNDTRYLSRMAKEYLQFICDPDKITPIPGQLTAMMRQKWGLEGEGIWGKRDDGTEIVKNRDDHRHHALDAFVVGCTTRSILQKVATEANNIENNPARREQRKKLVDKMPDPYPGFLQNVKDHFSKMIISHKPDIGSARKATQKGTTISQLHEETAYGLITRPDTNEKVYVVRKAVEDLEKKDIEKIVDENIRSELQYALHGAEGKEVKEIIREYLGNRKTKKGEKAPPIHRLRMIGKTEEQGKSLVPIKDKSGKTYKYYQGGNNAYTEIFVSEEKDVKDPETGKVLYKKGQWYAETVRQYEAHQEKEARKWISQAPMAKKIMRLHKNDMVAYEKDGKTIIARVKKMSDGKVWLIPHTIVKEEKPNGRTWEASAKQMQRKNLRKIRVDILGRVYDPGPYPYKKKTSEESS

SEQ ID NO: 15917 - protein, 1380 aa, unidentified
  REGION 1..1380: note = Cas Enzyme sequence
MKKILGLDLGTTSIGWALVYESENTDEKSSIVRLGVRVNPLSVDEKGNFEKGKAITTNADRQQTHGARINLQRYKLRRENLKDCLQKQGWIGAEALCEEGKASTFETYMLRAKAAEEDISLHELCRVLFMLNKKRGYKSNRKANNKEDGKLFDGMTVAKKLYEEHLTPAEYSLKLLSSGKKFKQEYYRSDLREEFDRIWNEQQKYYPEILTDDFKQQLQGKSKGNTSKIFLGKYGIYSADLKGLDRKLQPLKWRVEALKQKVDKEALAFVISDLNGQIASTSGLLGAISDRSKELYFNKQTVGQYLWTSLKESPHVSIKNKPFYRQDYLDEFEKIWETQATYHKELTPELKQEIRDIIIFYQRPLKSKKGLISVCELEQRKVKVTIDGKEKEISIGPKVAPKSSPMFQEFRIWQNLNNILLIDKGNNSNRPLYEEERNLLYEELSVKEKLSKAEALKVLNKNSKQWDLNYKEIEGNRTQAVLYDCYNRIIGMTGHEECNFKKLKASDIRYYVKTIFKKLGFSTDILDFDSSLQGHELERQPSYQLWHLLYSYESDNSRTGNDALLRKLEIAFGFLKEYAAVLSDVVFEDSYGNLSVKAMRKILPHLQAGLDYSQACEEAGYKHSRRSLTKNELDQKEYKEKLELLPKNSLHNPVVEKILNQMINVINAVIDEYGKPDEIRIELARELKIGAAERENMTRSISQGNAENKRIREILQKEFALSYISRNDIIKYKLYEELKSNGFKTLYSDTYISKDKLFSKDFDIEHIIPKARLFDDSLSNKTIEARDVNIAKSNKTAFDFISEKYDQQGIEAYKKKLDILLQDGSISKAKYNRLLMKEADIPSGFIDRDLRDTQYIAKKAYEILSDLVRNVTPTTGAVTSRLREDWQLVDVMKELNFEKYQKLGLAEVIEDRDGRKIKRIKDWTKRNDHRHHAMDALTIAFTKPSYIQYLNNLNARSDKSSSIYGIENKELHREDNKLRFNAPLSINEFRAEARRHLKSILVSVKAKNKVMTQNVNVIKTKHGVIKKVQLTPRGELHNATFYGTKKRSIIKMIKVGAALDEATIKKVSSSFIREALLDRLHEYNGDAKKAFTGRNSIDKNPIYIDEEHKKTVPSLVKTIEWEMYHPTRKMISPDLKIDKVIDKGIREILRTRLAKFNGDAQKAFSNLDENPIYKDEAKKITLKRVSLEGVSSVIPLHKLKDMGGKPVVGKDGKPVLGDYVQTSNNHHIAFYMDENGNLQDDVVTFFKAARRKSQGVPVIDKNYNHDKGWHFLFTMKQNEYFVFPNEATGFIPTEVDLMDEANYDMISPNLYRVQKMSKTKQGITDKRDYWFRHHLETVLNNDLKVRNSIFKQINSLKPLEGIVKVRINAIGKIVAIGEYD

SEQ ID NO: 15918 - protein, 1395 aa, unidentified
  REGION 1..1395: note = Cas Enzyme sequence
METQASNQLISSHLKGYPIKDYFVGLDIGTSSVGWAVTNKAYELLKFRSHKMWGSRLFDEGESVVARRGFRSMRRRLERRKLRLKLLEELFADAMAQVDPTFFMRLRESKYHYEDKTIGHSSKHILFIDKNYNDQDYFKEYPTVYHLRSELMKSGTDDIRKLFLAVHHILKYRGNFLYEGATFDSNASTLDDVIKQALENITFNCFDSSAAIGSIGQILMELGKTKSDKAKAIERLVDTYIITDEVDTSGKTQKEQVKEDKKRLKSFANLVLGLSASLTDLFGSVEDLDEDLKKLQIIGDTYDERRDDLAKVWGDEIHIIDDCKSVYDAIILMSIKEPGLTISESKVKAFNKHKDDLAILKSLLKSDRSIYNTMFKVDEKGLHNYVHYIKQGRTEETSCNREDFYKYTKKVVEGLPDSKDKEYILSEIELQTLLPLQRIKDNGVIPYQLHLEELKVILAKCGPKFPFLNEVADGFSVAEKLIKMLEFRIPYYVGPLNTHHNVDNGGFAWAVRKASGRVTPWNFDDKIDREKSAAAFIKNLTNKCTYLLGEDVLPKSSLLYSEFMLLNELNNVRIDGKPLEKAVKEHLIEAVFKQDHKKMTKNRIEQFLKDNNYIPEKHKPEITGLDGKIKNDLASYRDMVRILGNNFDLSMAEEIITDITIFGESKKMLRETLRKKFASCLDDEAIKKLSKLRYRDWGRLSKKLLNGIDGCDKAEDGTSVTIIEEMRDFSYNLMELLGDRFSFMERIQEINAKLTEGQIVNPHDIIDDLALSPAVKRAVWQALRIVDEIVHIKKTLPARIFVEVTRSNKAEKKKKDSRQKRLSDLYAAIKKDDALLSGLTNEEFGGLKSGLAKYDDAALRSKKLYLYYTQMGRCAYTGEVIDLSQLNTDNYDIDHIYPRSLTKDDSFDNLVLCKRTANAQKSDTYPISKEIQKAQKAFWIFLKQQGLISERKYERLTRITSLTADDLSGFIARQLVETNQSVKAATTLLRRLYPGVDVVFVKAENVTDFRHDNNFIKVRSLNHHHHAKDAYLNIVVGNVYHERFTRNFRAFFKKNGANRTYNLAKMFNYDVNCTNAKDGKAWAVKTSMDTVKKMMDSNDVRVTKRVYEQKGQLSDINLTKASKVKADIYLPIKANDPIMSQNMKYGGYSDIKNAYYTIIEYSDKKNNSIKAFIPIPIFIATKTLTKQALLEYIKTVLPKANNLRIIYKKVYNDQLLKIDGFNYYLGGRSNDRFCIDNAIQLIVPLEIQFYIKLVEKFTAIISENKNIALKASSVKSRNPINNQVENITLEYTQKLFDYLVSKFNELIYLKMRGNKLTDVNNIGRKQFIKLSLEERCKALAELLNIFTNMNKKLSLSTINVSASRKVVNFKISSLDEFKIVNESITGLYSNEITIV

SEQ ID NO: 15919 - protein, 1185 aa, unidentified
  REGION 1..1185: note = Cas Enzyme sequence
MTKKVLGLDLGVGSIGWCLITLDKDEKPQSILGMGSRIVPLSTDDATEFTQGKAISKNEMRTVARTIRKGMDRYQLRREALKKELSEHGMLPDESLIKLPLLELWELRARAATSGEQLSLAELGRVLLHINQKRGYKHAKADEAAEAEAESKSKKEKEGYVAQVKGRYQALKEKGQTIGQHFAGELRANQQTAPRGVYYTYRIKEQVYPREAYIEEYDSIMAVQREFYPEILTDELIQRIRDRIIFYQRPLKSCKQLVSTCEFEKKERVVQVKRINKEGVEELIERTITIGPKVAPKSSPIFQVCKVWESIHNIRLYYPDGTERKLEQEEKQKLFDYLQKNDKLSLTALRKELKIKPKDKLWCDKLLEKGIAGNTTAAILRKAFKGYEHYERLFRFDLVRRDSHEADEDGVIRPIIDESYQNEPLYKLWHILYSIEDRADMYRALVGQLGIKREDLDNGLMDALYKIDFVKQGYGNKSAKFICKLLPHLQEGKMYSEAAEAAGVRHSDSMTAQERDERSLLEEIPLLQKNALRQPVVEKILNQMINLVNALKREHGEIDEVRVELARELKMSREEREETTRSNNAREKENEKTAERIKGEHGLTPTKSRIQKYRLWQESGGCCIYCGKRFGIKQFLEGEEIEVEHIIPRSILFDDSMSNKVCACRSCNQEKGNRFAMEYIQSKGWEQDYIKRVDSLFHDKYSKRQRLLMLPKDLPEDFIERHLRLSQYISREAQGILRKGIRLVSASEGGVTAKLRQLWGYDNILRDLNLERYRSMGETEVVTVEHRDGERTDERIKDWSKRKDHRHHAIDALVVACTRQSYIQRLNRVNAEADREEMDAFIKEQQQEHKLSKREKLSLLEHWLIRQPHFTTGEVTKHVEGILVSLRPGKRTISRGRNIYKRSGKTDVQRGILIPRGALSEETIYGVISVDGENKVVCKYSLQSLKPKDVGYIVDEVLREKVRERITQYGEKEAFAKPLYLDEAQTQEVRSIRCFTGKDLSKLIPLRYNAESEAVGFVALGSNHHLALYRDVDGRLVESVVTFWQAVARIRYGLPAIVTHPREVMEQAFSIPDLPEEVLEALPISRLRLMEVLRINDMFLIGMTDGEIKAAIEGEDYPTLSRHLYRVQKLATHDYVFRYHLETTLDGKDNVGGIPKSYRAQSLKAYVKLNPRKVKIDLLGRISLA

SEQ ID NO: 15920 - protein, 1053 aa, unidentified
  REGION 1..1053: note = Cas Enzyme sequence
MKKNYILGLDIGITSVGYGVIDYKTRDVIDAGVRLFKEANVENNEGRRSKRSTRRLKRRRRHRLQRVKKLLFDYNLLTDHSELTGINPYEARVKGLSQKLSEEEFSAALLHLAKRRGVHNVNEVEEDTGNELSTKEQISRNSKALEKKYVAELQLERLKTDGEVRGSINRFKTSDYVKEAKQLLKVQKAYHQLDQSFIDTYIDLLETRRTYYEGPGEDSPFGWKDIKEWYEMLMGHCTYFPEELRSVKYAYNADLYNALNDLNNLVIARDENEKLEYYEKFQIIENLFKQKKKPTLKQIAKEILVNEEDIKGYRVTSTGKPEFTNFKVYHDIKDITARKEIIENAELLNQIAEILTFYQSSEDIQEELAKLNLELTQEEIEQISKLKGYTGTHNLSLKAINLILDELWHTNDNQMAIFNRLKLVPKKVDLSQQKEIPTTLVDDFILSPVVKRSFIQSIKVINAIIKKYGLPNDIIIELAREKNSKDAQKIINEMQKRNRQTNERIEEIIRTTGKENAKYLIEKIKLHDMQEGKCLYSLEAIPLEDLLNNPFNYEVDHIIPRSVSFDNSFNNKVLVKQEENSKKGNRTPFQYLSSSDSKISYETFKKHILNLAKGKGRISKKKKEYLLEERDINRFSVQKDFINRNLVDTRYATRELMNLLRSYFRVNDLDVKVKSINGGFTSFLRRKWEFKKERNKGYKHHAEDALIIANADFIFKEWKKLDKAKKVMENQTVEDNQAESMPKIETEQEYKEIFITPHQIQHIKDFKDYKYSHRVDKKPNRELINDTLYSTRKDDKGNTLIVNNLNGLYDKDNDKLKKLINKSPEKLLMYHHDPQTYQKLKLIMEQYGDEKNPLYKYYEETGNYLTKYSKKDNGPVIKKIKYYGNKLNAHLDITDDYPNSRNKVVKLSLKPYRFDVYLDNGVYKFVTVKNLDVIKKENYYEVNSKCYEKAKKLKKISNQAEFIASFYNNDLIKINGELYRIIGVNNDLLNRIEVNMIDITYREYLENMNDKRPPRIIKTIARKTQSIKKYSTDILGNLYEVKSKQNPQMIMKG

SEQ ID NO: 15921 - protein, 1054 aa, unidentified
  REGION 1..1054: note = Cas Enzyme sequence
MCKDGKKNYRLGIDLGSTSLGWCMLEIDEERNPIGIINMGVRIFPDGRDAKSKEPLSVARRGYRGQRRNLDRYLQRLKELITYLQKHGFLPADEAERREVFKLNPYMLRAKALDEALSPSEFARAIIHLSKRRGFRSNRKIQSDKKTAYTEAIDNLKTNLESNGARTLGEYLWLRYQQMPEGKEHLRNPIKFRYEIKLEDPNPIFPLREMVEHEFDAIWQAQSKYSPLFSETHKQNIFAIIFTQRDLKKQAKGKCQLLPEFTRAPKAHPLFQEFRIRQDLNNLKARDMFNNTTIELTDAQYNTLFQALSTSKERSFEQLRKAIYGKQAEDYRFNLEANDRKKLLGDLTYAEINRKGNEAVRSYWEKWSLEMQAQVIEIVISDLDDEPTLVELSELGIPKDIASALLDLHLPSEYCHLSTQAMEKILPFMRQRTIYSEACKLAGMDHSGEFTGEVFTDGSLPYYGELLKRETIELNRQTGDNDADESGKINNPTVHIALNQLRKLVNAICKRYGAAPKEIVLELGKDIKLGEKEKERLNKQANKNKKINETVDELLRYNDIKPNHLNRLKAKLWLELGASELDRRCVYSGHQIAVNDLFTSKVEIDHILPKSRTYDDSTSNKILCIIDANHYKKERSPYEAFGESKDGYRWEDIVSRANNLPDNKKWRFQADAMQDYANKEEILARMLNDTRYMSRVANKYMCYICGINNVWTITGRHTGMLRAKWGLNAALGDDERKDRSDHRHHAIDAFVIALTNRAMIHRLATTIENSRERFIENLEPPYTSFNHEEFKQKVNSIVTSFKPDQINPEKLQSRNQTGGSLVQETAYSFEGIDPDNPKYNLYAVRKSVSDVTEKNYQDIAAPEFRKELEAIAKTYTGKDFQAQVSIWAKRRNIKKVKLISSMNPDGMVPILNKEGIAFKFMASGENLFADIYIKDPADPKVKWSIEIVNSYKAHQPGFTPQWKQEFPKAKKLMRVFKNDIIAIDTPDGGRELRRVKKMTKGALFLRESNIAKKDKALDDIGEQFSPNKLFELHARKAGVDMIGRWFDPIVNEHE

SEQ ID NO: 15922 - protein, 1056 aa, unidentified
  REGION 1..1056: note = Cas Enzyme sequence
MFEKSYRLGIDMGSTSLGWCMLEIDADGNPLDVINMGVRIYPDGRNAKNKEPLSKARRGFRSQRRNLDRYLERVKNLVEYLIRHGFLSSNEQTRKEVFTENPYYLRCKALDDKISSDEFARAIIHLAKRRGFKSNRKAGKGAEDKDEKNKIALAMANLSNSISETGARTLGEFLWDKYRETAESNGHLRKSIKFNYKKINVDDLLIFPTREMVVAEFDAIWDSQSRFSPLFTPENKEAIKDIIFHQRPLKPQEKGKCQLLPEFSRAPKAHPVFQEFRIRQDLNNLKLIDQFANTTLELSKEQYDALYNLLSTKEKVTFKSMRKLILGKNAEDYLFNLESEKRKELRGNETYHAFNNSKIDKQLSDYWNSLHPDTQAGAIEEIVSDSDDETAIQKLIDLGIEADYAVAMIDVNLSDDYCNLSVEAMQRILPFMKEGTEFSKACALAGMDHSLEYNGEIFDNNNLPYYGEVLKRETIELNRKIGIADSDIHGKINNPTVHIALNQLRKLVNALCKRYGAPKQIVLELGKDLKLGLKEKEALEKTQRKNADLNEQAVALIKEHGLPVTHDNILKVKLWWESAKDEIDRRCIYTGKQISCSDLFSPQIEVDHILPKSRTYDDSASNKLLCYYESNRFKAEKSPFEAFGSSPQGYLWQDIISRASRLPDNKKWRFQADAMDRFSDEDMLLERMLNDTRYMSRVAMKYMFYVCGKNNVWTITGKHTAMLRAKWGLNSALGETNTKERTDHRHHAIDAFVISLTTRSFIKSLAGNIRNSRDRFLENLKPPYRNFNHEEFKAKISSIHVSYKPDQVNLKLLKDKNQTGGSLLEDTAYSYLGPDPSNPKMHLYCVRKDIAEVGLKKIDSIVAPEIQKALTEIATRYPDEKQFKEQVKSWAVRCNVKKVKLKIPSNPKTMIPVYNKEGIAFKYYATGDNLFADIYIKDPTNPKLKWDIEIVSSYHAHQPGFVPDWKKNNPKAKKVMRVYKNDVIAVDSADGTREYRRVRKMTNGGIYLREISIAKKASNLEDIGEYFSPNQLLLKRARKAGVDILGRAFDPFVNES

SEQ ID NO: 15923 - protein, 1014 aa, unidentified
  REGION 1..1014: note = Cas Enzyme sequence
MGVRIFPDGRDAQSKEPLAVARRGYRSQRKNLDRYLYRMKRLIDYLTETDLLPMDEQRRAEVFKLNPYQLRTKALDEKLEPAEFARAIIHLAKRRGFRSNRKVMSDKKTAYTEAIANLKAGLTNTNARTLGEYLWLRFQETPENKNHLRKPIKFRYEKNTESPDPIFPLREMVEHEFDLLWASQSRYNPSLTADHRDCIRSIIFHQNPLKPQPKGKCQLIPTEDRAPKAHPLFQEFRIRQDLNNMKLINNFTNEVLELSQEQYELLYDSLNQKHEMTFKAMRKLLFRTQADDYRFNLETNNREKLLGNQTHHEIMRKGNELVAECWHKWDEDTRNRAMELIISDLDDAPLLSELQELGISGEPATKLLELHLPSDYCHLSLKAMEMILPGMRNRMVYSDACQNAGFNHSLEYDGRIYDEGNLPYYGELLRREAIELNRKIGDEQADQYGKINNPTVHIALNQLRKVVNAICVKYGAPQEIILELGKEIKMGMAEKERLEKLHRKNRKINEMVDELLCKCDVPPNANNRLKAKLWLELGANEIDRRCVYTGQQINITDLFSSKIEIDHILPKSRTYDDSSSNKILCFREANRYKAERSPYEAFGDSKEGYNWEDIVTRANNLPDNKLRRFQKDAMDRYRDQEEVLARMLNDTRYMSRVAMKYMFYICGDRKVSTITGLHTGLLRGKWGLNDCLGEGDIKNRNDHRHHAIDAFVIALTTRSMVQKLAHNIEQSRVRFIEKLDLPYPGFCHESLSDMVDRIKVSYKPDQIKPSKLMKKKQTGGALAEETAYAFVGPDPQNPKYNLYAIRKNIADINEKNYEDIADPHIRQQIADMIANSQGSKFSDLLKDYASKHNIKKVKLLLSLNPKSMIPVTDKNGKAFKYLSSDKNLFADIYIKDPKAPNPQWAIEIVNSYQAHQPGFMPQWKKDYPKAKKVMRVFKNDIIALDSDDGARILFRIKQLSKNSLFVREINLIKKPDVVKDDGDQKGMRELQKKRARKAGIDIIGRVFDPIVNEP

SEQ ID NO: 15924 - protein, 944 aa, unidentified
  REGION 1..944: note = Cas Enzyme sequence
GFRSNRKIQSDKTTKITEGIENLRKQLDETGARTLGEYMWKLYNKNPDHPNQKTLKKRGVEAYPHKMGHHIDQPIKFRYEANPDNPNLIFPTRDMVQSEFNSIWNAQARFSDIYTEEHRQKIEELIFHQRPLLPTVKGKCQLLPEFDRAPKAHPLFQEFRIRQDLNNLKGINLFTNETFELSKEQYDTLYKLLSTKAEVKFEAMRNALWGKQHGDFRFNFETENRNKLLGDQTHAALHKKGNEDLAPLWDSWTMERKNKVIEVVISDLDDEPALVELTEAGISPKTAARLLELKLPDSYCHLSVEAMQRLLPLMRQRVIYSEACRQAKLDHSGEYNGEIFDSGNLPYYGEVLSRETIALNRKCGDAEADKHGRINNPTVHIALNQLRKVVNAITARCGAPEEIVLELGKDIKLGKEEKAHLNKIIDQNRKENEKIDALLAEHGLPVNHQNRLKVKLWWELGKDELDRRCVYSGHQISITDLFTHKIEIDHILPKSRTYDDNNANKILCIAPANHYKGERSPYEAFGQSRDGYDWQDIISRASNLKNSKRWKFNSDAMDNFKDKEKVLDRMLNDTRYMSRVAMKYMWYVCGNNRVWTVTGKHTSMLRGKWGLNTALGEDDSKDRTDHRHHAIDAFVIALTTRGFIKTLAKNIGSSRERFISELLPPWPGFDHNEFRKKVNSITVSYKPDQINADKLAKRNQTGGALVKETAYGYAGPDPDNPKYHLYTIRKAVSELTRKNIKNVVRADLKNELEQLASKFPDDDFKVEIKDWAARNNIKKVKLALSMNPAVMVPIRDKNGKAFKYMDSGENLFADIYLSKPTDPNCKWGIEIVGSYYAHRPGFVPQWKKDHPKGKKIMRVFKNDIIALDGPDGKRELRRVRKMTNSMLYLRPINIAKKPQVDSTGKQVSEDKGEAFVMSTLQDLNARKAGIDIIGRVFDPIVNEQ

SEQ ID NO: 15925 - protein, 1380 aa, unidentified
  REGION 1..1380: note = Cas Enzyme sequence
MEKKYYIGLDLGTSSVGWAATDENYNFLRLKGKTAWGARIFSEAVDCKGRRSFRSSKRRVARRKYRLLLLKNLFAEEMAKVDKTFFLRLENSTYWAEDKAKDSEGNDLGKTLIFKTTEEEREFHKAYPTTWHLRKKLVDNDEQALSDLRLVYLAIHHIMKYRGNFLSDGTKDNEEPSKDTIDRINVILNLLEAKDNESGISDNITYLSKESYNELIETLEDKNLNKTKKQDKIKKLFKNVDKTNEDIKVYIDLFKTLVTGGVFSVKKINEEYDKLKIDFNNGFDDNADEISKALGDAYELVLIAKAYNDYISLKDLLGGKPYLSYVMADIYDEHKKDLKSLKKILVSIDYKHGNEGNNRVYNLVFKPVIVPKEERKDKDGKKNKKLTTPNYASFIQGDDVEKKSVTLENLNKNIKEILEANKQYVDEKDKEEFDRLLDKASNNELFKKQATVSTSLIPHQCHLEELNKILENAGKKYPFIKENSDKIIQLFKFRVPYYYGPLNNESKEHAWIVKNEGKERTKITPWNIDEVVNKEKTREGFFKKLTNSCTYLVGETVLPKVSLVYEKYLALERLNKMQVNGNYLNHSDKMDLLNYVLGNSNTTIENIRKKLASDTGMKINDIVISNIKNNVPFTATSHAFFRKHFNLENSGEFELCEEVIKYATIYADDKKELKKFLSEHRDYFGFDEKLIKEIANLQTNKWGRLSKKFLCGGAKDEMYYTDENGVMYTILGLLEETNQNLQEIVNSGKYGFDEKIKEFNDALTKDETIDEQISKILDGTPALMVRSITQTMKVVDDVIKAAKCEPKKIIMEVTRTDEKKGQEVASRYIQLKKKISEDKGIDDKEREELLSDLEEANKTKKLKGKHLYLYFSQLGIDLYTGKKMKIEEVLEGKYDIDHIVPQSLIKDDSLDNQVLVNKKYNQDVKKDIYPICDEIRSKMLNLWYNYKERGIIKEEKYNRLIRTTDLTDDEINDFVKRQINVVNYSNVQIKRIFELKYPDTEIIFSKAGFPSLLRKEYEIAKMRDLNDAHHAVDAYLNIICGDILTSLYTDVFYLIKRKKEKKENPTFNMERRLLGYIKKNDLMNKIKSNCLRHDALITFKPDYDSGMFYKQTIFKKSGDKETGLIPLHTKGPMSDVKKYGGYSSLSQSYLLAVEYKVKKKTIKKLLRVPTMYVKLYGDDLNTIAKLMIDDEMATDIKVLRKIYLNQKIKYNGCYYLIYTKNEFVNKYKMAYQNYIDNDALVYLNKCLKKTDELDDKDKTEQEIIVNKDGDKLKITKEENLKIFKLIKEQYSKQIYESTPYIAKSKEMPEDAFNNLSIKKQIDTLFNMIKILSRSNEDAKFDKSLNNGSSKYFLKVNTITDDKIYIVNESPSGLFKGKEEL

SEQ ID NO: 15926 - protein, 1126 aa, unidentified
  REGION 1..1126: note = Cas Enzyme sequence
MEPINYRIGLDIGITSVGWAVLLNNSNNEPIHILDMGVRIFDKAENPKNGASLAGERRMARSVRRRIRRKRLRLSTIKKLFADYGLVDLDEFEQHFHAKNLENVYELRCKGLDELLTGEELAQVLLFIAKHRGFRSTRKAETKQDKDSGKMLAATKANAKLLEEKKYRTVGEMFYKDDAFKTARPYASIPYEYTTRNKQKNYQHTVTRVLLVDEVKQIFQAQRNLGSKYASIEFENKYLEIMQEQRSFDLGPGKQADGKPSPYAVNGFQDKTGKCTFEKDQIRAPRAAYTSEVFSLCEKLVHLKIVNAENGDDYFLSSEQRDKIFQYAHSHKEVTYENLRKLLGLSDNDRFKTLNYSPKKKEDYQLPISERVKKTEKAKFISLSNYYDIRKAIGSDAIVPDQDLADLVDRIAVILTSYKNDDSRTAELKKLNLNDHQISNLLYLSPAKYMHLSFVAMKKIIPFLKKGETYDKACEDAGYDFRNNNNGERIKLIKGKVLNDFLKDIPNPVAKRGISQAIKVLNAIILKYGSPQSVNIELARDMAKNFLDRQESQKYMENRASENEKIKKEIQELGKSNPTGLDIVKYRLWKDQQEYCLYTGERIKLEDLFQPGYDIDHIIPYSRSFDDSYHNKVLVTSQANREKGNRTPYEYMGNDPEKWNGFVTLVNSYVTDSRKKMNLFKHHFTSEDAAEFKERNLSDTRYITRAVYNLVRNNLQFSGSENTRAVNGAITSYLRKRWALGEKDRSTDIHHSVDAVIIACVTPGIIQKITRYTQGRELARTRGMKLVDEKTGEVFDPRDYTTQEWDEMFGVKPPLPWKTFKEEVELRLGADPLYLLDTQHDFKKKLDYPDWMLDKKYIHPIFVSRMPRHKNTGTVHDATIGSPKMFADGYVIKKTDLTSLKLDKNGEIEGYYNPESDMLLYNALKARLIAFKDKKEGAKEAFKQPFYKPKADGTQGPLVKKVKICVKQTSGVKAAGGIADNGDMIRIDIFNVKGKYYMVPIYVSDTAKKELPNRAVVAHKPVSEWKVMDDKDFCFSLYPNDLIRISKKGGIKVIDVSKKRYAEREMLGYYTGADVSAGAIGLKKHDNSITARGIGIQSLTVFEKYTVDVLGNISLVRKEPRMKFGS

SEQ ID NO: 15927 - protein, 1074 aa, unidentified
  REGION 1..1074: note = Cas Enzyme sequence
MKHPYGIGLDIGIASVGWAVVALNENAEPYGLIRCGSRIFDKAEQPKTGDSLAAPRREARSARRRLRRRSLRKADLYELMEKNGLPGKAEIEQAVQAGHLPDVYALRVQALDGPVTALDFARILLHLMQRRGFRSNRKADDAQKDGKLLQAIDANTRRMEANRYRTVGEMMYRDPVFAEHKRNKAENYLSTVKRDQIIDEARLVFAAQRQYGATWASPEMEAEYLCILTRQRSFAEGPGKGSPYSGSNRVGTCTLEGKSEQRAAKAAFSFEYFTLLQKINHIRIAKNGTSRTLTPAERQVLLSVCCQTDKLDFARIRKALALPEEARFNMVRYRGEQTAEACEKKEKITALPCYHKMRKALNTLRKDHIRNISREQLDAAGAALTNPENEDKLREALKQAEFEPLEIEALLTLPSFAGYGHISVKACRKLIPYLEQGMNYNDACQAAGYDFQGRQNGEKTKFLPASTEEMEDITSPVVRRAVAQTIKVVNAIIREQGESPVSIHLELAREMNKNFQQRSELDKAMRDNSAENERLMKELNELFPGRTVTGQDLVKYRLWKEQDGRCAYSIQPLELDKVITVSGYAEVDHIVPYSISFDDRRTNKVLVLASENRQKENRLPLQYLQGKRRDDFIVYTKANVKNFRKRQNLLKERLSEEDGKGYIQRNLQDTQYIAAFMLNYIRNHLAFADCSGAGKRRVVAVNGAVTAFLRKRWGLSKVRADGDLHHAADAAVIACTTQGMIKRVSDFCKRAETTAVRNEHFPEPWPHFRDELRQRLSACPQEDLMKINPVYYATVDISSIQPVFVSRMPRHKVTGAAHEETIRSQVNEKYTAVRKSITELSLDKDGKIKDYFKPSSDTLLYEALKKRLTEFGGNAKKAFAEPFYKPRADGTPGAQVRKVKVVAKMNNTIPVRSGGGVAKGGDMIRIDVYYVPGDSYYWVPIYVADTVKETLPNKAVVRDKTMEEWKEMKEDDFLFSLYSNDLILVERDKPICFSLMHEDSTLPKKYETKKELVYYKGGDISNGGIRIETHEGAYFLKSLTFGIVQKVQKYQVDVLGNYTPVKKEKRQTFPAQRR

SEQ ID NO: 15928 - protein, 1074 aa, unidentified
  REGION 1..1074: note = Cas Enzyme sequence
MKHPYGIGLDIGIASVGWAVVALNENAEPYGLIRCGSRIFDKAEQPKTGDSLAAPRREARSARRRLRRRSLRKADLYELMEKNGLPGKAEIEQAVQAGHLPDVYALRVQALDGPVTALDFARILLHLMQRRGFRSNRKADDAQKDGKLLQAIDANTRRMEENRYRTVGEMMYRDPVFAEHKRNKAENYLSTVKRDQIIDEARLVFAAQRQYGATWASPEMEAEYLCILTRQRSFAEGPGKGSPYSGSNRVGTCTLEGKSEQRAAKAAFSFEYFTLLQKINHIRIAENGTSRTLTPAERQVLLSVCCQTDKLDFARIRKALALPEEARFNMVRYRGEQTAEACEKKEKITALPCYHKMRKALNTLRKDHIRNISREQLDAAGAALTNPENEDKLREALKQAEFEPLEIEALLTLPSFAGYGHISVKACRKLIPYLEQGMNYNDACQAAGYDFQGRQNGEKAQFLPASTEEMEDITSPVVRRAVAQTIKVVNAIIREQGESPVSIHLELAREMNKNFQQRSELDKAMRDNSAENERLMKELNELFPGRTVTGQDLVKYRLWKEQDGRCAYSIQPLELDKVITVSGYAEVDHIVPYSISFDDRRTNKVLVLASENRQKGNRLPLQYLQGKRRDDFIVYTKANVKNFRKRQNLLKERLSEEDGKGYIQRNLQDTQYIAAFMLNYIRNHLAFADCSGAGKRRVVAVNGAVTAFLRKRWGLSKVRADGDLHHAADAAVIACTTQGMIKRVSDFCKRAETTAVRNEHFPEPWPHFRDELRQRLSACPQEDLMKINPVYYATVDISSIQPVFVSRMPRHKVTGAAHEETIRSQVNEKYTAVRKSITELSLDKDGKIKDYFKPSSDTLLYEALKKRLTEFGGNAKKAFAEPFYKPRADGTPGAQVRKVKVVAKMNNTIPVRSGGGVAKGGDMIRIDVYYVPGDSYYWVPIYVADTVKETLPNKAVVRDKTMEEWKEMKEDDFLFSLYSNDLILVERDKPICFSLMHEDSTLPKKYETKKELVYYKGGDISNGGIRIETHEGAYFLKSLTFGIVQKVQKYQVDVLGNYTPVKKEKRQTFPAQRR

SEQ ID NO: 15929 - protein, 1080 aa, unidentified
  REGION 1..1080: note = Cas Enzyme sequence
MAYAIGLDIGIASVGWATVKLDHDEQPWTIDKMGVRIFDKAEQPKTGESLAAPRRTARSMRRRLRRHRHRIERIKNLIITSGLLSSIGLDNLYVGQLEDIYQLRARALDKEINAQELARILLHLAQRRGFKSNRKTDKEDKEAGKLLTAVNANQARMKAKGYRTVGEMFYKDDVFKDHKRNKNEDYLATVQRDMAAAEANLILDKQMQHLKLGQDFKDKYLEIMLGQRSFDEGPGKGSQYAGDQIAKMIGNCTFEKDEQRAPKASYTFERFTLLEKINHIRLIANGKSVPLAEEQRNTIIEAAYASPNLTFFQIRKKLAIQEEIRFNLVRYDEKGLEANEKKEKMNCLKAYHEMRKAFDKIAKGHIDTMTEEQLNNAAYVLTVYKTDAKIKKALLNKNFSEEDIQALLNISGFSKFGHLSIKACDKLIPYLEQGMNYDDACEAAGYDFSAHGDSHGSKYLPAVTDDMDEITSPVVRRAVAQTIKVINAIIREHDASPIFINIELARELSKNFDERNKIKKSQDENKAANERLMNKIRTDFHKSNPTGMDLVKLKLYEEQGGICVYSQHVIDAERLFEPGYVEVDHVIPYSISFDDSYKNKVLVMGRENQLKGNRLPLQYMGKEQADKFTVWVNNNVKNYRKKQILLKKEISEDDSNKFKERNLQDTKHMAKFLYNYIHDYLVFAPSEIGRRRRVTAVSGVITAHMRKRWGIQKNRANGDLHHAVDALVIACTTNKMINEISDYSKYRENEFVQNEQGEMLVNRATGEILKHFPMPWTDFRAELEARLSDKPAQSLTVKHLLSYTGRNINEIQPIFVSRMPFHKVTGAAHKDTIKGVVGGGLVTVKRNLTDLKLKDGEIENYFNPDSDKLLYNSLKRTLTQAGGNAKKAFAEPFYKPKADGTPGPLVRKVKLVEKSTLNVSVHADTAVADNESMVRIDVFKVEGDGYYFVPIYVADTVKKELPSRAVVAGKNYSEWKIMDDKNFVFSVYPNDLLYVEHKDTLKFTKINDESDYTDTFLAKNCLTYYIKASISTASITVETQEGIYRIPSLGIKSLTTFEKYQVDVLGNYHKVNREKRQQFH

SEQ ID NO: 15930 - protein, 1042 aa, unidentified
  REGION 1..1042: note = Cas Enzyme sequence
MVYNLGIDIGIASIGFAAVDLETQKILLSGAHIFEAAENPKTGASLATPRRTARGQRRVINRRAKRKKAIRQLFRDHGFDHVETIDQPLTQTRGQFYPELFDPESSKQDKNTTISVWDFRNDALKRQLTDAELARVLFHIAKRRGFQSNRKGAEANDVEGRKALSKELQDAMAREGHATIGAHLAAKDKKRNGDGTYENFVERKLLRHEVRKIFESQRAFGFEKATQELEAQFVEIAFFQRPLQSSAHLIGFCSLEPAERRAPKFSYTAELFVLWSKLNNLRIKDQSGGERSLTQAEKETLAAKAHTLKSLSYVQIRKQLELTDQERFNISYRKVRNTDTSWEAIRETTEKKDFISLSGYHAIKDALAIPSEIDWRAWLSSNRNTMDETARLLSVLEDAAQIENELGKLPLTHAQITRLSEINHFKKTVDLSLKALRTIEPHMQQGLTYDKACLVAGYDHSQKINQGLDELPPFEDIRNPVVNRALAQSRKIINAVLRNHGKPQTIIIELARDVGKNFQDRSAIEKEQKKNEEYRDAAKKHVGEILGIQPENVSGEDILKYRLWKEQDAFCPYSGVYISPEMLRDSLATQIDHIIPYSRSWNDSYMNKILCLTSENQNKGSDTPREYFSRTGLDIDILVAYASRLPRKKAENLLLENFDEEKAAEWKSRAMNDTRYIARALKNHLEQSLDLGKGNRVQTRNGALTAHLRGAWGFPDKDRRNDRHHALDAIVLACSTQSMVQALTNWNKYEARRKNPAARVYPPKPWENFRDDAKAVIESVFVSRMPVRRITGAAHEDTIRSIKKLPNGDKQIVQRVKLKDLTTAKLENLVDKERNLRLYHLLKEKLGTCRDDAKKAFAEPIFMPVNDLNTTKAPRIKSVRIVTSEKSGIEINKGFASNGGMKRIDVFRQDGKFHLVPIYVHHFTKPTLPKRAVIAFKPEDQWTPVSDSNFIFSLHKNDYVVLIDKKQKIGGYYAGFDRATGAISIRAHDSDLSFGKEGMKTGLGVKLLQDFQKYSIDFFGNKTRIEKETRLGLADDSDSEPG

SEQ ID NO: 15931 - protein, 1061 aa, unidentified
  REGION 1..1061: note = Cas Enzyme sequence
MKYTLGVDVGIASIGFAGVNILSQSIPFCGVHIFEAAENPKDGASLAAPRREKRGMRRVISRRAQRKKALRCLFRRHGFGNVDAAIDAAPFAPPEKSVWDLRKEALERLLTEGEFIRVLFHIAKRRGFQSNRKGGEDNDTEGKKALSGARELQEAMRAAAAPTIGAYLATLDKKRNGDGSYERFVTRELLREEVRKIFEAQARFGNAKATPELLTDYAGSGKKEERNTPEGDGIAFYQRPLRSSEDLVGFCTLEPAEKRAPRFSYTAELFVLWSKLNNTRIRNVDGRERELTLDEKNRLAEKAHMLKSLSYKQARKDLGLQDEERFNLSYRKISEEDNTWEKIRDAAEKADFLKLPGYHALKGVLGAGGDMAWQKWTTESGRKKLDEVARILSFYEDRKEVDALLAALDIDFQQREELAKITHFSKVVDLSLKAIRNILPHMQQGLTYDKACDAAGYSRKQNKKLKKVPVFEDVRNPVVNRALAQARKVINACIREYDMPESIIVEMSRDLGRSFKDRKNIEREQKKNQAYREEARHHIAEIIGVVPENVSGEEILKYRLWKEQKALCCYCGSEITPAMLKDAVATQIDHILPYSRSWNDSYMNKVICHTSCNQEKANRTPYEWLAGTPGWESVVLFARQLPPRKAEHLLMQNFDDEKAGQWKDRALNDTRYIAKLLKNHLENSLDLGDGVRVQTRNGALTANLRRAWGLGKRRDNDRHHAVDAIVLACSTQAMVQQHANWNKYEARRKNPAARPAPPSPWENFRQDVMNKVFGEKNAQGIREGGIFVSRMPVRKVTGAAHEETIRSIRKSDGKAIQRVKLSALTPARLEDIVDKERNIKLYSVLKERLDAHGGKPDKAFAEPVYMPTNDPAKKGPRINSVRVVTNEKSGVPINGGLASNGDMVRVDVFLKEGKYYLVPIYVHHFAQDKLPNKAIVANKPEDEWPEMDDRDFIFSLYKNDLVMIRSKKEEFWGYYAGTDRSVASISIKCHDADKSVWNSGQKTGIGVKTLLSFEKYSVDYFGNIFPKHSPGIREKRRGVAQRDDSKSGAAEPVQRAAATGE

SEQ ID NO: 15932 - protein, 1061 aa, unidentified
  REGION 1..1061: note = Cas Enzyme sequence
MKYTLGVDVGIASVGFAGVNILSQSISFCGVHIFEAAENPKDGASLAAPRREKRGMRRVIGRRAQRKKALRNLFLQFGLSDVEAIDSAPFAPPEQSVWDLRKEALERLLADGELSRILFHIAKRRGFQSNRKGVEDNDTEGKKALSGAIELQEAMVAAAAPTIGAYLATLDKKRNGDGSYERFVTRDLLREEVRQIFEAQTHFGNAKTTPEFLTAYAGSGKKGERNTPEGDGIAFYQRPLKSSEDLVGFCTLEPAEKRAPRFAYTAELFVLWSKLNNARIKSVGGNERELTLDEKNRLAEKAHTLKSLSYKQARKELDLQDEERFNLSYRKISDEDDAWEKIRDTAEKADFLKLPGYHALKNILGGNGDASWQKWTGADRDKLDEIARTLSFYEDKKQVDELLSDLEIDFRQREELAKITHFSKVVDLSLKTIRNILPHMQAGMTYDKACAAAGYDHSRKQNRKLKKVPVFEDVRNPVVNRALAQTRKVINACIREYGMPESIIVEMSRDLGRAFKDRKNIEREQKKNQAYREEARQHIAEIIGGIPDNISGEDILKYRLWKDQKAMCCYCGSEITPVMLKDAVATQIDHILPYSRSWNDSYMNKVICHTSCNQDKANRTPYEWLAGTHAWEGIELFSRQLPPRKAENLLMQNFDDEKAEQWKDRALNDTRYISRLLKNHLAHSLDLGEGVRVQTRNGMLTSNLRGAWGLGKTRENDRHHAVDAIVLACSTQAMVQQHANWNKYAARRQNPAARPLPPSPWENFRHDVMNKVFGEKNAQGIREGGIFVSRMPVRKITGAAHEETVRSIRKSDGKIIQRVKLSSLTPARLEDLVDKDRNIKLYNVLKERLDAHGGKPDKAFAAPVYMPTNDPNKQGPRINAVRVVTSEKSGVPINGGLASNGDMVRVDVFLKEGKYFLVPIYVHHFAQDRLPNKAIFQGKTEDEWPEMDDKDFIFSLYKNDLVRVKKNEKEEFWGYYVGTDRATGNVSFKAHDGSPAFGKDGSKRSGVKTLLAFEKYSVDYFGNIFPKTSPGIREKRRDVAQRDDSKSGAAEPVQRSVATGE

SEQ ID NO: 15933 - protein, 1004 aa, unidentified
  REGION 1..1004: note = Cas Enzyme sequence
MGISKFTIGLDIGSNSLGWAIVDGSPEFNGENIIAGVRVFSGGTAKTQAGEQSRNSDRRAARQARRQNDRYSRRKRKLKKVLITAGMYPCEPKEQEPLIEIDPYFLRRKGLYEKLTPEEFGRALLHLNQRRGFRSSLKIQDQAKEEGEIKKNISALSQEIAQNDFKTIGELFAWKKEQGMKIRGQHTSRQMFIDEFELLWNAQAQFFPDLLTEALKNEVYSAIFYQRPLKEQSHLIGKCKLEPEERRCPRSSWYAQQFRILQEINNFRVLSRSGERTLTEEERKQIFQKLMTQKSPVKIQTIKSKLLDLDEIETLNFEATGRDSLEPNYVEAGLQKIFGKDHYLANAEWYRNEVWEALIREDPYDFKQKAENDWGMNEERIKSLFDIKRPSGYTNYSLKAIKKLLPWLEKGFSVYEAIEKAGYQQEEQKELSYLPPIRSDEFRNPIVVRALSETRKVINAIIRNYGMPEKIMIEMARQTKGTIRSRQKQLWENLRRAKYHEEIREKLQEKDIDASRNNITKYKLWEECNYTCPFTGSSISFSQLFGNDYEYDIEHIFPFRRSLDDSFINKTLCKRSENISRKGNRTPYEAYYGTEQYDQILLRVNKNKKMPYAKRKRFSMKEIPEDFTKRQLVDTSYAAKSAVEYLKQLGCEVDTVRGHITSELRHFWGLNSILNDEDDNNQKSRDDHRHHAIDAIVVAHITKKHINALKSKYDFQKNKHFPSPWDAFGIGIDDFRRDVKKSVQTINVSHRPERKISGKMNLETNYGKTGQDNQFVYRVPLQALTPAKVTKIVDPVVRAIVESRLKEFGIEPGKGSKPIKAAVFKEELRMKAKCNKEGPPIKKVRVRASFSNAIPIKDKNGIPYRYVEPGSNHHIAIYEYEDEKGVKRRCKEMVSRFEAYQRRMKGLPIVNKKHPQYPDARFMMSLCINDMVIYKKNNNKYLCRVQKISGEGNGESIDISFRDHTASTIDSEKKGFRVRTLSPSKFDIEKVFVDPLGRVLPAHD

SEQ ID NO: 15934 - protein, 1048 aa, unidentified
  REGION 1..1048: note = Cas Enzyme sequence
MRRPYRLGLDVGSNSLGWWMVWLDGEGLPVGLGPGGVRIYPDGRDPQSKTSNAVQRRVARGARRRRDRYLKRREKLMALLVQHGLMPEDEAARKALEKLDPYELRAGALDGALPAHHLGRALFHLDQRRGFQSNRKTEKGDKEAGVIKEAAGRLEAKMAEEHARTLGEFLHRRHRDRDPVRARNRSTGTKADYEFYPTRQMVLDEFNMIWDAQARHHPSLTAEARAAICHAVFDQRPLKQPPVGKCSLDPAHDNSDTEGFRCAWAHPLAQRFRIWQEVRNLEIVESGKNGVCLTKEQGDKIALALLQTGKFSFDKMRAQLALPSDAKFNLESDKRQELLGDQTAAKLAGKAFFGKAWRSFPLPRQIDIVSRLLDEQDDAKLIEWLVAEADLDFETAERVASAFLPDGHCRLGLRAIRKLVPLMEGGRDEHNARITAYPAEMRMTGERLERLPYYGEWLQDDVLGSGDPRDGNDKRWGRFPNPTVHIGLGQLRRIVNDLIREYGPPAQIAVEMTRDFKLSPDRLAKVEKEQADNQRKNDARRQTIREHGQAENVRNTLKLRLWEELSPDGLDRICPYTGERISVARLLSEEVDIDHLIPYQDSWDDSAANKTVCMTYANRAKGNRTPYEAFGSRPEWPEISSRATSLPKNKRWRFQPDARDRFNAAGGFLARQLNETGWLARVAKHYLAAVTDPYKINVLPGKLTALIRGKWGLNGLLPDHNYSDYSDAKNRKDHRHHAIDALVAAMTDRSLLHRMSSAYDVDRERIEVPKPWETLRDDLKVRLDAMTVSHKPDHGLQAQLHEDTAYGVVKDSKKEGGNLVYRKAFHVLKEKEIERIRDRRLRDMLKAYIADAKVAGKDLKTALQEFSKRNDIPGIQTVRHVRLLKQEKAEYLVPVKADTGRPYKSFAAGQNAFIEIFETSDGKWRGEGISMFKANQKNAAMEWLTKFPGARLVMRVFKGDLVALDWNGKRTVMVVKRLEAAHDRLLFAAHNEAGDLDGRDADKNDPFGWLQRTYNSLKKLNPERVRVDELGRVWRVRRPETPRTPELA

SEQ ID NO: 15935 - protein, 1102 aa, unidentified
  REGION 1..1102: note = Cas Enzyme sequence
MMAERKKPVWRLGADLGANSLGWAAIELSAPVNGDPISILAAGSRIFSDGRDPKSGASLAVDRRDARAMRRRRDRFQQRQKALIKYLIADGLFPADEAARKAMAAIDPYAVRARALDEALSLPELGRALFHLNQRRGFKSNRKADRKADDDAGKIAIGIDRTRDAIAEDETAAGAEPGSWTFGKWLYERQLKGQSVRTRSRPESGEDAKGDGYDFYPGRALMEEEFDAIWAAQAPHHPDVLTNDVHDRLHEIIFYQRPLKAPQVGMCTLIPGDRRLPKAHPLFQRRRLLEELNALMIVRPGEVAQRLTREERDILFLKLKDKNKVSFASLRKALKLDPDARFNKESENRTDLKGDEVAAVMGSKTRFGNRWVHLSVEVQWDVIARLDDVESEAEDAAFRAWLSETYALTPEQARAVANAPLPPGYGRFGETATCKLIEALRDGKKDGRVLVYSEAVTDAGLGHHSDRRTGEVFEDAKGRPQLPYYGVALERHIMPGTGNPSHSEEMRIGRLTNPTVHIGLNQLRRIVNVLIRAYGPPAEIAIELARELKLTDDDKKRINRENNENRLNAQRRSEKLLAIGQADTGANRALLKLWEELNPANVLDRRCIYSGQQISIDMLFSAAVEVDHILPFSATLDDSNGNKIVCLREANREKRKRSPYEAWGHNARWDEIAARAAQLPRNKRWRFEPDAMDKFSDEGGFQARHLVDTQYLARLSREYLATLYPEKGEGSGHIWVSPGRLTEMVRRKLGLNDLLPDHNFGGGADQAKNRLDHRHHAIDAVVVAIVDRGMLNAIARASGQEGTEGRERIIIPEPWDGFRDALRETVNRITVSHRTDHGTASKAGLPKGQDATAGRLHNDTAYGLTGETDAKGNSIVVRRVPLSSFKKLADLDRIRDADLRAALYRHLDGREGKAFEQAIAAFPDLEWHPFRGVRRVRVTEPLTVIPIKDRNGRIYKGYKGDSNYRYDVWELPDGKWVNEVVSMFDAHQPGWQSAIRSANPTARKIMSLHRDDVLAIERDGGGRELVRVVKFSEKQFAVAPPNEGGSLKVRDADKDDPFKYRYPSPNTLKAWRARQVRIDEIGRVLDPDFPARTARRKTRKQP

SEQ ID NO: 15936 - protein, 1106 aa, unidentified
  REGION 1..1106: note = Cas Enzyme sequence
MADQKKLVWRLGADLGANSLGWAAIELSAPVNGKPISILAAGSRIFSSSAQGAGRDAQSGESLAVARRDARAMRRRRDRFQQRQKALIKYLIADGLFPADEAARKAMAAIDPYAVRARALDEVLSLPELGRALFHLNQRRGFKSNRKADRKADDDAGKIAIGIDRTRDAIAEDEAAAGAEPGSWTFGKWLHERRLKGQSVRTRLRPESGEDAKGDGYDFYPGRTLMEEEFDAIWAAQVPHHPDVLTDDVYRRLREIIFYQRPLKTPQVGMCTLIPGDRRLPKAHPLFQKRRLLEELNALMIVRPGEVAQRLTREERDILFLKLKDKNKVSFASLRKVLKLDPDARFNKESENRTDLKGDEVAAVMGSKTRFGNHWGHLSVEAQWDVLARLDDVESEAEDAAFRAWLVETYALTPEQARAIANAPLPPGYGRFGETATRKLIEALRDGEKDGRVLVYSEAVTDAGLGHHSDRRTGEVFEDTKGRPQLPYYGVALERHIMPGTGDPSDPEEMRIGRLTNPTVHIGLNQLRRIVNSLIRAYGPPVEIAIELARELKLTDDDKKRINRENNENRLNAQRRSEKLLAIGQADTGANRALLKLWEELNPANVLDRRCIYSGQQISIDMLFSAAVEVDHILPFSATLDDSNGNKIICLREANREKRKRSPYEAWGHSARWDEIAARAAQLPRNKRWRFEPDAMDKFRDESGFQARHLVDTQYLARLSREYLATLYPEKGEGSGHIWVSPGRLTEMVRRKLGLNDLLPDHNFGGGADQAKNRLDHRHHAIDAVVVAIVDRGMLNAIARASGQEGAEGRERIIIPEPWDGFRDTLRETVNRITVSHRTDHGTASKAGLPKGKDATAGRLHNDTAYGLTGETDAKGNSIVVRRVPLSSFKKLADLGRIRDADLRAALYRHLDGREGKAFEQAIAAFPDLEWHPFRGVRRARVTEPLTIIPIKDRNGRIYKGYKGDSNYRYDVWELPDGKWVNEVVSMFDAHQPGWQSAIRSANPTARKIMSLHRDDVLAIERDGGGRELVRVVKFSEKQFAVAPPNEGGSLKARDADKDDPFKYRYPSPNTLKAWRARQVRIDEIGRVMDPGFPARIARRKTRKQS

SEQ ID NO: 15937 - protein, 1078 aa, unidentified
  REGION 1..1078: note = Cas Enzyme sequence
MCKKMKHPYGIGLDIGIASVGWAVVALNENAEPYGLVRCGSRIFDKAEQPKTGDSLAAPRREARSARRRLRRRSLRKADLYELMEKNGLPGKAEIEQAVQAGHLPDVYALRVQALDGPVTALDFARILLHLMQRRGFRSNRKADDAQKDGKLLQAIDANTRRMEANRYRTVGEMMYRDPVFAEHKRNKAENYLSTVKRDQIIDEARLVFAAQRQYGATWASPEMEAEYLCILTRQRSFAEGPGKGSPYSGSNRVGTCTLEGKSEQRAAKAAFSFEYFTLLQKINHIRIAENGTSRTLTPAERQVLLSVCSQTDKLDFARVRKALALPEEARFNMVRYRGEQTAEACEKKEKITALPCYHKMRKALNTLRKDHIRNISREQLDAAGAALTNPENEDKLREALKQAEFEPLEIEALLTLPSFAGYGHISVKACRKLIPYLEQGMNYNDACQAAGYDFQGRQNGEKAQFLPASTEEMEDITSPVVRRAVAQTIKVINAIIREQGESPVSIHLELAREMNKNFQQRSELDKAMRDNSAENERLMKELNELFPGRTVTGQDLVKYRLWKEQDGRCAYSIQPLELDKVITVSGYAEVDHIVPYSISFDDRRTNKVLVLASENRQKGNRLPLQYLQGKRRDDFIVYTKANVKNFRKRQNLLKERLSEEDGKGYIQRNLQDTQYIAAFMLNYIRNHLAFADYSRAGKRRVVAVNGAVTAFLRKRWGLGKVRADGDLHHAVDAAVIACTTQGMIKRVSDFCKRAETTAVRNEHFPEPWPRFRDELTQRLSACPQEHLMQINPVYYATVDISSIQPVFVSRMPRHKVTGAAHKETIKSRLDDTHVVQRRNITELKLDKDGEIAGYFNRSSDTLLYNALKARLLAFGGDGKKAFAEPFYKPRADGTPGARVQKVKICDKVTSTVPVHGGKGVADNDTMVRIDVYYVPGDGYYWIPVYVADTVKPELPSKAVVAYKSSAEWKEMKDEDFLFSLCQHDLVRIESKRLMKFKVQNRDSTLEKEMPVNKILAYFEGGNISTGAITVTTHDDAYIADGLGFKTLQKVQKYQVDVLGNYTPVKKEKRQTFPAQRR

SEQ ID NO: 15938 - protein, 1010 aa, unidentified
  REGION 1..1010: note = Cas Enzyme sequence
RLRRRSLRKADLYELMEKNGLPGKAEIEQAVQAGHLPDVYALRVQALDGPVTALDFARILLHLMQRRGFRSNRKADDAQKDGKLLQAIDANTRRMEANRYRTVGEMMYRDPVFAEHKRNKAENYLSTVKRDQIIDEARLVFAAQRQYGATWASPEMEAEYLCILTRQRSFAEGPGKGSPYSGSNRVGTCTLEGKSEQRAAKAAFSFEYFTLLQKINHIRIAENGTSRTLTPAERQVLLSVCCQTDKLDFARVRKALALPEEARFNMVRYRGEQTAEACEKKEKITALPCYHKMRKALNTLRKDHIRNISREQLDAAGAALTNPENEDKLREALKQAEFEPLEIEALLTLPSFAGYGHISVKACRKLIPYLEQGMNYNDACQAAGYDFQGRQNGEKAQFLPASTEEMEDITSPVVRRAVAQTIKVVNAIIREQGESPVSIHLELAREMNKNFQQRSELDKAMRDNSAENERLMKELNELFPGRTVTGQDLVKYRLWKEQDGRCAYSIQPLELDKVITVSGYAEVDHIVPYSISFDDRRTNKVLVLASENRQKGNRLPLQYLQGKRRDDFIVYTKANVKNFRKRQNLLKERLSEEDGKGYIQRNLQDTQYIAAFMLNYIRNHLAFADCSGAGKRRVVAVNGAVTAFLRKRWGLGKVRADGDLHHAVDAAVIACTTQGMIKRVSDFCKRAETTAVRNEHFPEPWPHFRDELTQRLSACPQEDLMKINPVYYATVDISSIQPVFVSRMPRHKVTGAAHEDTIRSQVNEKYTAVRKSITELSLDKDGKIKDYFKPSSDTLLYEALKKRLTEFGGNAKKAFAEPFYKPRADGTPGAQVRKVKVVAKMSNTIPVRSGGGVAKGGNMIRIDVYYVPGDGYYWVPIYVADTVKETLPNKAVVRDKTMEEWKEMKEDDFLFSLYSNDLILVERDKPICFSLMHEDSTLPKKYETKKELVYYKGGDISNGGIRIETHEGAYFLKSLTFGIVQKVQKYQVDVLGNYTPVKKEKRQTFPAQRR

SEQ ID NO: 15939 - protein, 1015 aa, unidentified
  REGION 1..1015: note = Cas Enzyme sequence
RSARRRLRRRSLRKADLYELMEKNGLPGKAEIEQAVQAGHLPDVYALRVQALDGPVTALDFARILLHLMQRRGFRSNRKADDAQKDGKLLQAIDANTRRMEANRYRTVGEMMYRDPVFAEHKRNKAENYLSTVKRDQIIDEARLVFAAQRQYGATWASPEMEAEYLCILTRQRSFAEGPGKGSPYSGSNRVGTCTLEGKSEQRAAKAAFSFEYFTLLQKINHIRIAENGTSRTLTPAERQVLLSVCSQTDKLDFARIRKALALPEEARFNMVRYRGEQTAEACEKKEKITALPCYHKMRKALNTLRKDHIRNISREQLDAAGAALTNPENEDKLREALRQAEFEPLEIEALLTLPSFAGYGHISVKACRKLIPYLEQGMNYNDACQAAGYDFQGSQNGEKAQFLPASTEEMEDITSPVVRRAVAQTIKVVNAIIREQGESPVSIHLELAREMNKNFQQRSELDKAMRDNSAENERLMKELNELFPGRTVTGQDLVKYRLWKEQDGRCAYSIQPLELDKVITVSGYAEVDHIVPYSISFDDRRTNKVLVLASENRQKGNRLPLQYLQGKRRDDFIVYTKANVKNFRKRQNLLKERLSEEDGKGFIQRNLQDTQYIAAFMLNYIRNHLAFADCSGAGKRRVVAVNGAVTAFLRKRWGLGKVRADGDLHHAVDAAVIACTTQGMIKRVSDFCKRAETTAVRNEHFPEPWPHFRDELTQRLSACPQEDLMKINPVYYATVDISSIQPVFVSRMPRHKVTGAAHEDTIRSQVNEKYTAVRKSITELSLDKDGKIKDYFKPSSDTLLYEALKKRLTEFGGNAKKAFAEPFYKPRADGTPGAQVRKVKVVAKMSNTIPVRSGGGVAKGGNMIRIDVYYVPGDGYYWVPIYVADTVKETLPNKAVVRDKTMEEWKEMKEDDFLFSLYSNDLILVERDKPICFSLMHEDSTLPKKYETKKELVYYKGGDISNGGIRIETHEGAYFLKSLTFGIVQKVQKYQVDVLGNYTPVKKEKRQTFPAQRR

SEQ ID NO: 15940 - protein, 1074 aa, unidentified
  REGION 1..1074: note = Cas Enzyme sequence
MKHPYGIGLDIGIASVGWAVVALNENAEPYGLIRCGSRIFDKAEQPQKGDSLAAPRREARSTRRRLRRRSLRKADLYELMEKNGLSGKAEIEQAVQAGHLPDVYALRVQALDGPVTALDFARILLHLMQRRGFRSNRKADDAQKDGKLLQAIDANTRRMEANRYRTVGEMMYRDPVFAEHKRNKAENYLSTVKRDQIIDEARLVFAAQRQYGATWASPEMEAEYLCILTRQRSFAEGPGKGSPYSGSNRVGTCTLEGKSEQRAAKAAFSFEYFTLLQKINHIRIAENGTSRTLTPAERQVLLSVCCQTDKLDFARVRKALALPEEARFNMVRYRGEQTAEACEKKEKITALPCYHKMRKALNTLRKDHIRNISREQLDAAGAALTNPENEDKLREALKQAEFEPLEIEALLTLPSFAGYGHISVKACRKLIPYLEQGMNYNDACQAAGYDFQGRQNGEKAQFLPASTEEMEDITSPVVRRAVAQTIKVVNAIIREQGESPVSIHLELAREMNKNFQQRSELDKAMRDNSAENERLMKELNELFPGRTVTGQDLVKYRLWKEQDGRCAYSIQPLELDKVITVSGYAEVDHIIPYSISFDDRRTNKVLVLASENRQKGNRLPLQYLQGKRRDDFIVYTKANVKNFRKRQNLLKERLSEEDGKGYIQRNLQDTQYIAAFMLNYIRNHLAFADCSGAGKRRVVAVNGAVTAFLRKRWGLGKVRADGDLHHAADAAVIACTTQGMIKRVSDFCKRAETTAVRNEHFPEPWPHFRDELRQRLSACPQEDLMKINPVYYATVDISSIQPVFVSRMPRHKVTGAAHEETIRSQVNEKYTAVRKSITELSLDKDGKIKDYFKPSSDTLLYEALKKRLTEFGGNAKKAFAEPFYKPRADGTPGAQVRKVKVVAKMNNTIPVRSGGGVAKGGDMIRIDVYYVPGDGYYWVPIYVADTVKETLPNKAVVRDKTMEEWKEMKEDDFLFSLYSNDLILVERDKPICFSLMHEDSTLPKKYETKKELVYYKGGDISNGGIRIETHEGAYFLKSLTFGIVQKVQKYQVDVLGNYTPVKKEKRQTFPAQRR

SEQ ID NO: 15941 - protein, 1074 aa, unidentified
  REGION 1..1074: note = Cas Enzyme sequence
MKHPYGIGLDIGIASVGWAVVALNENAEPYGLIRCGSRIFDKAEEPQTGDSLAAPRRKARSARRRLRRRSLRKADLYELMEKNGLPGKAEIEQAVQAGHLPDVYALRVQALDGPVTALDFARILLHLMQRRGFRSNRKADDAQKDGKLLQAIDANTRRMEANRYRTVGEMMYRDPVFAEHKRNKAENYLSTVKRDQIIDEARLVFAAQRQYGATWASPEMEAEYLCILTRQRSFAEGPGKGSPYSGSNRVGTCTLEGKSEQRAAKAAFSFEYFTLLQKINHIRIAENGTSRTLTPAERQVLLSVCCQTDKLDFARVRKALALPEEARFNMVRYRGEQTAEACEKKEKITAFPCYHKMRKALNTLRKDHIRNISREQLDAAGAALTNPENEDKLREALKQAEFEPLEIEALLTLPSFAGYGHISVKACRKLIPYLEQGMNYNDACQAAGYDFQGSQNGEKAQFLPASTEEMEDITSPVVRRAVAQTIKVVNAIIREQGESPVSIHLELAREMNKNFQQRSELDKAMRDNSAENERLMKELNELFPGRTVTGQDLVKYRLWKEQDGRCAYSIQPLELDKVITVSGYAEVDHIVPYSISFDDRRTNKVLVLKSENRQKGNRLPLQYLQGKRRDDFIVYTKANVKNFRKRQNLLKERLSEEDGKGYIQRNLQDTQYIAAFMLNYIRNHLAFADCSGAGKRRVVAVNGAVTAFLRKRWGLGKVRADGDLHHAADAAVIACTTQGMIKRVSDFCKRAETTAVRNEHFPEPWPHFRDELTQRLSACPQEDLMKINPVYYATVDISSIQPVFVSRMPRHKVTGAAHEETIRSQVNEKYTAVRKSITELSLDKDGKIKDYFKPSSDTLLYEALKKRLTEFGGNAKKAFAEPFYKPRADGTPGAQVRKVKVVAKMSNTIPVRSGGGVAKGGDMIRIDVYYVPGDGYYWVPIYVADTVKETLPNKAVVRDKTMEEWKEMKEDDFLFSLYSNDLILVERDKPICFSLMHEDSTLPKKYETKKELVYYKGGDISNGGIRIETHEGAYFLKSLTFGIVQKVQKYQVDVLGNYTPVKKEKRQTFPAQRR

SEQ ID NO: 15942 - protein, 1074 aa, unidentified
  REGION 1..1074: note = Cas Enzyme sequence
MKHPYGIGLDIGIASVGWAVVALNENAEPYGLIRCGSRIFDKAEQPKTGDSLAAPRREARSARRRQRRRSLRKADLYELMEKNGLPGKAEIEQAVQAGHLPDVYALRVQALDGPVTALDFARILLHLMQRRGFRSNRKADDAQKDGKLLQAIDANTRRMEANRYRTVGEMMYRDPVFAEHKRNKAENYLSTVKRDQIIDEARLVFAAQRQYGATWASPEMEAEYLCILTRQRSFAEGPGKGSPYSGSNRVGTCTLEGKSEQRAAKAAFSFEYFTLLQKINHIRIAENGTSRTLTPAERQVLLSVCCQTDKLDFARVRKALALPEEARFNMVRYRGEQTAEACEKKEKITALPCYHKMRKALNTLRKDHIRNISREQLDAAGAALTNPENEDKLREALKQAEFEPLEIEALLTLPSFAGYGHISVKACRKMIPYLEQGMNYNDACQAAGYDFQGRQNGEKAQFLPASTEEMEDITSPVVRRAVAQTIKVVNAIIREQGESPVSIHLELAREMNKNFQQRSELDKAMQDNSAENEKLMQELHAKFSGRKISGQDLVKYRLWKEQNEICAYSLEKLDLTRVITEPGYAEVDHIVPYSISFDDRRTNKVLVLKSENRQKGNRLPLQYLQGKRRDDFIVYTKANVKNFRKRQNLLKERLSEEDGKGYIQRNLQDTQYIAAFMLNYIRNHLAFADCSGAGKRRVVAVNGAVTAFLRKRWGLGKVRADGDLHHAADAAVIACTTQGMIKRVSDFCKRAETTAVRNEHFPEPWPRFRDELTQRLSACPQEDLMKINPVYYATVDISSIQPVFVSRMPRHKVTGAAHEETIRSQVNEQYTAVRKSITELSLDKDGKIKDYFNPSSDTLLYEALKKRLTEFGGNAKKAFAEPFYKPRADGTPGAQVRKVKVVAKMSNTIPVRSGGGVAKGGDMIRIDVYYVPGDGYYWVPIYVADTVKETLPNKAVVRDKTMEEWKEMKEDDFLFSLYSNDLILVERDKPICFSLMHEDSTLPKKYETKKELVYYKGGDISNGGIRIETHEGAYFLKSLTFGIVQKVQKYQVDVLGNYTPVKKEKRQTFPAQRR

SEQ ID NO: 15943 - protein, 948 aa, unidentified
  REGION 1..948: note = Cas Enzyme sequence
LMQRRGFRSNRKADDAQKDGKLLQAIDANTRRMEANRYRTVGEMMYRDPVFAEHKRNKAENYLSTVKRDQIIDEARLVFAAQRQYGATWASLEMEAEYLCILTRQRSFAEGPGKGSPYSGSNRVGTCTLEGKSEQRAAKAAFSFEYFTLLQKINHIRIAENGTSRTLTPAERQVLLSACYQTDKLDFARIRKALALPEEARFNMVRYRGEQTAEACEKKEKITALPCYHKMRKALNTLRKDHIRNISREQLDAAGAALTNPENEDKLREALKQAEFEPLEIEALLTLPSFAGYGHISVKACRKLIPYLEQGMNYNDACQAAGYDFQGRQNGEKAQFLPASTEEMEDITSPVVRRAVAQTIKVVNAIIREQGESPVSIHLELAREMNKNFQQRSELDKAMRDNSAENERLMKELNELFPGRTVTGQDLVKYRLWKEQDGRCAYSIQPLELDKVITVSGYAEVDHIVPYSISFDDRRTNKVLVLASENRQKGNRLPLQYLQGKRRDDFIVYTKANVKNFRKRQNLLKERLSEEDGKGYIQRNLQDTQYIAAFMLNYIRNHLAFADCSGAGKRRVVAVNGAVTAFLRKRWGLSKVRADGDLHHAVDAAVIACTTQGMIKRVSDFCKRAETTAVRNEHFPEPWPHFRDELTQRLSACPQEDLMKINPVYYATVDISSIQPVFVSRMPRHKVTGAAHEDTIRSQVNEKYTAVRKSITELSLDKDGKIKDYFKPSSDTLLYEALKKRLTEFGGNAKKAFAEPFYKPRADGTPGAQVRKVKVVAKMSNTIPVRSGGGVAKGGDMIRIDVYYVPGDGYYWVPIYVADTVKETLPNKAVVRDKTMEEWKEMKEDDFLFSLYSNDLILVERDKPICFSLMQEDSTLPKKYETKKELVYYKGGDISNGGIRIETHEGAYFLKSLTFGIVQKVQKYQVDVLGNYTPVKKEKRQTFPAQRR

SEQ ID NO: 15944 - protein, 979 aa, unidentified
  REGION 1..979: note = Cas Enzyme sequence
QAGHLPDVYALRVQALDGPVTALDFARILLHLMQRRGFRSNRKADDAQKDGKLLQAIDANTRRMEANRYRTVGEMMYRDPVFAEHKRNKAENYLSTVKRDQIIDEARLVFAAQRQYGATWASPEMEAEYLCILTRQRSFAEGPGKGSPYSGSNRVGTCTLEGKSEQRAAKAAFSFEYFTLLQKINHIRIAENGTSRTLTPAERQVLLSACCQTDKLDFARIRKALALPEEARFNMVRYRGEQTAEACEKKEKITALPCYHKMRKALNTLRKDHIRNISREQLDAAGAALTNPENEDKLREALKQAEFEPLEIEALLTLPSFAGYGHISVKACRKLIPYLEQGMNYNDACQAAGYDFQGRQNGEKAQFLPASTEEMEDITSPVVRRAVAQTIKVVNAIIREQGESPVSIHLELAREMNKNFQQRSELDKAMRDNSAENERLMKELNELFPGRTVTGQDLVKYRLWKEQDGRCAYSIQPLELDKVITVSGYAEVDHIVPYSISFDDRRTNKVLVLASENRQKGNRLPLQYLQGKRRDDFIVYTKANVKNFRKRQNLLKERLSEEDGKGYIQRNLQDTQYIAAFMLNYICNHLAFADCSGAGKRRVVAVNGAVTAFLRKRWGLSKVRADGNLHHAVDAAVIACTTQGMIKRVSDFCKRAETTAVRNEHFPEPWPHFRDELTQRLSACPQEDLMKINPVYYATVDISSIQPVFVSRMPCHKVTGAAHEETIRSQVNEQYTAVRKSITELSLDKDGKIKDYFNPSSDTLLYEALKKRLTEFGGNAKKAFAEPFYKPRADGTPGAQVRKVKVVAKMSNTIPVRSGGGVAKGGNMIRIDVYYVPGDGYYWVPIYVADTVRPELPNKAVLRGKSMEDWKEMKEENFLFSLYDNDLILVEREEPINFSLVNSDSTLPNKFSVKKVLVYYKSGNISNAAIKVETHDGAYVFEGMTFGTVRKIQKYQVDVLGNYTPVKKEKRQTFPAQRR

SEQ ID NO: 15945 - protein, 1074 aa, unidentified
  REGION 1..1074: note = Cas Enzyme sequence
MKHPYGIGLDIGIASVGWAVVALNENAEPYGLIRCGSRIFDKAEEPQKGDSLAAPRRKARSARRRLRRRSLRKADLYELMEKNGLPGKAEIEQAVQAGHLPDVYALRVQALDGPVTALDFARILLHLMQRRGFRSNRKADDAQKDGKLLQAIDANTRRMEANRYRTVGEMMYRDPVFAEHKRNKAENYLSTVKRDQIIDEARLVFAAQRQYGATWASPEMEAEYLCILTRQRSFAEGPGKGSPYSGSNRVGTCTLEGKSEQRAAKAAFSFEYFTLLQKINHIRIAENGTSRTLTPAERQVLLSVCCQTDKLDFARVRKALALPEEARFNMVRYRGEQTAEACEKKEKITALPCYHKMRKALNTLRKDHIRNISREQLDAAGAALTNPENEDKLREALKQAEFEPLEIEALLTLPSFAGYGHISVKACRKLIPYLEQGMNYNDACQAAGYDFQGRQNGEKAQFLPASTEEMEDITSPVVRRAVAQTIKVVNAIIREQGESPVSIHLELAREMNKNFQQRSELDKAMRDNSAENERLMKELNELFPGRTVTGQDLVKYRLWKEQDGRCAYSIQPLELDKVITVSGYAEVDHIVPYSISFDDRRTNKVLVLASENRQKGNRLPLQYLQGKRRDDFIVYTKANVKNFRKRQNLLKERLSEEDGKGYIQRNLQDTQYIAAFMLNYIRNHLAFADCSGAGKRRVVAVNGAVTAFLRKRWGLGKVRADGDLHHAVDAAVIACTTQGMIKRVSDFCKRAETTAVRNEHFPEPWPRFRDELRQRLSACPQEDLMKINPVYYTTVDISSIQPVFVSRMPRHKVTGAAHEETIRSQVNEKYTAVRKSITELSLDKDGKIKDYFKPSSDTLLYEALKKRLTEFGGNAKKAFAEPFYKPRADGTPGAQVRKVKVVAKMSNTIPVRSGGGVAKGGNMIRIDVYYVPGDGYYWVPIYVADTVRPELPNKAVLRGKSMEDWKEMKEENFLFSLYDNDLILVEREEPINFSLVNSDSTLPNKFSVKKVLVYYKSGNISNAAIKVETHDGAYVFEGMTFGTVRKIQKYQVDILGNYVPVKKEKRQTFPAQRR

SEQ ID NO: 15946 - protein, 1074 aa, unidentified
  REGION 1..1074: note = Cas Enzyme sequence
MKHPYGIGLDIGIASVGWAVVALNENAEPYGLIRCGSRIFDKAEEPQKGDSLAAPRRKARSARRRLRRRSLRKADLYELMEKNGLPGKAEIEQAVQAGHLPDVYALRVQALDGPVTALDFARILLHLMQRRGFRSNRKADDAQKDGKLLQAIDANTRRMEANRYRTVGEMMYRDPVFAEHKRNKAENYLSTVKRDQIIDEARLVFAAQRQYGATWASLEMEAEYLCILTRQRSFAEGPGKGSPYSGSNRVGTCTLEGKSEQRAAKAAFSFEYFTLLQKINHIRIAENGTSRTLTPAERQVLLSACYQTDKLDFARIRKALALPEEARFNMVRYRGEQTAEACEKKEKITALPCYHKMRKALNTLRKDHIRNISREQLDAAGAALTNPENEDKLREALKQAEFEPLEIEALLTLPSFAGYGHISVKACRKLIPYLEQGMNYNDACQAAGYDFQGRQNGEKAQFLPASTEEMEDITSPVVRRAVAQTIKVVNAIIREQGESPVSIHLELAREMNKNFQQRSELDKAMRDNSAENERLMKELNELFPGRTVTGQDLVKYRLWKEQDGRCAYSIQPLELDKVITVSGYAEVDHIVPYSISFDDRRTNKVLVLASENRQKGNRLPLQYLQGKRRDDFIVYTKANVKNFRKRQNLLKERLSEEDGKGYIQRNLQDTQYIAAFMLNYIRNHLAFADCSGAGKRRVVAVNGAVTAFLRKRWGLSKVRADGDLHHAVDAAVIACTTQGMIKRVSDFCKRAETTAVRNEHFPEPWPHFRDELTQRLSACPQEDLMKINPVYYATVDISSIQPVFVSRMPRHKVTGAAHEDTIRSQVNEKYTAVRKSITELSLDKDGKIKDYFKPSSDTLLYEALKKRLTEFGGNAKKAFAEPFYKPRADGTPGAQVRKVKVVAKMSNTIPVRSGGGVAKGGDMIRIDVYYVPGDGYYWVPIYVADTVKETLPNKAVVRDKTMEEWKEMKEDDFLFSLYSNDLILVERDKPICFSLMQEDSTLPKKYETKKELVYYKGGDISNGGIRIETHEGAYFLKSLTFGIVQKVQKYQVDVLGNYTPVKKEKRQTFPAQRR

SEQ ID NO: 15947 - protein, 1074 aa, unidentified
  REGION 1..1074: note = Cas Enzyme sequence
MKHPYGIGLDIGIASVGWAVVALNENAEPYGLIRCGSRIFDKAEQPKTGDSLAAPRREARSARRRLRRRSLRKADLYELMEKNGLPGKAEIEQAVQAGHLPDVYALRVQALDGPVTALDFARILLHLMQRRGFRSNRKADDAQKDGKLLQAIDANTRRMEANRYRTVGEMMYRDPVFAEHKRNKAENYLSTVKRDQIIDEARLVFAAQRQYGATWASPEMEAEYLCILTRQRSFAEGPGKGSPYSGSNRVGTCTLEGKSEQRAAKAAFSFEYFTLLQKINHIRIAENGTSRTLTPAERQVLLSVCCQTDKLDFARIRKALALPEEARFNMVRYRGEQTAEACEKKEKITALPCYHKMRKALNTLRKDHIRNISREQLDAAGAALTNPENEDKLREALKQAEFEPLEIEALLTLPSFAGYGHISVKACRKLIPYLEQGMNYNDACQAAGYDFQGRQNGEKAQFLPASTEEMEDITSPVVRRAVAQTIKVVNAIIREQGESPVSIHLELAREMNKNFQQRSELDKAMRDNSAENERLMKELNELFPGRTVTGQDLVKYRLWKEQDGRCAYSIQPLELDKVITVSGYAEVDHIVPYSISFDDRRTNKVLVLASENRQKGNRLPLQDLQGKRRDDFIVYTKANVKNFRKRQNLLKERLSGEDGKGYIQRNLQDTQYIAAFMLNYIRNHLAFADCSGAGKRRVVAVNGAVTAFLRKRWGLSKVRADGDLHHAVDAAVIACTTQGMIKRVSDFCKRAETTAVRNEHFPEPWPHFRDELRQRLSACPQEDLMKINPVYYATVDISSIQPVFVSRMPRHKVTGAAHKETIKSRLDDTHVVQRRNITELKLDKDGEIAGYFNRSSDTLLYNALKARLLAFGGDGKKAFAEPFYKPRADGTPGARVQKVKICDKVTSTVPVHGGKGVADNDTMVRIDVYCVPGDGYYWVPIYVADTVKLELPNKAVVQGKSYAEWKEMDEENFLFSLCQHDLVRIESKRLMKFKVQNRDSTLEKEMPVNKILAYFEGGNISTGAITVTTHDDAYIADGLGFKTLQKVQKYQVDVLGNYTPVKKEKRQTFPAQRR

SEQ ID NO: 15948 - protein, 1074 aa, unidentified
  REGION 1..1074: note = Cas Enzyme sequence
MKHPYGIGLDIGIASVGWAVVALNENAEPYGLIRCGSRIFDKAEQPQKGDSLAAPRREARSARRRLRRRSLRKADLYELMEKNGLPGKAEIEQAVQAGHLPDVYALRVQALDGPVTALDFARILLHLMQRRGFRSNRKADDAQKDGKLLQAIDANTRRMEANRYRTVGEMMYRDPVFAEHKRNKAENYLSTVKRDQIIDEARLVFAAQRQYGATWASPEMEAEYLCILTRQRSFAEGPGKGSPYSGSNRVGTCTLEGKSEQRAAKAAFSFEYFTLLQKINHIRIAENGTSRTLTPAERQVLLSVCSQTDKLDFARIRKALALPEEARFNMVRYRGEQTAEACEKKEKITALPCYHKMRKALNTLRKDHIRNISREQLDAAGAALTNPENEDKLREALRQAEFEPLEIEALLTLPSFAGYGHISVKACRKLIPYLEQGMNYNDACQAAGYDFQGSQNGEKAQFLPASTEEMEDITSPVVRRAVAQTIKVVNAIIREQGESPVSIHLELAREMNKNFQQRSELDKAMRDNSAENERLMKELNELFPGRTVTGQDLVKYRLWKEQDGRCAYSIQPLELDKVITVSGYAEVDHIVPYSISFDDRRTNKVLVLASENRQKGNRLPLQYLQGKRRDDFIVYTKANVKNFRKRQNLLKERLSEEDGKGFIQRNLQDTQYIAAFMLNYIRNHLAFADCSGAGKRRVVAVNGAVTAFLRKRWGLGKVRADGDLHHAVDAAVIACTTQGMIKRVSDFCKRAETTAVRNEHFPEPWPHFRDELTQRLSACPQEDLMKINPVYYATVDISSIQPVFVSRMPRHKVTGAAHEDTIRSQVNEKYTAVRKSITELSLDKDGKIKDYFKPSSDTLLYEALKKRLTEFGGNAKKAFAEPFYKPRADGTPGAQVRKVKVVAKMSNTIPVRSGGGVAKGGNMIRIDVYYVPGDGYYWVPIYVADTVKETLPNKAVVRDKTMEEWKEMKEDDFLFSLYSNDLILVERDKPICFSLMHEDSTLPKKYETKKELVYYKGGDISNGGIRIETHEGAYFLKSLTFGIVQKVQKYQVDVLGNYTPVKKEKRQTFPAQRR

SEQ ID NO: 15949 - protein, 1074 aa, unidentified
  REGION 1..1074: note = Cas Enzyme sequence
MKHPYGIGLDIGIASVGWAVVALNENAEPYGLIRCGSRIFDKAEQPKTGDSLAAPRREARSARRRLRRRSLRKADLYELMEKNGLPGKAEIEQAVQAGHLPDVYALRVQALDGPVTALDFARILLHLMQRRGFRSNRKADDAQKDGKLLQAIDANTRRMEANRYRTVGEMMYRDPVFAEHKRNKAENYLSTVKRDQIIDEARLVFAAQRQYGATWASPEMEAEYLCILTRQRSFAEGPGKGSPYSGSNRVGTCTLEGKSEQRAAKAAFSFEYFTLLQKINHIRIAENGTSRTLTPAERQVLLSVCSQTDKLDFARVRKVLALPEEARFNMVRYRGEQTAEACEKKEKITALPCYHKMRKALNTLRKDHIRNISREQLDAAGAALTNPENEDKLREALKQAEFEPLEIEALLTLPSFAGYGHISVKACRKLIPYLEQGMNYNDACQAAGYDFQGRQNGEKAQFLPASTEEMEDITSPVVRRAVAQTIKVVNAIIREQGESPVSIHLELAREMNKNFQQRSELDKAMRDNSAENERLMKELNELFPGRTVTGQDLVKYRLWKEQDGRCAYSIQPLELDKVITVSGYAEVDHIIPYSISFDDRRTNKVLVLASENRQKGNRLPLQYLQGKRRDDFIVYTKANVKNFRKRQNLLKERLSEEDGKGYIQRNLQDTQYIAAFMLNYIRNHLAFADCSGAGKRRVVAVNGAVTAFLRKRWGLSKVRADGDLHHAVDAAVIACTTQGMIKRVSDFCKRAETTAVRNEHFPEPWPHFRDELTQRLSACPQEDLMKINPVYYATVDISSIQPVFVSRMPRHKVTGAAHEETIRSQVNEKYTAVRKSITELSLDKDGKIKDYFKPSSDTLLYEALKKRLTEFGGNAKKAFAEPFYKPRADGTPGAQVRKVKVIAKMSNTIPVRSGGGVAKGGDMIRIDVYYVPGDGYYWVPIYVADTVKETLPNKAVVRDKTMEEWKEMKEDDFLFSLYSNDLILVERDKPICFSLMHEDSTLPKKYETKKELVYYKGGDISNGGIRIETHEGAYFLKSLTFGIVQKVQKYQVDVLGNYTPVKKEKRQTFPAQRR

SEQ ID NO: 15950 - protein, 1074 aa, unidentified
  REGION 1..1074: note = Cas Enzyme sequence
MKHPYGIGLDIGIASVGWAVVALNENAEPYGLIRCGSRIFDKAEQPQKGDSLAAPRREARSARRRLRRRSLRKADLYELMEKNGLPGKAEIEQAVQAGHLPDVYALRVQALDGPVTALDFARILLHLMQRRGFRSNRKADDAQKDGKLLQAIDANTRRMEANRYRTVGEMMYRDPVFAEHKRNKAENYLSTVKRDQIIDEARLVFAAQRQYGATWASPEMEAEYLCILTRQRSFAEGPGKGSPYSGSNRVGTCTLEGKSEQRAAKAAFSFEYFTLLQKINHIRIAENGTSRTLTPAERQVLLSVCCQTDKLDFARVRKALALPEEARFNMVRYRGEQTAEACEKKEKITALPCYHKMRKALNTLRKDHIRNISREQLDAAGAALTNPENEDKLREALKQAEFEPLEIEALLTLPSFAGYGHISVKACRKLIPYLEQGMNYNDACQAAGYDFQGRQNGEKAQFLPASTEEMEDITSPVVRRAVAQTIKVVNAIIREQGESPVSIHLELAREMNKNFQQRSELDKAMRDNSAENERLMKELNELFPGRTVTGQDLVKYRLWKEQDGRCAYSIQPLELDKVITVSGYAEVDHIIPYSISFDDRRTNKVLVLASENRQKGNRLPLQYLQGKRRDDFIVYTKANVKNFRKRQNLLKERLSEEDGKGYIQRNLQDTQYIAVFMLNYIRNHLAFADCSGVGKRRVFAVNGAVTAFLRKRWGLNKVRADGDLHHAVDAAVIACTTQGMIKRVSDFCKRAETTAVRNEHFPEPWPHFRDELTQRLSACPQEDLMKINPVYYATVDISSIQPVFVSRMPRHKVTGAAHEDTIRSQVNEKYTAVRKSITELSLDKDGKIKDYFKPSSDTLLYEALKKRLTEFGGNAKKAFAEPFYKPRADGTPGAQVRKVKVVAKMNNTIPVRSGGGVAKGGDMIRIDVYYVPGDGYYWVPIYVADTVKETLPNKAVVRDKTMEEWKEMKEDDFLFSLYSNDLILVERDKPICFSLMHEDSTLPKKYETKKELVYYKGGDISNGGIRIETHEGAYFLKSLTFGIVQKVQKYQVDVLGNYTPVKKEKRQTFPAQRR

SEQ ID NO: 15951 - protein, 1074 aa, unidentified
  REGION 1..1074: note = Cas Enzyme sequence
MKHPYGIGLDIGIASVGWAVVALNENAEPYGLIRCGSRIFDKAEEPQKGDSLAAPRRKARSARRRLRRRSLRKADLYELMEKNGLPGKAEIEQAVQAGHLPDVYALRVQALDGPVTALDFARILLHLMQRRGFRSNRKADDAQKNGKLLQAIDANTRRMEANRYRTVGEMMYRDPVFAEHKRNKAENYLSTVKRDQIIDEARLVFAAQRQYGATWASPEMEAEYLCILTRQRSFAEGPGKGSPYSGSNRVGTCTLEGKSEQRAAKAAFSFEYFTLLQKINHIRIAENGTSRTLTPAERQVLLSVCCQTDKLDFARVRKALALPEEARFNMVRYRGEQTAEACEKKEKITALPCYHKMRKALNTLRKDHIRNISREQLDAAGAALTNPENEDKLRKALKQAEFEPLEIEALLTLPSFAGYGHISVKACRKLIPYLEQGMNYNDACQAAGYDFQGRQNGEKAQFLPASTEEMEDITSPVVRRAVAQTIKVVNAIIREQGESPVSIHLELAREMNKNFQQRSELDKAMRDNSAENERLMKELNELFPGRTVTGQDLVKYRLWKEQDGRCAYSIQPLELDKVITVSGYAEVDHIVPYSISFDDRRTNKVLVLASENRQKGNRLPLQYLQGKRRDDFIVYTKANVKNFRKRQNLLKERLSEEDGKGFIQRNLQDTQYIAAFMLNYIRNHLAFADCSGAGKRRVVAVNGAVTAFLRKRWGLGKVRADGDLHHAVDAAVIACTTQGMIKRVSDFCKRAETTAVRNEHFPEPWPHFRDELTQRLSACPQEDLMKINPVYYATVDISSIQPVFVSRMPRHKVTGAAHEETIRSQVNEKYTAVRKSITELSLDKDGKIKDYFNPSSDTLLYEALKKRLTEFGGNAKKAFAEPFYKPRADGTPGAQVRKVKVVAKMSNTIPVRSGGGVAKGGDMIRIDVYYVPGDGYYWVPIYVADTVKETLPNKAVVRDKTMEEWKEMKEDDFLFSLYSNDLILVERDKPICFSLMHEDSTLPKKYETKKELVYYKGGDISNGGIRIETHEGAYFLKSLTFGIVQKVQKYQVDVLGNYTPVKKEKRQTFPAQRR

SEQ ID NO: 15952 - protein, 1074 aa, unidentified
  REGION 1..1074: note = Cas Enzyme sequence
MKHPYGIGLDIGIASVGWAVVALNENAEPYGLIRCGSRIFDKAEQPKTGDSLAAPRREARSARRRQRRRSLRKADLYELMEKNGLPGKAEIEQAVQAGHLPDVYALRVQALDGPVTALDFARILLHLMQRRGFRSNRKADDAQKDGKLLQAIDANTRRMEANRYRTVGEMMYRDPVFAEHKRNKAENYLSTVKRDQIIDEARLVFAAQRQYGATWASPEMEAEYLCILTRQRSFAEGPGKGSPYSGSNRVGTCTLEGKSEQRAAKAAFSFEYFTLLQKINHIRIAENGTSRTLTPAERQVLLSVCCQTDKLDFARVRKALALPEEARFNMVRYRGEQTAEACEKKEKITALPCYHKMRKALNTLRKDHIRNISREQLDAAGAALTNPENEDKLREALKQAEFEPLEIEALLTLPSFAGYGHISVKACRKLIPYLEQGMNYNDACQAAGYDFQGSQNGEKAQFLPASTEEMEDITSPVVRRAVAQTIKVVNAIIREQGESPVSIHLELAREMNKNFQQRSELDKAMRDNSAENERLMKELNELFPGRTVTGQDLVKYRLWKEQDGRCAYSIQPLELDKVITVSGYAEVDHIVPYSISFDDRRTNKVLVLASENRQKGNRLPLQYLQGKRRDDFIVYTKANVKNFRKRQNLLKERLSEEDGKGYIQRNLQDTQYIAAFMLNYIRNHLAFADCSGAGKRRVVAVNGAVTAFLRKRWGLGKVRADGDLHHAVDAAVIACTTQGMIKRVSDFCKRAETTAVRNEHFPEPWPRFRDELTQRLSACPQENLMQINPVYYATVDISSIQPVFVSRMPRHKVTGAAHKETIKSRLDDTHVVQRRNITELKLDKDGEIAGYFNRSSDTLLYNALKARLLAFGGDGKKAFAEPFYKPRADGTPGARVQKVKICDKVTSTVPVHGGKGVADNDTMVRIDVYYVPGDGYYWIPVYVADTVKPELPSKAVVAYKSSAEWKEMKDEDFLFSLCQHDLVRIESKRLMKFKVQNRDSTLEKEMPVNKILAYFEGGNIATGAVTLTTHDDAYIADGLGFKTLQKVQKYQVDVLGNYTPVKKEKRQTFPAQRR

SEQ ID NO: 15953 - protein, 1074 aa, unidentified
  REGION 1..1074: note = Cas Enzyme sequence
MKHPYGIGLDIGIASVGWAVVALNENAEPYGLIRCGSRIFDKAEQPKTGDSLAAPRREARSARRRLRRRSLRKADLYELMEKNGLPGKAEIEQAVQAGHLPDVYALRVQALDGPVTALDFARILLHLMQRRGFRSNRKADDAQKDGKLLQAIDANTRRMEANRYRTVGEMMYRDPVFAEHKRNKAENYLSTVKRDQIIDEARLVFAAQRQYGATWASPEMEAEYLCILTRQRSFAEGPGKGSPYSGSNRVGTCTLEGKSEQRAAKAAFSFEYFTLLQKINHIRIAENGTSRTLTPAERQVLLSVCCQTDKLDFARIRKALALPEEARFNMVRYRGEQTAEACEKKEKITALPCYHKMRKALNTLRKDHIRNISREQLDAAGAALTNPENEDKLREALKQAEFEPLEIEALLTLPSFAGYGHISVKACRKLIPYLEQGMNYNDACQAAGYDFQGRQNGEKAQFLPASTEEMEDITSPVVRRAVAQTIKVVNAIIREQGESPVSIHLELAREMNKNFQQRSELDKAMRDNSAENERLMKELNELFPGRTVTGQDLVKYRLWKEQNEICAYSLEKLDLTRVITEAGYAEVDHIVPYSISFDDRRTNKVLVLASENRQKGNRLPLQYLQGKRRDDFIVYTKANVKNFRKRQNLLKERLSEEDGKGYIQRNLQDTQYIAAFMLNYIRNHLAFADCSGAGKRRVVAVNGAVTAFLRKRWGLSKVRTDGDLHHAADAAVIACTTQGMIKRVSDFCKRAETTAVRNEHFPEPWPRFRDELTQRLSACPQEDLMKINPVYYATVDISSIQPVFVSRMPRHKVTGAAHEETIRSQVNEKYTAVRKSITELSLDKDGKIKDYFKPSSDTLLYEALKKRLTEFGGNAKKAFAEPFYKPRADGTPGAQVRKVKVVAKMNNTIPVRSGGGVAKGGDMIRIDVYYVPGDGYYWVPIYVADTVKETLPNKAVVRDKTMEEWKEMKEDDFLFSLYSNDLILVERDKPICFSLMHEDSTLPKKYETKKELVYYKGGDISNGGIRIETHEGAYFLKSLTFGIVQKVQKYQVDVLGNYTPVKKEKRQTFPAQRR

SEQ ID NO: 15954 - protein, 1074 aa, unidentified
  REGION 1..1074: note = Cas Enzyme sequence
MKHPYGIGLDIGIASVGWAVVALNENAEPYGLIRCGSRIFDKAEEPQTGDSLAAPRRKARSARRRLRRRSLRKADLYELMEKNGLPGKAEIEQAVQAGHLPDVYALRVQALDGPVTALDFARILLHLMQRRGFRSNRKADDAQKDGKLLQAIDANTRRMEANLYRTVGEMMYRDPVFAEHKRNKAENYLSTVKRDQIIDEARLVFAAQRQYGATWASPEMEAEYLCILTRQRSFAEGPGKGSPYSGSNRVGTCTLEGKSEKRAAKAAFSFEYFTLLQKINHIRIAENGTSRTLTPAERQVLLSVCCQTDKLDFARVRKALALPEEARFNMVRYRGEQTAEACEKKEKITALPCYHKMRKALNTLRKDHIRNISREQLDAAGAALTNPENEDKLREALKQAEFEPLEIEALLTLPSFAGYGHISVKACRKLIPYLEQGMNYNDACQAAGYDFQGRQNGEKAQFLPASTEEMEDITSPVVRRAVAQTIKVVNAIIREQGESPVSIHLELAREMNKNFQQRSELDKAMQDNSAENEKLMQELHAKFSGRKISGQDLVKYRLWKEQNEICAYSLEKLDLTRVITEPGYAEVDHIVPYSISFDDRRTNKVLVLKSENRQKGNRLPLQYLQGKRRDDFIVYTKANVKNFRKRQNLLKERLSEEDGKGYIQRNLQDTQYIAAFMLNYIRNHLAFADCSGAGKRRVVAVNGAVTAFLRKRWGLGKVRADGDLHHAADAAVIACTTQGMIKRVSDFCKRAETTAVRNEHFPEPWPRFRDELTQRLSACPQENLMQINPVYYATVDISSIQPVFVSRMPRHKVTGAAHKETIKSRLDDAHTVQRRSITDLKLDKEGEIAGYFNPSSDTLLYNALKEQLTAFGGDGKKAFAEPFFKPRADGTPGAQVRKVKVYDKATSMVAVHEGKGVADNDTMVRIDVYFVPGDGYYWVPIYVADTVKLKLPNKAVVQGKSYAEWKEMDEENFLFSLCQNDLIRIESKRTMKFKVQNSDSTLEKEAQMNCRLTYFEGGNISTGAITVTTHDNAYIVGSLGFKTLQKIQKYQVDVLGNYTLVKKEKRQTFPAQRR

SEQ ID NO: 15955 - protein, 1074 aa, unidentified
  REGION 1..1074: note = Cas Enzyme sequence
MKHPYGIGLDIGIASGGWAVVALNENAEPYGLIRCGSRIFDKAEQPKTGDSLAAPRREARSARRRLRRRSLRKADLYELMEKNGLPGKAEIEQAVQAGHLPDVYALRVQALDGPVTALDFARILLHLMQRRGFRSNRKADDAQKDGKLLQAIDANTRRMEANRYRTVGEMMYRDPVFAEHKRNKAENYLSTVKRDQIIDEARLVFAAQRQYGATWASPEMEAEYLCILTRQRSFAEGPGKGSPYSGSNRVGTCTLEGKSEQRAAKAAFSFEYFTLLQKINHIRIAKNGTSRTLTPAERQVLLSVCCQTDKLDFARIRKALALPEEARFNMVRYRGEQTAEACEKKEKITALPCYHKMRKALNTLRKDHIRNISREQLDAAGAALTNPENEDKLREALKQAEFEPLEIEALLTLPSFAGYGHISVKACRKLIPYLEQGMNYNDACQAAGYDFQGRQNGEKTKFLPASTEEMEDITSPVVRRAVAQTIKVVNAIIREQGESPVSIHLELAREMNKNFQQRSELDKAMRDNSAENERLMKELNELFPGRTVTGQDLVKYRLWKEQDGRCAYSIQPLELDKVITVSGYAEVDHIVPYSISFDDRRTNKVLVLASENRQKENRLPLQYLQGKRRDDFIVYTKANVKNFRKRQNLLKERLSEEDGKGYIQRNLQDTQYIAAFMLNYIRNHLAFADCSGAGKRRVVAVNGAVTAFLRKRWGLSKVRADGDLHHAADAAVIACTTQGMIKRVSDFCKRAETTAVRNEHFPEPWPHFRDELRQRLSACPQEDLMKINPVYYATVDISSIQPVFVSRMPRHKVTGAAHKETIKSRLDDTHVVQRRNITELKLDKDGEIAGYFNRSSDTLLYNALKARLLAFGGDGKKAFAEPFYKPRADGTPGARVQKVKICDKVTSTVPVHGGKGVADNDTMVRIDVYCVPGDGYYWVPIYVADTVKLELPNKAVVQGKSYAEWKEMDEENFLFSLCQHDLVRIESKRLMKFKVQNRDSTLEKEMPVNKILAYFEGGNISTGAITVTTHDDAYIADGLGFKTLQKVQKYQVDVLGNYTPVKKEKRQTFPAQRR

SEQ ID NO: 15956 - protein, 1074 aa, unidentified
  REGION 1..1074: note = Cas Enzyme sequence
MKHPYGIGLDIGIASVGWAVVALNENAEPYGLIRCGSRIFDKAEQPKTGDSLAAPRREARSARRRLRRRSLRKADLYELMEKNGLPGKAEIEQAVQAGHLPDVYALRVQALDGPVTALDFARILLHLMQRRGFRSNRKADDAQKDGKLLQAIDANTRRMEANRYRTVGEMMYRDPVFAEHKRNKAENYLSTVKRDQIIDEARLVFAAQRQYGATWASPEMEAEYLCILTRQRSFAEGPGKGSPYSGSNRVGTCTLEGKSEQRAAKAAFSFEYFTLLQKINHIRIAENGTSRTLTPAERQVLLSVCCQTDKLDFARIRKALALPEEARFNMVRYRGEQTAEACEKKEKITALPCYHKMRKALNTLRKDHIRNISREQLDAAGAALTNPENEDKLREALKQAEFEPLEIEALLTLPSFAGYGHISVKACRKLIPYLEQGMNYNDACQAAGYDFQGRQNGEKAQFLPASTEEMEDITSPVVRRAVAQTIKVVNAIIREQGESPVSIHLELAREMNKNFQQRSELDKAMRDNSAENERLMKELNELFPGRTVTGQDLVKYRLWKEQDGRCAYSIQPLELDKVITVSGYAEVDHIVPYSISFDDRRTNKVLVLASENRQKGNRLPLQYLQGKRRDDFIVYTKANVKNFRKRQNLLKERLSEEDGKGYIQRNLQDTQYIAAFMLNYIRNHLAFADCSGAGKRWVAAVNGAVTAFLRKRWGLSKVRADGDLHHAVDAAVIACTTQGMIKRVSDFCKRAETTAVRNEHFPEPWPRFRDELTQRLSACPQENLMQINPVYYATVDISSIQPVFVSRMPRHKVTGAAHKETIKSRLDDTHVVQRRNITELKLDKDGEIAGYFNRSSDTLLYNALKARLLAFGGDGKKAFAEPFYKPRADGTPGARVQKVKICDKVTSTVPVHGGKGVADNDTMVRIDVYYVPGDGYYWIPVYVADTVKPELPSKAVVAYKSSAEWKEMKDEDFLFSLCQHDLVRIESKRLMKFKVQHRDSTLEKEMPVNKILAYFEGGDIATGAVTLTTHDDAYIATGLGFKTLQKVQKYQVDVLGNYTPVKKEKRQTFPAQRR

SEQ ID NO: 15957 - protein, 1078 aa, unidentified
  REGION 1..1078: note = Cas Enzyme sequence
MCKKMKHPYGIGLDIGIASVGWAVVALNENAEPYGLIRCGSRIFDKAEQPKTGDSLAAPRREARSARRRLRRRSLRKADLYELMEKNGLPGKAEIEQAVQAGHLPDVYALRVQALDGPVTALDFARILLHLMQRRGFRSNRKADDAQKDGKLLQAIDANTRRMEENRYRTVGEMMYRDPVFAEHKRNKAENYLSTVKRDQIIDEARLVFAAQRQYGATWASPEMEAEYLCILTRQRSFAEGPGKGSPYSGSNRVGTCTLEGKSEQRAAKAAFSFEYFTLLQKINHIRIAENGTSRTLTPAERQVLLSVCCQTDKLDFARIRKALALPEEARFNMVRYRGEQTAEACEKKEKITALPCYHKMRKALNTLRKDHIRNISREQLDAAGAALTNPENEDKLREALKQAEFEPLEIEALLTLPSFAGYGHISVKACRKLIPYLEQGMNYNDACQAAGYDFQGRQNGEKAQFLPASTEEMEDITSPVVRRAVAQTIKVVNAIIREQGESPVSIHLELAREMNKNFQQRSELDKAMRDNSAENERLMKELNELFPGRTVTGQDLVKYRLWKEQDGRCAYSIQPLELDKVITVSGYAEVDHIVPYSISFDDRRTNKVLVLASENRQKGNRLPLQYLQGKRRDDFIVYTKANVKNFRKRQNLLKERLSEEDGKGYIQRNLQDTQYIAAFMLNYIRNHLAFADCSGAGKRRVAAVNGAVTAFLRKRWGLSKVRADGDLHHAVDAAVIACTTQGMIKRVSDFCKRAETTAVRNEHFPEPWPRFRDELTQRLSACPQENLMQINPVYYATVDISSIQPVFVSRMPRHKVTGAAHKETIKSRLDDIHVVQRRNITELKLDKDGEIAGYFNRSSDTLLYNALKARLLAFGGDGKKAFAEPFYKPRADGTPGARVQKVKICDKVTSTVPVHGGKGVADNDTMVRIDVYYVPGDGYYWIPVYVADTVKPELPSKAVVAYKSSAEWKEMKDEDFLFSLCQHDLVRIESKRLMKFKVQHRDSTLEKEMPVNKILAYFEGGDIATGAVTLTTHDDAYIATGLGFKTLQKVQKYQVDVLGNYTPVKKEKRQTFPAQRR

SEQ ID NO: 15958 - protein, 916 aa, unidentified
  REGION 1..916: note = Cas Enzyme sequence
MEANRYRTVGEMMYRDPVFAEHKRNKAENYLSTVKRDQIIDEARLVFAAQRQYGATWASPEMEAEYLCILTRQRSFAEGPGKGSPYSGSNRVGTCTLEGKSEQRAAKAAFSFEYFTLLQKINHIRIAENGTSRTLTPAERQVLLSVCCQTDKLDFARIRKALALPEEARFNMVRYRGEQTAEACEKKEKITALPCYHKMRKALNTLRKDHIRNISREQLDAAGAALTNPENEDKLREALKQAEFEPLEIEALLTLPSFAGYGHISVKACRKLIPYLEQGMNYNDACQAAGYDFQGRQNGEKAQFLPASTEEMEDITSPVVRRAVAQTIKVVNAIIREQGESPVSIHLELAREMNKNFQQRSELDKAMRDNSAENERLMKELNELFPGRTVTGQDLVKYRLWKEQDGRCAYSIQPLELDKVITVSGYAEVDHIVPYSISFDDRRTNKVLVLASENRQKGNRLPLQDLQGKRRDDFIVYTKANVKNFRKRQNLLKERLSGEDGKGYIQRNLQDTQYIAAFMLNYIRNHLAFADCSGAGKRRVVAVNGAVTAFLRKRWGLSKVRADGDLHHAVDAAVIACTTQGMIKRVSDFCKRAETTAVRNEHFPEPWPHFRDELRQRLSACPQEDLMKINPVYYATVDISSIQPVFVSRMPRHKVTGAAHKETIKSRLDDTHVVQRRNITELKLDKDGEIAGYFNRSSDTLLYNALKARLLAFGGDGKKAFAEPFYKPRADGTPGARVQKVKICDKVTSTVPVHGGKGVADNDTMVRIDVYCVPGDGYYWVPIYVADTVKLELPNKAVVQGKSYAEWKEMDEENFLFSLCQHDLVRIESKRLMKFKVQNRDSTLEKEMPVNKILAYFEGGNISTGAITVTTHDDAYIADGLGFKTLQKVQKYQVDVLGNYTPVKKEKRQTFPAQRR

SEQ ID NO: 15959 - protein, 1078 aa, unidentified
  REGION 1..1078: note = Cas Enzyme sequence
MCKKMKHPYGIGLDIGIASVGWAVVALNENAEPYGLIRCGSRIFDKAEEPQTGDSLAAPRRKARSARRRLRRRSLRKADLYELMEKNGLPGKAEIEQAVQAGHLPDVYALRVQALDGPVTALDFARILLHLMQRRGFRSNRKADDAQKDGKLLQAIDANTRRMEANRYRTVGEMMYRDPVFAEHKRNKAENYLSTVKRDQIIDEARLVFAAQRQYGATWASPEMEAEYLCILTRQRSFAEGPGKGSPYSGSNRVGTCTLEGKSEQRAAKAAFSFEYFTLLQKINHIRIAENGTSRTLTPAERQVLLSVCCQTDKLDFARIRKALALPEEARFNMVRYRGEQTAEACEKKEKITALPCYHKMRKALNTLRKDHIRNISREQLDAAGTALTNPENEDKLREALKQAEFEPLEIEALLTLPSFAGYGHISVKACRKLIPYLEQGMNYNDACQAAGYDFQGRQNGEKAQFLPASTEEMEDITSPVVRRAVAQTIKVINAIIREQGESPVSIHLELAREMNKNFQQRSELDKAMRDNSAENERLMKELNELFPGRTVTGQDLVKYRLWKEQDGRCAYSIQPLELDKVITVSGYAEVDHIVPYSISFDDRRTNKVLVLKSENRQKGNRLPLQYLQGKRRDDFIVYTKANVKNFRKRQNLLKERLSEEDGKGYIQRNLQDTQYIAAFMLNYIRNHLAFADCSGAGKRRVVAVNGAVTAFLRKRWGLSKVRADGDLHHAADAAVIACTTQGMIKRVSDFCKRAETTAVRNEHFPEPWPHFRDELTQRLSACPQEDLMKINPVYYATVDISSIQPVFVSRMPRHKVTGAAHEETIRSQVNEKYTAVRKSITELSLDKDGKIKDYFKPSSDTLLYEALKKRLTEFGGNAKKAFAEPFYKPRADGTPGAQVRKVKVVAKMSNTISVRSGGGVAKGGDMIRIDVYYVPGDGYYWVPIYVADTVKETLPNKAVVRDKTMEEWKEMKEDDFLFSLYSNDLILVERDKPICFSLMHEDSTLPKKYETKKELVYYKGGDISNGGIRIETHEGAYFLKSLTFGIVQKVQKYQVDVLGNYTPVKKEKRQTFPAQRR

SEQ ID NO: 15960 - protein, 1074 aa, unidentified
  REGION 1..1074: note = Cas Enzyme sequence
MKHPYGIGLDIGIASVGWAVVALNENAEPYGLIRCGSRIFDKAEQPKTGDSLAAPRREARSARRRLRRRSLRKADLYELMEKNGLPGKAEIEQAVQAGHLPDVYALRVQALDGPVTALDFARILLHLMQRRGFRSNRKADDAQKDGKLLQAIDANTRRMEANRYRTVGEMMYRDPVFAEHKRNKAENYLSTVKRDQIIDEARLVFAAQRQYGATWASPEMEAEYLCILTRQRSFAEGPGKGSPYSGSNRVGTCTLEGKSEQRAAKAAFSFEYFTLLQKINHIRIAENGTSRTLTPAERQVLLSVCCQTDKLDFARIRKALALPEEARFNMVRYRGEQTAEACEKKEKITALPCYHKMRKALNTLRKDHIRNISREQLDAAGAALTNPENEDKLREALKQAEFEPLEIEALLTLPSFAGYGHISVKACRKLIPYLEQGMNYNDACQAAGYDFQGSQNGEKAQFLPASTEEMEDITSPVVRRAVAQTIKVVNAIIREQGESPVSIHLELAREMNKNFQQRSELDKAMRDNSAENERLMKELNELFPGRTVTGQDLVKYRLWKEQDGRCAYSIQPLELDKVITVSGYAEVDHIVPYSISFDDRRTNKVLVLASENRQKGNRLPLQYLQGKRRDDFIVYTKANVKNFRKRQNLLKERLSEEDGKGYIQRNLQDTQYIAAFMLNYIRNHLAFADCSGAGKRRVVAVNGAVTAFLRKRWGLGKVRADGDLHHAVDAAVIACTTQGMIKRVSDFCKRAETTAVRNEHFPEPWPRFRDELTQRLSACPQEDLMKINPVYYATVDISSIQPVFVSRMPRHKVTGAAHEETIRSQVDEKYTAVRKSITELSLDKDGKIKDYFKPRSDTLLYEALKKRLTEFGGNAKKAFAEPFYKPRADGTPGAQVRKVKVVAKMSNTIPVRCGGGVAKGGDMIRIDVYYVPGDGYYWVPIYVADTVKETLPNKAVVRDKTMEEWKEMKEDDFLFSLYSNDLILVERDKPICFSLMHEDSTLPKKYETKKELVYYKGGDISNGGIRIETHEGAYFLKSLTFGIVQKVQKYQVDVLGNYTPVKKEKRQTFPAQRR

SEQ ID NO: 15961 - protein, 1074 aa, unidentified
  REGION 1..1074: note = Cas Enzyme sequence
MKHPYGIGLDIGIASVGWAVVALNENAEPYGLVRCGSRIFDKAEQPQKGDSLAAPRREARSTRRRLRRRSLRKADLYELMEKNGLPGKAEIEQAVQAGHLPDVYALRVQALDGPVTALDFARILLHLMQRRGFRSNRKADDAQKDGKLLQAIDANTRRMEANRYRTVGEMMYRDPVFAEHKRNKAENYLSTVKRDQIIDEARLVFAAQRQYGATWASPEMEAEYLCILTRQRSFAEGPGKGSPYSGSNRVGTCTLEGKSEQRAAKAAFSFEYFTLLQKINHIRIAENGTSRTLTPAERQVLLSVCCQTDKLDFARVRKALALPEEARFNMVRYRGEQTAEACEKKEKITALPCYHKMRKALNTLRKDHIRNISREQLDAAGAALTNPENEDKLREALKQAEFEPLEIEALLTLPSFAGYGHISVKACRKLIPYLEQGMNYNDACQAAGYDFQGRQNGEKAQFLPASTEEMEDITSPVVRRAVAQTIKVVNAIIREQGESPVSIHLELAREMNKNFQQRSELDKAMRDNSAENERLMKELNELFPGRTVTGQDLVKYRLWKEQDGRCAYSIQPLELDKVITVSGYAEVDHIIPYSISFDDRRTNKVLVLASENRQKGNRLPLQYLQGKRRDDFIVYTKANVKNFRKRQNLLKERLSEEDGKGYIQRNLQDTQYIAAFMLNYIRNHLAFADCSGAGKRRVVAVNGAVTAFLRKRWGLSKVRADGDLHHAADAAVIACTTQGMIKRVSDFCKRAETTAVRNEHFPEPWPHFRDELTQRLSACPQEDLMKINPVYYATVDISSIQPVFVSRMPRHKVTGAAHEETIRSQVNEKYTAVRKSITELSLDKDGKIKDYFKPSSDTLLYEALKKRLTEFGGNAKKAFAEPFYKPRADGTPGAQVRKVKVVAKMSNTIPVRSGGGVAKGGDMIRIDVYYVPGDGYYWVPIYVADTVKETLPNKAVVRDKTMEEWKEMKEDDFLFSLYSNDLILVERDKPICFSLMHEDSTLPKKYETKKELVYYKGGDISNGGIRIETHEGAYFLKSLTFGIVQKVQKYQVDVLGNYTPVKKEKRQTFPAQRR

SEQ ID NO: 15962 - protein, 947 aa, unidentified
  REGION 1..947: note = Cas Enzyme sequence
MQRRGFRSNRKADDAQKDGKLLQAIDANTRRMEANRYRTVGEMMYRDPVFAEHKRNKAENYLSTVKRDQIIDEARLIFTAQRQYGATWASPEMEAEYLCILTRQRSFAEGPGKGSPYSGSNRVGTCTLEGKSEQRAAKAAFSFEYFTLLQKINHIRIAENGTSRTLTPAERQVLLSVCCQTDKLDFARVRKALALPEEARFNMVRYRGEQTAEACEKKEKITALPCYHKMRKALNTLRKDHIRNISREQLDAAGAALTNPENEDKLREALKQAEFEPLEIEALLTLPSFAGYGHISVKACRKLIPYLEQGMNYNDACQAAGYDFQGSQNGEKAQFLPASTEEMEDITSPVVRRAVAQTIKVVNAIIREQGESPVSIHLELAREMNKNFQQRSELDKAMRDNSAENERLMKELNELFPGRTVTGQDLVKYRLWKEQDGRCAYSIQPLELDKVITVSGYAEVDHIVPYSISFDDRRTNKVLVLKSENRQKGNRLPLQYLQGKRRDDFIVYTKANVKNFRKRQNLLKERLSEEDGKGYIQRNLQDTQYIAAFMLNYIRNHLEFADCSGAGKRRVVAVNGAVTAFLRKRWGLGKVRADGDLHHAADAAVIACTTQGMIKRVSDFCKRAETTAVRNEHFPEPWPHFRDELTQRLSACPQEDLMKINPVYYATVDISSIQPVFVSRMPRHKVTGAAHEDTIRSQVNEKYTAVRKSITELSLDKDGKIKDYFKPSSDTLLYEALKKRLTEFGGNAKKAFAEPFYKPRADGTPGAQVRKVKVVAKMNNTIPVRSGGGVAKGGDMIRIDVYYVPGDGYYWVPIYVADTVKETLPNKAVVRDKTMEEWKEMKEDDFLFSLYSNDLILVERDKPICFSLMHEDSTLPKKYETKKELVYYKGGDISNGGIRIETHEGAYFLKSLTFGIVQKVQKYQVDVLGNYTPVKKEKRQTFPAQRR

SEQ ID NO: 15963 - protein, 1074 aa, unidentified
  REGION 1..1074: note = Cas Enzyme sequence
MKHPYGIGLDIGIASVGWAVVALNENAEPYGLIRCGSRIFDKAEQPKTGDSLAAPRREARSARRRLRRRSLRKADLYELMEKNGLPGKAEIEQAVQAGHLPDVYALRVQALDGPVTALDFARILLHLMQRRGFRSNRKADDAQKDGKLLQAIDANTRRMEANRYRTVGEMMYRDPVFAEHKRNKAENYLSTVKRDQIIDEARLVFAAQRQYGATWASPEMEAEYLCILTRQRSFAEGPGKGSPYSGSNRVGTCTLEGKSEQRAAKAAFSFEYFTLLQKINHIRIAENGTSRTLTPAERQVLLSVCCQTDKLDFARVRKALALPEEARFNMVRYRGEQTAEACEKKEKITALPCYHKMRKALNTLRKGHIRNISREQLDAAGAALTNPENEDKLREALKQAEFEPLEIEALLTLPSFAGYGHISVKACRKLIPYLEQGMNYNDACQAAGYDFQGSQNGEKAQFLPASTEEMEDITSPVVRRAVAQTIKVVNAIIREQGESPVSIHLELAREMNKNFQQRSELDKAMRDNSAENERLMKELNELFPGRTVTGQDLVKYRLWKEQDGRCAYSIQPLELDKVITVSGYAEVDHIVPYSISFDDRRTNKVLVLASENRQKGNRLPLQYLQGKRRDDFIVYTKANVKNFRKRQNLLKERLSEEDGKGFIQRNLQDTQYIAAFMLNYIRNHLAFADCSGAGKRRVVAVNGAVTAFLRKRWGLGKVRADGDLHHAADAAVIACTTQGMIKRVSDFCKRAETTAVRNEHFPEPWPHFRDELRQRLSACPQEDLMKINPVYYATVDISSIQPVFVSRMPRHKVTGAAHEDTIRSQVNEKYTAVRKSITELSLDKDGKIKDYFKPSSDTLLYEALKKRLTEFGGNAKKAFAEPFYKPRADGTPGAQVRKVKVVAKMNNTIPVRSGGGVAKGGDMIRIDVYYVPGDGYYWVPIYVADTVKETLPNKAVVRDKTMEEWKEMKEDDFLFSLYSNDLILVERDKPICFSLMHEDSTLPKKYETKKELVYYKGGDISNGGIRIETHEGAYFLKSLTFGIVQKVQKYQVDVLGNYTPVKKEKRQTFPAQRR

SEQ ID NO: 15964 - protein, 973 aa, unidentified
  REGION 1..973: note = Cas Enzyme sequence
MADLRRLLHKHGLLPSADPDAFKRPGCDPWELRARGLDKPLKPVEFAVALGHIAKRRGFKSAAKRKAANASGDDKKMLVALEATQERLSRYRTVGEMFARDPDLANRRRNRDGVYDRTASRDDLEYEVKALFAAQRRLGQSCASQELEERYFGIAFRQLPMQDSEKLVGTCAFEPAEKRAAKLAPSFERFRLLTRLVNLRITTPEGERSLTPDELARATSDLGKTARLSVKRVRELIGLPVGQRFTTIKPDEEGRDIVVRTGEAMSGTAALRKALGETLWADMQARPEQLDRIAHVLSFFETNEKIKQQLNELGLDQPILGALLAALDVGAFAKFKGAAHISTKAVRKLLPYLAQGKRYDEACTLAGYDHAASTLSRREQITSKKLFNALVAEVGGSIANPVARKALTEGLKQLWAMRNRYGLPGAIHIELARDVGNSIEKRRELENAINKNTAQRERERDEVRELLNIEDVSGDTLLRYRLWKEQGGRCLYTDKPIPPESIIATDNSVQIDHILPRSRLFDNSFNNLTLAYVAANQHKKNRTPYEWFAQDKAQNDWDEFVARVETNKNLRGFKKRNFLLKNAEEREAAFRSRNLNDTRYAARLLAEAVKLFYPYGNRQERDGRRRVFTRPGAVTAELRKVWGVESLKKVDGQRVSDDRHHALDAIIVAAVSEAQVGRLITSFQQWEQQGLARPFRRIDPPWDDFRADVEAAYENVFVARPERRRARGEGHAATIRQVKERNNQITVFERKAILALKDADLERIKDPERNAAVINAIRAWIAAGRPADALPRSPRGDVITKVRLLSKNKPAVRVRGGTADRGEMVRVDVFSKPNRRGKLEWYLVPIYPHQVMNRKGWPQPPMRAVVAYKDEEEWTKIDSQCQFRFSLYPRSYVKALKSNGEVFEGYFKGLDRSTGAIALFSDRNPKTVYRGIGAKTLLTIEKYSVDRFGVRAEIRGEVRTWHGEAFTSPSPPD

SEQ ID NO: 15965 - protein, 1047 aa, unidentified
  REGION 1..1047: note = Cas Enzyme sequence
MIFEELAFGIDLGIGSCGWAVLRNPPSAGEAGAIVGAGSWIFDVPETDKERIPTSQIRRNNRLLRRVVRRRRNRMADLRRLLHKHGLLPSADPDAFKRPGCDPWELRARGLDKPLKPVEFAVALGHIAKRRGFKSAAKRKAANASGDDKKMLVALEATQERLSRYRTVGEMFARDPDLANRRRNRDGVYDRTASRDDLEYEVKALFAAQRRLGQSCASQELEERYFGIAFRQLPMQDSEKLVGTCAFEPAEKRAAKLAPSFERFRLLTRLVNLRITTPEGERSLTPDELARATSDLGKTARLSVKRVRELIGLPVGQRFTTIKPDEEGRDIVVRTGEAMSGTAALRKALGETLWADMQARPEQLDRIAHVLSFFETNEKIKQQLNELGLDQPILGALLAALDVGAFAKFKGAAHISTKAVRKLLPYLAQGKRYDEACTLAGYDHAASTLSRREQITSKKLFNALVAEVGGSIANPVARKALTEGLKQLWAMRNRYGLPGAIHIELARDVGNSIEKRRELENAINKNTAQRERERDEVRELLNIEDVSGDTLLRYRLWKEQGGRCLYTDKPIPPESIIATDNSVQIDHILPRSRLFDNSFNNLTLAYVAANQHKKNRTPYEWFAQDKAQNDWDEFVARVETNKNLRGFKKRNFLLKNAEEREAAFRSRNLNDTRYAARLLAEAVKLFYPYGNRQERDGRRRVFTRPGAVTAELRKVWGVESLKKVDGQRVSDDRHHALDAIIVAAVSEAQVGRLITSFQQWEQQGLARPFRRIDPPWDDFRADVEAAYENVFVARPERRRARGEGHAATIRQVKERNNQITVFERKAILALKDADLERIKDPERNAAVINAIRAWIAAGRPADALPRSPRGDVITKVRLLSKNKPAVRVRGGTADRGEMVRVDVFSKPNRRGKLEWYLVPIYPHQVMNRKGWPQPPMRAVVAYKDEEEWTKIDSQCQFRFSLYPRSYVKALKSNGEVFEGYFKGLDRSTGAIALFSDRNPKTVYRGIGAKTLLTIEKYSVDRFGVRAEIRGEVRTWHGEAFTSPSPPD

SEQ ID NO: 15966 - protein, 1047 aa, unidentified
  REGION 1..1047: note = Cas Enzyme sequence
MIFEELAFGIDLGIGSCGWAVLRNPPSAGEAGAIVGAGSWIFDVPETDKERIPTSQIRRNNRLLRRVVRRRRNRMADLRRLLHKHGLLPSADPDAFKRPGCDPWELRARGLDKPLKPVEFAVALGHIAKRRGFKSAAKRKAANASGDDKKMLVALEATQERLSRYRTVGEMFARDPDFANRRRNRDGVYDRTASRDDLEYEVKALFAAQRRLGQSCASQELEERYFGIAFRQLPMQDSEKLVGTCAFEPAEKRAAKLAPSFERFRLLTRLVNLRITTPEGERSLTPDELARATSDLGKTARLSVKRVRELIGLPVGQRFTTIKPDEEGRDIVVRTGEAMSGTAALRKALGETLWADMQARPEQLDRIAHVLSFFETNEKIKQQLNELGLDQPILGALLAALDVGAFAKFKGAAHISTKAVRKLLPYLAQGKRYDEACTLAGYDHAASTLSRREQITSKKLFNALVAEVGGSIANPVARKALTEGLKQLWAMRNRYGLPGAIHIELARDVGNSIEKRRELENAINKNTAQRERERDEVRELLNIEDVSGDTLLRYRLWKEQGGRCLYTDKPIPPESIIATDNSVQIDHILPRSRLFDNSFNNLTLAYVAANQHKKNRTPYEWFAQDKAQNDWDEFVARVETNKNLRGFKKRNFLLKNAEEREAAFRSRNLNDTRYAARLLAEAVKLFYPYGNRQERDGRRRVFTRPGAVTAELRKVWGVESLKKVDGQRVSDDRHHALDAIIVAAVSEAQVGRLITSFQQWEQQGLARPFRRIDPPWDDFRADVEAAYENVFVARPERRRARGEGHAATIRQVKERNNQITVFERKAILALKDADLERIKDPERNAAVINAIRAWIAAGRPADALPRSPRGDVITKVRLLSKNKPAVRVRGGTADRGEMVRVDVFSKPNRRGKLEWYLVPIYPHQVMNRKGWPQPPMRAVVAYKDEEEWTKIDSQCQFRFSLYPRSYVKALKSNGEVFEGYFKGLDRSTGAIALFSDRNPKTVYRGIGAKTLLTIEKYSVDRFGVRAEIRGEVRTWHGEAFTSPSPPD

SEQ ID NO: 15967 - protein, 1062 aa, unidentified
  REGION 1..1062: note = Cas Enzyme sequence
VGAIKEELRFGIDLGIGSCGWAVIARTGEEAGHIVDMGSWCFDVPETDKERKPKNQIRRSNRLLRRVVRRRRQRMQQLRRLFFTHGLLVSDDANSLSIPSLDSWELRARALDKRLEGRELAVALGAIAKRRGFKSLAKREKSNKASDESKMLSSIEATRELLGRYRTVGEMFARDPLFRDRRRNREGRYDRTVAREDLESEVSKIFAAQIRLGNPLVTDDLREKYHEIAFFQRPFQDSESLLGNCRFETDEKRASKFSPSFEKFRLLCRLVNLRLREGWTERSLTVDELAQILANLGKTKKLSAKNLRKILGLGKEISFAGIAADKEDNDIAVRSGAAMEGTVTLHQALGDELWSRLDEEQRDGIAHCLTFFETNATIITRLELLGLDGDVIAALKVALEQGSFGHFKGAADLSNKAMRKLIVHLAAGLRYDEACARVGYDHSASSPDRRNRAQVVNRQQLKELMEEVTDSINNPIAKKALLEALKQIYVLIQHYGLPGCICIELARDVGRSREERARIESGLNKTTAERERARAEIREMCGWPKDRPVDGDTLLRYRLWQEQNHRCLYSDKSIEPKSICAGDNKLQVDHILPWSRFGDDSFHNKTLCFAQENQDKRNDTPYEWLKERKGEKERWQKFSVAVEALSLKGMKKRNYLMIDAKQREEGFRERNLNDTRYATRILADAVRFFYPEGERGGKGERRRIYTRPGALTSLLRRAWGVESLKKTEDGSRRADDRHHALDAVVVAAVSEGEIQRLTKAFQKSKEEGRARLAYGIAEPWPGFRKDVYARFEAIDGMKRVVARPSRQRARGEGHAASVRQVRVRDGREIIFERKAVTALKIDGKTNDLARIKDPERNQHIVEAITAWVKNGRKGDDLPRTLSGIEIAKVTLQTTNKPGVDVRGGTADRGDMVRVDVFSKANKKGKNAWYLVPIYRHQIMDRKNWPLPPNQAIVAHKDIAEWPFMDSSYCFHLSLFSRCYVEVVKGDGEVIVGYFAGVDSANGSMRLLPHHDTRSQAEAKRFGVKSLLSINKYAVDRLGYLSRVKSEPRLWHGKICISADPPD

SEQ ID NO: 15968 - protein, 1030 aa, unidentified
  REGION 1..1030: note = Cas Enzyme sequence
LYQYRLNVNRQKTVVIREIMRILGIDGGIASVGWAVIETDGATGEILGAGTWMFDAPETAKERTPTSAIRRQKRGQRRVVRRRRQRMAAIRRVLVAHRLLRSPAEDALALRLDPWGLRAEALRRPLAAEEFASVLGHIAKHRGFRSNAKQAPSTNDADETSVMKKAIESTRERLAQYTTVGEMFALDPAFSDRKRNRGGGFARSILRDDQAFEVAQIFKAQRRLGSTLATEALEAEFANHAFSQRPLQDSHHLVGFCPFISTERRAARRSPGFELFRLYGRLAAMRLATRGGERPLSPAEITRVAENFGVQKKLTYAWLRKRLDLDDTVSFADVPRADESKRDFVARAGAAAEGTFALRDAVGEAGWRSLQGRGAVLDELAAILTFRSDLGSIRAGIEALPIEKLVAAALVDASNAGKFSSFAGAGHISAAAARALVPHLAAGLNYADSCREAGFDHSAPIQVDLKDIRNPVARKAVSELIKQVKAIVHEYGMPDRIHVELARDLGKSAEERDEITKGIEKKNRERDKLRERFAELIGRLPSSREEMLRFELWHEQNGRCLYTDTEIRPDQLVATDNSVQVDHILPWSRFGDDSFTNKTICLAGANAEKRDRTPYEWFVADKTPAELARFERCVDACHAMKRYKKRGHYLRRNAAEVEERFRARNLGDTRYATRVVLDLLARLYPEDGKKHVLARPGALTAKLRRGWGLEGLKKDPSGQRRQDDRHHALDAMVVAACSEPMLQHLTRAFQQAEMRGAARDFSTLEQPWEGFRSAAEEAFSQIFVARAERHRARGEAHAATIRQVRERDGKLVVFERKSVEALTLKDLERVKDAARNAATIAALRTWIEAKKPKDALPRSPKGDVIRKVRLQSNDKPAVLIRDGSADRGDMARVDVFRRDDAKGRARFYLVPIYPHEVATLGRPPQRAVDAYKDEEEWTVVSSDFLFVFSLYGNSFAEIMKTDGDIVSGYFKGLHRGTGAISLADPANVAPPKTGLGARTLVSLRKFQVDRLGRRFEVRSETRTWHGVACT

SEQ ID NO: 15969 - protein, 977 aa, unidentified
  REGION 1..977: note = Cas Enzyme sequence
STDAPDALKLKGLDPWELRARGLDRLLTANEFAVALGHIAKRRGFKSAAKNKAANTNSDDKKMLAALEKTQERLGRYRTVGEMFARDPEFSGRKRNRDGMYDRTASRDDLAYEVKVLFAAQRRLGHDKAGEALETSYVSIAFRQKAMQDSERLVGMCSFEPTEKRAAKLSPSFEKFRLLQRLVNLRVTDPEGERGLRPDELKRATADLGKTKSLTVAKVRELIGLPDDQRFTTIKPDQEKDEITSKKGECLPGTGALRKALGEQLWGGMELEQLDQIAHVLSFFEDSKAIEKQLRTLGLSDAVFGALITALDTGKFASFKGAGGFSAKAIRLLLPHLEAGMRFDQACDHVGYDHTATKWTGREQITTKAQFNKLVEDTIAEIANPIARKAMTEGLKQLWAMRNKYGLPGAIHIELARDVGNSLEKRREIEKGINDATVQRKRERQEAREQLGVEDISGDTLLRYRLWKEQGGFCLYTGKAIPPGQFMSNDYQVDHILPWSRFGDDSYNNKTLCLISANQRKKGATPFEWFARDKKTDEWDAFVERVESNKSLRGYKKRNYLLKNAKEVEDKFRSRNLNDTRYACRLLAVKLFYSYGERQEKGGNRRVFTRPGQLTAALRTAWGLESLKKVDGKRLPDDRHHALDALVVAAVTEGEVQKLTNSFQEWEQQGLGRPLRRVDEPWEGFREQAKAAFESVFVARPERRRARGEGHAATIRQIVECDDTKLTSERVAVLSLGISKGKFDEAKALKQLDTVKDPERNSNIVNSIRAWIADGRPTEESKLPRSPQGDVITKIRLMSSTKPAVLVRGGTADRGEMVRVDVFSLKVMKGKNAGQDQWYLVPIYPHQVMDKKGWPSPPMMAVSAYKDEQEWSPITPDHEFRFSIYPKSIIEIAKPDGQVLEGFFQGMDRLTGAISLGNNKNPRLFADDQGNSMRGIGAKTLLTINKYNVDRFGNRFKVEKEVRTWHGVVCTSPSPPG

SEQ ID NO: 15970 - protein, 1046 aa, unidentified
  REGION 1..1046: note = Cas Enzyme sequence
MNGLVFGIDLGIASCGWAVLRHPPPGDPSGEIVAMGSWMFDVPETDKERTPTNQIRRGNRLLRRVIRRRAQRMAEIRRLFAQHGLLAGNEPDALKRAGLDPWELRARGLDKRLSPAEFAVALGHIAKRRGFKSARKGKEANTAGDDQKMLKALEATRERLGRYRTVGEMFGRDADFRDRKRNRDGLFDRTQSRDDLIHEVGKLFEAQRRLGNDAASVALESDFTATTFRQLEMQDSEKLVGMCQFEPQEKRAARFAPSFEKFRLLGKLVNLRITTPDGERPLTPEEIRLATGDLGKTAKLSVKEVRKRIGLPADQRFTAIKPEEEAQDIAARTGEAMHGTKKLRDALGEALWAEMQDKPEQLDRIAHIISFHETADKIGAELRKLGLPTSTADALLDDLSAFSRFKGAGHISAKAARALIPHLEAGMRYDQACEAVGYDHAASRWSKREQVVDKAAFNALVKSMGDEIANPVARKSLTEGLKQLWAMRNRWGLPDAVHIEMARDVGNSLEKRNEIKRGIDKNTAERERQRDEVRELLGIEDVNGDTLLRYRLWKEQAGRCPYTDKAIPATAIIGTDNSHQVDHILPWSRFGDDSYSNKVLCTARANQEKKGQTPFEWIMSSQGEDAWNTFLARIEGNTAFRGAKKRNYVLKNANEAEERFRTRNLNDTRYAARLLAEAVKLFYPEGDRQEKGGNRRVFTRPGGLTSALRHAWGVESLKKVDGKRVEDARHHALDALVVAAIGEWEVQRLTRSYQEWEQKGLARPLRQVDPPWGDAASFRREVKEAYDNVFVARPERRRARGEGHAATIRQVKERDGALVVYERKSITDLSEKRLQDIKDPERNQGVIEAIRDWIARGRPADSLPRSPAGDEIRKVRLRTKGKPAVQVRGGTADRGEIVRVDVFARPNKRGKDEFYLVPIYPHHVMTKRDWPVPPMRAVVAYKDEEDWTLIDHSFAFRFSLYPRNFVEVVKSTGEVCEGYFAGMDRSTGAISLQSHNNPKNSFRGLGAKTLLTMKKYSVDRFGARSEVKSEVRTWHGVVCISPIPPD

SEQ ID NO: 15971 - protein, 1053 aa, unidentified
  REGION 1..1053: note = Cas Enzyme sequence
MSGVVFGIDLGIASCGWAVLRHPTSDDPSGEIVAMGSWIFDVPETDKERTPTNQIRRGNRLLRRVIRRRAQRMGEIRRLFAQHGLLAGNEPDALKRAGLDPWELRARGLDKPLSPAEFAVALGHIAKRRGFKSAKKGKEANTAGDDQKMLKALEATRERLGRYRTVGEMFGRDADFRDRKRNRDGLFDRTQSRGDLVHEVAKLFEAQRRLGNDTASAALEAEFTAIAFRQLEMQDSEKLVGMCQFEPREKRAARFAPSFEKFRLLGKLVNLRITTPEGERPLTPEEIRLAAGDLGKTAKLSVKEVRKRIGLPADQRFTAFKPEEEAQDIAARNGEAMHGTRKLRDALGEVLWTELQDTPEHLDQIAHVISFHETADKIGEELHRLGLPAGAVDALLEDLAAFSRFKGAGHISAKAARALIPHLEAGLRYDQACEAVGYDHAASRWRKREQVADKAGFNALVKSMGDEIANPVARRSLTEGLKQLWAMRNRWGLPDAVHIEMARDVGNSLEKRNEIKRGIDKNTAERERQRSEVRELLGIEDVNGDTLLRYRLWKEQAGRCPYTDKAIPATAIIATDNSHQVDHILPWSRFGDDSYSNKVLCTARANQEKKGQTPFEWIMSSQGEEAWNTFLARIEGNTAFRGAKKRNYVLKNAKEAEERFRTRNLNDTRYACRLLAEAVKLFYPEGDRQEKGGNRRVFTRPGGLTSALRHAWGVESLKKVDGKRVEDARHHALDALVVAAIGEWEVQRLTRSYQEWEQKGLARPLRQVDPPWGDAASFRREVKEAYDNVFVARPERRRARGEGHAATIRQVKERDGALVVYERKSIADLSEKRLQDIKDPERNQGVIEAIREWIANGRPADSLPRSPAGDEIRKVRLRTKGKPAVHVRGGTADRGEIVRVDVFARPNKRGKDEFYLVPIYPHHVMNKRDRPTPPVRSVVAYKDEDEWTLIDDSYKFKFSLHPRSYIEVTKPTGELLAGYFQGLNRSTGAINLSNPRDPRLLADDNGNSMQSIGAKTLLTMKKYSVDRFGVRSEVKSEVRTWHGVVCTSPIPPD

SEQ ID NO: 15972 - protein, 1051 aa, unidentified
  REGION 1..1051: note = Cas Enzyme sequence
MIARISKGLVFGIDLGIASCGWAVLRHPTSGDPSGEIVAMGSWMFDVPETDKERTPTNQIRRGNRLLRRVIRRRAQRMAQIRRLFAQHGLLAGNEPKALKRAGLDPWELRARGLDKPLSPAEFAVALGHIAKRRGFKSARKGKEANAAGDDQKMLKALEATRERLGRYRTVGEMFGRDTDFRNRKRNRDGLFDRTQSRDDLIHEVAKLFEAQRRLGNAAASAALESDFTTIAFRQLEMQDSEKLVGMCQFEPKEKRAARFAPSFEKFRLLGKLVNLRIATPQGERPLTPEEIRLATGDLGKTAKLSVKEVRKRIGLPADQRFTAFKPEDEAQDIAARTGEAMHGTKKLRDSLGEVLWTKLQAQPEQLDQVAHVISFHETAGKIGEELGKLGLPAGAVDALLEDLAIFSRFKGAGHISAKAARALIPHLEAGLRYDQACEAVGYDHAASRWSKREQVTDKAGFNALVKSMGDEIANPVARKSLTEGLKQLWAMRNRWGLPDAVHIEMARDVGNSLEKRNEIKRGIDKNTAERERQRSEVRELLGIDDVNGDTLLRYRLWKEQAGRCPYTDKAIPATAIIATDNSHQVDHILPWSRFGDDSYSNKVLCTARANQEKKGQTPFEWIMSSQGEEAWNAFLARIERNTAFRGAKKRNYVLKNAKEAEERFRTRNLNDTRYACRLLAEAVKLFYPEGDRQEKGGNRRVFTRPGGLTSALRHAWGVESLKKVDGKRVEDARHHALDALVVAAIGEWEVQRLTRSYQEWEQKGLARPLRQVDPPWGDAASFRREVKEAYDNIFVARPERRRARGEGHAATIRQVKERDGALVVYERKPITDLSEKRLQDIKDPERNQGVIEAIREWISNGRPADSLPRSPAGHEIRKVRLRTKGKPAVHVRGGTADRGEIVRVDVFVRPNKRGKDEFYLVPIYPHHVMNKRDWLMPPMRAVVAYKDEEDWTLIDHSFVFRFSLYPRSFVEAVKSTGEVFEGYFAGMDRSTGAISLQSHNNRKDSFRGLGAKTLLTMKKYSVDRFGVRSEVKSEVRTWHGVVCTSPIQPD

SEQ ID NO: 15973 - protein, 1043 aa, unidentified
  REGION 1..1043: note = Cas Enzyme sequence
VTSNPIDLLNLGVRIFPTGRDPQSKESNALGRRQPRQQRKQIDRRKKRQLELEECLMAHGLMPTRHQVEARNVFFALDPYIARERAARGKADPYDLGRAIWHISRHRGFKSNRKTDRANEDEKGKIASASADLRQKLVDAGAPTYGAWLATRHENGEPVRVRPTGDGAQTAYDFYPTRAMLEAEFDHIWRMQAAHHAGLTDEVREAVRDAVFFQRPLKPVKPGRCTFFPNEYRLPKWHPLAQEFLILQQLNMLRLVDESGERQLDPTARDLLKKHLMSGEKLTWAGLRRSLGVGSEVDINLETGGLKGLAHNAVVARLAGTAKKPGPLASTWNAWNEDQRMRLLRILDEAATPEEAVERLMSDCELDFEAASRVEKITLPDGHLMIGEHASGAIVQVMREDVIVYSDAVRVANERGLFGEGVDVHHSDLRPDGDPGLERLPRYFELPTLQRMIGTGTGNPEDPPEIRFGKISNPTVHIALGQFRRVMNALIERYGKPAQVVIEATRDMAKSARELNEIDIEIRKNTRRNDAWRAELEEAGLIDPGARVGDRLLRMRLWEELGKTPADRLCPYSGEPIGLHQLHSDVVEIDHILPFDDTFDDSPANKTVCFRAANRIKGKRVPGDAWSGAELEAIVARVKGAPGMSRKLWRFLPGAMEKWQDGRGFEDRQLHATGYLARVVRAYVEALFPKDGTSNIWMPTGRMTAMMRRRWGLYLPDHNAKTRDDHRHHALDAAVVGVIDRRTIQKLQTYARRIGAEELDRILPDPPEPFVGFRDQVMARVARVRASHRPDHAVSGRLHEDTAYGLIRDVPENQAARTIGNLVVRKPVGSLSAKEIGQVRDEKIRAELLGAMKGLGADKKGLAAALQEWSARTGHRRLRIIKPAANARAVCGTDGTAYKWMLPGEIAYLDVLEDAEGNWFHHAVDIWAAQSEDPEDARRDHREARFIMRLFKNDTLQLFDLDEDGQPIAGSNGIKRAVRLEPSANRVRLVGLNEAGVFDNRHGNTKDPFRWDFANIGKLKMRRVRRVRVDELGRVRIVPHGVI

SEQ ID NO: 15974 - protein, 1025 aa, unidentified
  REGION 1..1025: note = Cas Enzyme sequence
MPRGARRRHDRSLGRRRRLLDDLIGFGLLPSDADARSAVFVANPIEARARAAREQVALEQLGRALWHMSKHRGFKSNRRADKDADEKGKIAIASAALQERLRADGHPTYGVFLHARLARGEGTRIRPTGDGAKLSYEFYPTRALLEAEFDHIWAIQAGFHPSLTEAMRERLRDTIFFQRPLRPVRPGKCTFFPDQDRLPRWHPAAQEFLILSQLNHLRIVDDHGEQPLDITARDLVARTLMAGTKLSWSGLKKTLKLPSQAEFNLEKGGLKELARNDVAARLLGDTKKPGPLATIWPTLDNATREEILWQISEVADPEELICWLMERLGLSREVAERVEKIPLPDGHLRFCKTATQAIVEELRSDVIPYDEAVRRAPLLGGAGLDHSDFQAEEGVDTLPPYNRLPVLQRMIGNGTGDPNDPDLLRYGRITNPTVHIALGQFRRVMNALIAEYGKPAQVAIEATRDMAKSAEELNKIEKTIRDNEKRNDRWRAELQQAGLLTEGARIGDRFLRMRLWEEMGKGPSDRLCPYTGRPIALYQLHSDEIEIDHILPFEETFDDSPANKTLCFRDANRRKGKLSPSEAADQQPDFFDLAAIIGRTKHLPANKSWRFLPGAMQKWEETRGFEDRQLNATGYLARVVRAYAEALFPKIDDEGKRRSHVWVLPGRMTAMLRHRWGLNLGDHNRKSRNDHRHHAIDAAVVGVIDRRMVQVLQTHARNMGVERLDRVLPAPPEPFDGFRDAVMSAVEKVNVSHRAQHGSIDPSDPSQTSGRLHEDTVFGLVRDVPENQADRTIGNVVVRKPVAGLTEKEIGQVRDVKLRLSLEEATRSARDKSLPEAERKKRLPEALAKWVQETGHRKLRILKPEAGVRPVLDSNGKPYKWLVPGEISWLDILEAPDGTWFQHATDIWAANSGGAAPWNSAYPGARFVMRVHKNDTIQLFDWDDKNKCVFEGSNQIKRIVRLSPSNSVIYLVGINDAGDYQKRHIDDDDPFRWDFANIGKLRLRRARRVRIDELGRVHTIPHGTN

SEQ ID NO: 15975 - protein, 958 aa, unidentified
  REGION 1..958: note = Cas Enzyme sequence
MSKHRGFKSNRRADKDADEKGKIAIASAALQERLRADGHPTYGVFLHARLARGEGTRIRPTGDGAKLSYEFYPTRALLEAEFDHIWAIQAGFHPSLTEAMRERLRDTIFFQRPLRPVRPGKCTFFPDQDRLPRWHPAAQEFLILSQLNHLRIVDDHGEQPLDITARDLVARTLMAGTKLSWSGLKKTLKLPSQAEFNLEKGGLKELARNDVAARLLGDTKKPGPLATIWPTLDNATREEILWQISEVADPEELICWLMERLGLSREVAERVEKIPLPDGHLRFCKTATQAIVEELRSDVIPYDEAVRRAPLLGGAGLDHSDFQAEEGVDTLPPYNRLPVLQRMIGNGTGDPNDPDLLRYGRITNPTVHIALGQFRRVMNALIAEYGKPAQVAIEATRDMAKSAEELNKIEKTIRDNEKRNDRWRAELQQAGLLTEGARIGDRFLRMRLWEEMGKGPSDRLCPYTGRPIALYQLHSDEIEIDHILPFEETFDDSPANKTLCFRDANRRKGKLSPSEAADQQPDFFDLAAIIGRTKHLPANKSWRFLPGAMQKWEETRGFEDRQLNATGYLARVVRAYAEALFPKIDDEGKRRSHVWVLPGRMTAMLRHRWGLNLGDHNRKSRNDHRHHAIDAAVVGVIDRRMVQVLQTHARNMGVERLDRVLPAPPEPFDGFRDAVMSAVEKVNVSHRAQHGSIDPSDPSQTSGRLHEDTVFGLVRDVPENQADRTIGNVVVRKPVAGLTEKEIGQVRDVKLRLSLEEATRSARDKSLPEAERKKRLPEALAKWVQETGHRKLRILKPEAGVRPVLDSNGKPYKWLVPGEISWLDILEAPDGTWFQHATDIWAANSGGAAPWNSAYPGARFVMRVHKNDTIQLFDWDDKNKCVFEGSNQIKRIVRLSPSNSVIYLVGINDAGDYQKRHIDDDDPFRWDFANIGKLRLRRARRVRIDELGRVHTIPHGTN

SEQ ID NO: 15976 - protein, 1029 aa, unidentified
  REGION 1..1029: note = Cas Enzyme sequence
MPRGARRRHDRSLGRRRRLLDDLIGFGLLPSDADARSAVFVANPIEARARAAREQVALEQLGRALWHMSKHRGFKSNRRADKDADEKGKIAIASAALLESLKAEGHPTYGAFLHARLARGEGTRIRPTGDGAKLSYEFYPTRAHLEAEFDHIWAIQAGFHPTLTEAMRERLRDTIFFQRPLRPVRPGKCTFFPDQDRLQRWHPAAQEFLILSQLNHLRIVDDHGEQPMDITTRDLVARTLMAGTKLSWSGLKKTLKLPSQVEFNLEKGGLKELARNDVAARLLGDTKKPGPLATIWPTLDNATQEEILWQISEVADPEELICWLMERLGLSREVAERVEKIPLPDGHLRFCKTATQAIVEELRSDVIPYDEAVRRAPLLGGAGLDHSDFQAEEGVDTLPPYNRLPVLQRMIGNGTGDSHDPDLLRYGRITNPTVHIALGQFRRVMNALISEYGKPAQVVIEATRDMAKSAEELNKIEKTIRDNEKRNDRWRAELQQAGLLAEGARIGDRFLRMRLWEEMGKGPADRLCPYTGRPIALHQLHSDEIEIDHILSFDDTFDDSPANKTLCFREANRRKGKLSPSEAADQQPDFFDLAAIVGRTKHLPANKAWRFLPGAMQKWEATRGFEDRQLNATGYLARVVRAYAEALFPKTDEEGKRRSHVWVLPGRMTAMLRHRWGLNLGDHNRKSRNDHRHHAIDAAVVGVIDRRMVQVLQTHARNMGVERLDRVLPAPPEPFEGFRDAVLAAVEKVNVSHRAQHGSIDPNDPSQTSGRLHEDTVFGLVRDVPENQADRTIGNVVVRKPVAGLTEKEIGQVREVKLRLSLEEATRSARDKSLPEAERKKRLPEALAKWVQDTGHRKLRILKPEAGVRPVHDRDGKPYKWLVPGEISWLDILEAPDGTWFQHATDIWAANSGGAAPWNSAHPGARFIMRVHKNDTIQVFDWDEKNKCVVEGSNRIKRIVRMEPSANRVRLVGINEAGVFDDRHKDADDPFRWDLANIGKLKQRRARRVRIDELGRVHTIPHGTVQKVG

SEQ ID NO: 15977 - protein, 1079 aa, unidentified
  REGION 1..1079: note = Cas Enzyme sequence
MYRFAFDLGTNSLGWAVYRLTDDTRPASLEKIGVRIFPNGRDPQSKESNAAGRRIPRGARRRQDRSLGRRKRLLDDLIGFGLLQSDADARSAVFAANPIEARARAAREQVALEQLGRALWHMSKHRGFKSNRRADKDTDEKGKIAIASAALLERLRADGHPTYGAFLHARLARGEGTRIRPTGDGAKLSYEFYPTRALLEAEFDHIWAIQAGFHPSLTEAMHERLRDTIFFQRPLRPVRPGKCTFFPDQVRLPRWHPAAQEFLILSQLNYLRIVDDHGEHPLDITARDLVARTLMSGAKLSWSALRKTLKLPSQAEFNLEKGGLKELARNDVAARLMGDTKKPGPLATQWQTLDSATQEEILWQIWEVADPEELICWLMERLGLSREVAERVEKIPLPDGHLRFCKTATQAIVEELRGDVITYDEAVRRAPLLGGAGLDHSDFQAEVGVDTLPPYNRLPVLQRVIGNGTGDPNDPDLLRYGRITNPTVHIALGQFRRVMNALIAEYGKPAQVVIEATRDMAKSAEELNNIEKMIRDNEMRNDRWRAELQAAGLLAEGARIGDRFLRMRLWEEMGRAPADRLCPYTGRPIPLHQLHSDEIEIDHILPFEETFDDSPANKTLCFREANRRKGKLSPAEAADRQPDFFDLAAIIGRTKHLPANKAWRFLPGAMTKWEETRGFEDRQLNATGYLARVVRAYAEALFPKTDGEGKRRSHVWVLPGRMTAMLRHRWGLNLGDHNRKSRDDHRHHAIDAAIVGVIDRRMVQVLQTHARNMGVERLDRVLPAPPEPFNGFRGTVLSAVEKVNISHRPQHGSIDPIDPSQTSGRLHEDTVFGLVRDVHENQAERTIGNVVVRKPVSGLTEKEIGQVRDVKLRLSLEEATRSARDKSLPEAERKKRLPEALAKWVQETGHRKLRILKPEAGVRPVHDRDGKPYKWLVPGEISWLDILEAPNGTWFQNATDIWMANSGGTEPWNVAHPGARFIMRVHKNDTVQVFDWDDKNKCVVEGSNTVKRIVRMEPSANRVRLVGVNDAGVFDDRHKNADDPFRWDLATISKMKLRRARRVRIDELGRVHTIPHGTI

SEQ ID NO: 15978 - protein, 1096 aa, unidentified
  REGION 1..1096: note = Cas Enzyme sequence
IGITSVGYGVIDIDNNRFVDYGVRLFKEGIAASNEERRTKRGARRLKRRKANRLDDMRKLLKQNGLLNEEYIPLQNPYEIRLKGLTQKLTNDELCCAILHITKSRGTVLEINADASKDEETTKSVLSKNASLLKEHYVCEIQLERLKKDGKIRGINNNFQTQDYLKELTTILEHQNLSDDFKQQILQIVARRRRYDQGPGSEKSPTPYGSYRIVDDEVVHINLIDMMRGRCSVYPDEFRAPKQSYTAELFNLLNDLNNLTIHNEKISLGDKEKIIQFINEKGNITVKQLCKLLNVTEDEIKGFRIDKNEKPILTEFKGYKKVLSVFKTYHLENLLEDKTIVDEIMDINTKSKGVDERKQSIHQIYSSLPDEVVNDLANMKGVSGYHSLSFKIMRELNIEMMKTELNQMQLLHQLEIYDKNRKSLKGMKKIYPDDEAILSPVAKRAHRETFKVINQLREKYGEFDSIVIETTRDKNSDEQRKRLNENQKFNEKINNQVNELLNQNGFNSDHINSLTKLKVRLYLEQDGKTAYTQNDISNLNLLINDPYAYEVDHIIPISISLDDSYSNKVLVSHIENQEKLNMTPIQTFLKGKFTGGSLEQFQSYVKNNKNMKAKKKSYLLFEKDITKFDNIQEFINRNLVDTSYACRTVMNTLQHYFKDNGIPTKVHTIKGQATSAFRKRIHLEKERDNDYYHHAIDALIVASLKKLNLVNSYLMKYDFDKLYDEKTGEILEVPEDKKYLDPTYISFVSTLKNIYEESYKYNLGLMKKEDMHYPLIKISHKIDTKPNRQISDETIYSTRQINGTEMLVERIKNIYDPKEKAAIALVNNIINNDTDKYIMAQKDPQTFEKIKKVVMNHFETYKTSKEYYVMNKGKYELKATSPLTIYYEEFGPITKYSKKNNGPAIQSMKFYSDELGSHISITNHYHTHNKNVILKQVKPYRTDFYVSPQGKYKFVTVRYKDVFYKASISKYVIDEKWYYNEKTRKGIEEDWKFVCSMHRDELIGIIKKEGTKFIFDAKRYKNGNTLYHDGLHYEILKFTATNDDKQGTIEVKPIGCYVSKQIRASIGPCIKITKFATDVLGNMYEIKENVLKLEFE

SEQ ID NO: 15979 - protein, 941 aa, unidentified
  REGION 1..941: note = Cas Enzyme sequence
MSCTLAIDFGSKNIGLALVEHTENVANRVLYAGTMVVAARPLNAAVQPRAMSRRMRRSRKTHAGRLRRLGQALAGINGAREIVRFCRRRGYSHEPEDSDESTRGMHFSREDFFDALRQEINRVITLEERDRTLRACSKHLNEARIRTTELRPARFENRGPTKCQWIGCRKNVPRAANAIKERIQQALYAWMKPIFDECSNFQGLRHSVDHWILELDALAHWYAKNQKLNEQARKEKQKLINKRKNLIYKHLKSRVCQEVSEELAEKFRENWTETYGRNITEIITGVQGGRTRYCREHSNSFVEFFLAGKQIPNRTDITMADLFGRKQQILFSRIWRLLEERLLPLAGGQIDRVVVERVAFSILAGKAKDRRELSEDKASEMYWYGPQYGFSDRREMFKEEFGGRCAYCGQTNAVNEVEHLLPRNEFPFDSYLNVLPACSSCNARKGARTAFAAGMTINRDAYQAYADYVGGKKPPHLFHTIKKGMLNLLSKNGNSLEVEKQLGMLADNLVTISATQKGPRPLARYLAGQLSKVNGHPCETLWISGRHTALYRKILLPEYDKQDSKAAHDLINHAVDAIILGCKLPSAAAIENRRWYARARDINDWRDKVRAAGPAMENGIPRVEPVTFIPFFEGEIGNGYCSIDLSAFSWNRKHQSGHLLDPVGMTDGKLPIKREPATEVFANLKDQRKRDEQIKRIAHPALKKLLESNPKGAAEQLIRWLQQSVQSGLSSGKMGKHPSDQARKRLLEEFVNSPVEIFLKDDKDGRKDIPQTIGIRCLIAGSSFSMFDVTRCDTTGRIFQHYKTDPHLKALYVGYCKNKKGVLEPSRPVLFCVNQIYAVTKRESTGEQVPDIPADSPLRGRALGSKGSLKEFLAMWQNAFDELCRSESIIKRFRITQGCVIEKTDGTFFQLRNFARDKPWMKSSPFRNIRRVYRSPFQFLK

SEQ ID NO: 15980 - protein, 988 aa, unidentified
  REGION 1..988: note = Cas Enzyme sequence
MYSYDKREPTGLSATTGGSRKGFRDMSCTLAIDFGSKNIGIALVEHTESVPNRVLYAGTMVVAAKPLNAAVQPRALSRRMRRSRKTHVGRLRRLSQALAGTEGAQEIVRFCRRRGYSHEPEDSDESARGMHFSREDFFDVLRQEINRVITPEERDRTLRVCSKHLNEARIQTRELRPARFDNRGPTKCQWIGCRKSVPKAANAIKERIQQALYAWMKPVFDECSNPQGLRHSVDHWILELDGLARWYAKSQKLNDQARKETQKLINKRKNLIYKHIKSRVCQEVSEELAEKFRENWTETYGSNITEIITGGQGGRIRYCREHSNSFVDFFLAGKQIPNRTDITMADLFGRKQQILFSRIWRLLEERLLPLAGGQIDRVVVERVAFSILAGKAKDRRELSKDKASEMYRYGPQYGFSDRREMFKEEFGGRCAYCGQTNAINEVEHLLSRNEFPFDSYLNILPACSACNARKGARTAFAAGMTINRDAYQAYADYVGRKKPPHLFHTIKKGMLNLLSKNGNSLEVEKQLGMLADNLVTISATQKGPRPLARYLAGQLSKVNGYPCESLWISGRHTALYRKILLPEYEKQDRKAAHDLINHAVDAIILGCKLPSAAAIENPRWYARARDINDWRDKVRAAGPALENGIPRVEPVTFIPFFEGEIGNGYCSIDLSAFSWNRKHQSGHLLDPVGMTDGKLPIKREPATEVFANLKDQRKRDEQIKRIAHPALKKLLESNPKGAAEQLIRWLQQSVQSGLSSGKMGNHPSDQARKRLLEEFVNSPVEIFLKDDKDGRKDIPQIIGIRCLIAGSSFSMFDVTRCDMTGRIFQHYKTDPHLKALYVGYRKNKKGVLDLSRPVLFCVNQIYAVTKRESSGVQVLDITADSPLRGRALGSKGSLKEFLGRWQVAFDELCRSEYIIKRFRITQGCVIEKRDGTFFQLRNFARDKPWMKGSPFRNIRRVYRSPFLFLKQAQNIVLEEHHSTLIPIDQVIE

SEQ ID NO: 15981 - protein, 1109 aa, unidentified
  REGION 1..1109: note = Cas Enzyme sequence
MTRPLLRTLGLDLGTNSLGWCLLETGGEPGESPEGRIVDLGVRIFSQTEMAGREARSKESLAVARRMARGARRRRDRYLKRRARLLALLTDLGLMPSGGAERTALVQGTDDQTGGDISGSVFELRAKALDHALAPQELGRVLFHLNQRRGFKSNRRVDSNDEEQGKIAAGVTRLEQAIAAEGARTYGEWLAKRRQAGLSVRARLSSDGGSYPFYPSRDALEREFDRIMSAQMPFHAEILDPLAIAALRQTIFHQRQLRPVAPGKCSYNPLEARLPKAHPLFQAFRLLKEVNELEILHEDQTRHKLVPAQRNALLLQLRTALNRQGKVPFSKLRRMLKLGAEVRFNKESESRKDLLGDVVQFALSQPSCFGPAWSGLPLDRQAEIIEKLRSEPDRDVLVDWLRKDCGLSRDAANEVAALHLPQGFGRLGLSALSALVDELTHGLDDKGFVLSEAAASVNVYGKTNSETDPDRKALESLPKYQEVLERHIPPGAGGKAEPNAPEWDEVMGRITNPTVHIALNQLRRVINRVIARHGRPDRIAVELGRDLKLNDAKRDEVNRKHAQTTREAERLSVLLNEEFRQPDTGYNRLRLRLWEELNADQPLNRVCVYCGSAITPSMLFNSETDIDHILPYSLTLDDSQSNKLLCCRPCNRIKGNRPPAGVVPWRAGYEEILARAVVLPKAKRWRFAEDAMERFGGEEGFMTRQLTDMQYVSRLALTYLAALYDAEEADLDGVIRRHSRIRALPGRMTEMLRRKWGLNDLLCDHNSADVLKKKNRLDHRHHAVDAAVIAATSRALIKRIQTASGKLEEEGAERVVARIDQPWPEFRNELRERLCAVVVSHKPDHGTVSRKGYDVGRGQTAGKLHLDTAYGPTGERDASGRERVVRRVPISSLEKPSDLEAIRGNEHGHSELRERLKEATRGLSGKAFQESVQKFAETDSKFRGIRHVRIVETKSPVWITHGNGRFKKGYLPGENLRYELWELPDGSWDAEVVSLFEAHQPGYVPKMRREHHNARKIMSLMKGDMIAYEDPKTGERVIAKVRKFDQRNKQLYLDPHFQAGNLDLLEKQKIYAPFRPRPNPLKKVRPRQVRVDEIGRVFDPGPWWLKDRD

SEQ ID NO: 15982 - protein, 913 aa, unidentified
  REGION 1..913: note = Cas Enzyme sequence
GLSVRARLSSDGGSYPFYPSRDALEREFDRIMSAQMPFHAEILDPLAIAALRQTIFHQRQLRPVAPGKCSYNPLEARLPKAHPLFQAFRLLKEVNELEILHEDQTRHKLVPAQRNALLLQLRTALNRQGKVPFSKLRRMLKLGAEVRFNKESESRKDLLGDVVQFALSQPSCFGPAWSGLPLDRQAEIIEKLRSEPDRDVLVDWLRKDCGLSRDAANEVAALHLPQGFGRLGLSALSALVDELTHGLDDKGFVLSEAAASVNVYGKTNSETDPDRKALESLPKYQEVLERHIPPGAGGKAEPNAPEWDEVMGRITNPTVHIALNQLRRVINRVIARHGRPDRIAVELGRDLKLNDAKRDEVNRKHAQTTREAERLSVLLNEEFRQPDTGYNRLRLRLWEELNADQPLNRVCVYCGSAITPSMLFNSETDIDHILPYSLTLDDSQSNKLLCCRPCNRIKGNRPPAGVVPWRAGYEEILARAVVLPKAKRWRFAEDAMERFGGEEGFMTRQLTDMQYVSRLALTYLAALYDAEEADLDGVIRRHSRIRALPGRMTEMLRRKWGLNDLLCDHNSADVLKKKNRLDHRHHAVDAAVIAATSRALIKRIQTASGKLEEEGAERVVARIDQPWPEFRNELRERLCAVVVSHKPDHGTVSRKGYDVGRGQTAGKLHLDTAYGPTGERDASGRERVVRRVPISSLEKPSDLEAIRGNEHGHSELRERLKEATRGLSGKAFQESVQKFAETDSKFRGIRHVRIVETKSPVWITHGNGRFKKGYLPGENLRYELWELPDGSWDAEVVSLFEAHQPGYVPKMRREHHNARKIMSLMKGDMIAYEDPKTGERVIAKVRKFDQRNKQLYLDPHFQAGNLDLLEKQKIYAPFRPRPNPLKKVRPRQVRVDEIGRVFDPGPWWLKDRD

SEQ ID NO: 15983 - protein, 1045 aa, unidentified
  REGION 1..1045: note = Cas Enzyme sequence
METNSLFRSQSTNSQTTSGWALGLDVGSNSIGWMLVREQPVDGEVNVIGGVRVFPAGTATEKATEKSKTEERRVARGMRRQHDRRSRRKRRLTYVLREIGLLPPQPVPIEPILQAIDPWEVRARGLDEPLKPEEFARALIHLNQRRGYRSNRRADAKKSESASIREKAVKLREEIHEHGCRTLGEYLYKHVPSIRERRRGRFFLREMVEEEFKQLWNRQAQEDPQHFTDAAKEKVKEAIFYQRPFLKRERLEARVGRCEFEPSEKRCRVAHRLAQRFRILQEVNNLRVIIGYTERALTPEERKVLIEKLESSKEVTLKRIPKLLGLPEDCEINLARGNRTKLLGNSAEAEFRKLLGDRWQTMTEEEKDRLCEAVLEEEDDALERRAREEFGFTEEQVKGLLEISLCDRFGRVSLKAIRRLLPFLEQGLSLTEAAQKAGYGDRHKVDRIYELLPFPPGTRLTTNPEREQELVRQGLLLPNENEITNPVVRKALFEVRKVVNAIIRKYGKPSRIVVELARETRGSIEERNEYNRKIRKREKENEEIKDELRKLGLEQPTAEDVRKYRLWKECKGICPYSGRPITVEQLFSGEVEVEHIWPYDRCLDNSFANLTLCFRDWNQRKGNRTPYEAFHQEPFWQEILERVSRFEGEYRWQKLRRFRYEGDLQLDNFVRRQLQDTQYIARVVRRYLELLGVPVSCTRGQVTAALRHLWGLDSILARDGSSAKNRDDHRHHAIDAAVIAMTTAKHLHNLSRREHFRRNRMNFPEPWPGFRVAVKHAVDSIVVSHAPTRRVRGPLHEETNYGLASQEKQRYVYRKPLEELFTTEVEAIRDAKIRRMVEERLDQVCPNWRQKGRDSLKKLKALENPILLPNSNGEPIPVRRVRLTTTIGNAIGLPRQAPVRYVKPGENHHVEIFERTDKKGRVCREVVAVTLFEAAQRLRDRQPVVSRVHPHYPDAKFLMSLCKNDMVRITWLEDAKNAKAGETRIYRVQKFSVSDGRPDIMFREHSSVRADDMSHCERVTDLSPRKLSLEKITVSVLGEVEVAHD

SEQ ID NO: 15984 - protein, 1080 aa, unidentified
  REGION 1..1080: note = Cas Enzyme sequence
MGKPPAQDYILGLDIGVASVGAALLGNAHIVALHVRTFDKAETAKEGESLNTIRRTARLTRRRIRRRAFRLLRLRRLLKREGLLTSHDPAELDSTISSWQLRAEGLDRKLDDHEWAAVLYHLVKHRGFQSNRKSEAKSDEKAGEMLSGVTANQQRMQQASWRTVGEMAERDPTFRQAKRNKGGEYTHTFSRADMEQELHELFKQQRAFGNSRASAAFEQAVHTLLMARKPALAGDRLLNMVGHCTFETSEFRAPKASYTTERFLWFTRLNNLRVSGRGEIRALNDAERLALMRLPFTQTKLTYKQARKAIDLADDARFVGLDYWRKRKEGNELAAEDAPLFEAKAFHALRKAYEGAGLKTEWQRDAVNPDRLDDLAYAQTVFKEDKEAREWMLARGIEVPIAEAALEISFNDFIRLSIKALRKIIPFMEAGQRYDEAVQSAGYAHHSQPVAHNKSRIIPRLSKDDFPNPVVYRALNQARKLVNAIVHEYGSPSEVRIELARDLSRPFDERQEIRREQQKYQDKKEKHVQEFEHLFGHTPHRDQLAKFRLYHEQDGKCAYSLEPIDLRRLDEDGYVEVDHALPYSRSFDDGMNNKMLALTRENRDKGNRTPYEYLDGEHDSERWRRFEAFVQSNKKYRLAKRSRLLRKDFSSTAAEGFRERNLTDTRYICRSFKNLVETHLQLAEDSGSKRCVVVSGQLTAFLRARWGLLKVREEGDLHHALDAAVVAACTHAMVKRLSDYARRHELELVRNKYVDPETGEVLDIVALRKQEALLSKMQIQFPTPWPYFRDELSARLSPNPGELLARIPGYPPELVVASQPVRVSRAPLRRGLGAAHQETIRSAKLINEGKSSVKTPLTALKLKDLPNIVGYGDPRNEKLIAAIRQRLEQHGDDGKKAFKEPLYKPSKPGAEAPIVRTVNLANTQKSGLPVRGGIANNGAMLRVDVFTDGKKFYAVPLYVADAVKPDLPNRAVVAYKPEEEWTLMDESKGFCFLFSIHSNDWIRVRQKGKTPIEGYSALIHRGTGAANIWAHDRNRSVGKDGLIEGIGIKTALAVEKYNVDMLGRLFRVYKEKRLPLRSKV

SEQ ID NO: 15985 - protein, 1158 aa, unidentified
  REGION 1..1158: note = Cas Enzyme sequence
MTGKQNNLGPLTFGLDIGIASVGWAVLGENRIVDLGARCFDKAETAKEGESLNLARRSARLLRRRLRRRAWRLTKLARLLKREGLIADANLFKNKIEKNSPIPKSSWQLRVDALDRQLTAEEWARVIYHLCKHRGFHWISRAEEKAAESDSKSEGGRVKQGLAGTKKLMAEKNYRTAAEMIMKEFFTLRIDEDGKPALTKNTGELILDGTARNKQGDYSKALSRVLLNDEFVLLFQRQRELCNPHTSTEFQEKILGTGDKRSGLFWAQNPALAGNDLLKMLGHCTLEKNEYRAPKASFTAERHVWLTRLNNLRIVIDGATRSLTEAERREALPMPYKQAGDLTYKQLRSVLTKAGYLPESFKFTGLLYPPGLKANEKAKDPESVALVKIPAWHELRKTLEKKGLANEWQKLSTEALEGNPKLLDDIAWVLSVYKDDIEVEAELRKLPLHSADKLVDVLLDIRFDKFSNLSLKALRQIVPLMEQGQRYDEAVANIPEYGHHSQLHKVGTGEHKYLPPFYSGRDKDGRMVFNDDLDIPRNPVVLRALNQTRKVMNALIRKYGSPHEVHIEMARDLSRPLDERREVEKLQKEYRDNNEKYKAEFASTFNIVGAVKGRELEKYQLYREQQGKCAYSIEPIDLHRLFETGYVEIDHALPYSRSFDDSKNNRVLVLARENRNKGNRTPFEYLDGHDNSERWRQFVAYVEGNKAYRLAKRSRLLRKDFGEKESKDFRERNLNDTRYICKFFKNYVEQYLQLHEDSEAKRCVVLSGQMTSFLRARWGLVKVRGDSDRHHALDAAVVAACSHGMVKRLSDYSRRKELEQVRDGFVDVDTGEILNPAMFEQIEKHFPNPWPHFRNEVEARLKLDDPALLREEMRCLGTYTEEALQAVHPLFVSRAPQRRNSGAAHKDTIYAQPERLKAQGGVTQKVALTSLTLKDMDKLVDPHRNEKLYAAIRARLEQHGGKGDKAFPASNPLHKPDSAGNPTGPIVRGVTMEIDKLSGIPIRGGIAKNDTMLRVDVFTKAGKFHLVPVYVYHAVAKELPNRAIVAFKDEAEWTLIDHSFNFCFSLHPNDFMKVQQKGKPAILGYYSSCHRGTGNINLWAHDRNQAVGKDGMIEGIGVKTALSIEKFNVDVLGNIYPAPPEERCLYPAQRSGAEHDLA

SEQ ID NO: 15986 - protein, 1158 aa, unidentified
  REGION 1..1158: note = Cas Enzyme sequence
MTGKQNNLGPLTFGLDIGIASVGWAVLGENRIVDLGARCFDKAETAKEGESLNLARRSARLLRRRLRRRAWRLTKLARLLKREGLIADANLFKNKIEKNSPIPKSSWQLRVDALDRQLTAEEWARVIYHLCKHRGFHWISRAEEKAAESDSKSEGGRVKQGLAGTKKLMAEKNYRTAAEMIMKEFFTLRIDEDGKPALTKNTGELILDGTARNKQGDYSKALSRVLLNDEFVLLFQRQRELCNPHTSTEFQEKILGTGDKRSGLFWAQNPALAGNDLLKMLGHCTLEKNEYRAPKASFTAERHVWLTRLNNLRIVIDGATRSLTEAERREALPMPYKQAGDLTYKQLRSVLTKAGYLPESFKFTGLLYPPGLKANEKAKDPESVALVKIPAWHELRKTLEKKGLANEWQKLSTEALEGNPKLLDDIAWVLSVYKDDIEVEAELRKLPLHSADKLVDVLLDIRFDKFSNLSLKALRQIVPLMEQGQRYDEAVANIPEYGHHSQLHKVGTGEHKYLPPFYSGRDKDGRMVFNDDMDIPRNPVVLRALNQTRKVVNALIRKYGSPHEVHIEMARDLSRPLDERREVEKLQKEYRDNNEKYKAEFASTFNIVGAVKGRELEKYQLYREQQGKCAYSIEPIDLHRLFETGYVEIDHALPYSRSFDDSKNNRVLVLARENRNKGNRTPFEYLDGHDNSERWRQFVAYVEGNKAYRLAKRSRLLRKDFGEKESKDFRERNLNDTRYICKFFKNYVEQYLQLHEDSEAKRCVVLSGQMTSFLRARWGLVKVRGDSDRHHALDAAVVAACSHGMVKRLSDYSRRKELEQVRDGFVDVDTGEILNPAMFEQIEKHFPNPWPHFRNEVEARLKLDDPALLREEMRCLGTYTEEALQAVHPLFVSRAPQRRNSGAAHKDTIYAQPERLKAQGGVTQKVALTSLTLKDMDKLVDPHRNEKLYAAIRARLEQHGGKGDKAFPASNPLHKPDSAGNPTGPIVRGVTMEIDKLSGIPIRGGIAKNDTMLRVDVFTKAGKFHLVPVYVYHAVAKELPNRAIVAFKDEAEWTLIDHSFNFCFSLHPNDFMKVQQKGKPAILGYYSSCHRGTGNINLWAHDRNQAVGKDGMIEGIGVKTALSIEKFNVDVLGNIYPAPPEERCLYPAQRSGAEHDLA

SEQ ID NO: 15987 - protein, 1095 aa, unidentified
  REGION 1..1095: note = Cas Enzyme sequence
AETAKEGESLNLARRTARLLRRRLRRRAWRLTKLARLLKREGLIADANLFKNKIEKGSPVPKSSWQLRVDALGRQLTSEEWARVIYHLCRHRGFHWVSRAEEKAAENDSKSEGGRVKRGLAGTKKLMAEKNYRTAAEMVLAEFPEAQRNKQGDYSKALSRVLLNDEFVLLFRRQREFGNPHTSTEFQEKILGTGDKKSGLFWAQNPALAGNDLLKMLGHCTFEKGEYRAPKASFTAERHVWLTRLNNLRIVVDGTTRSLTEAERREALPMPYKQAGDLTYKQLRSTLTKAGYLPESFKFTGLPYPSGLKTDEKAKDPESAVLVKIPAWHELRKTLEKKGLADEWQKMSTEALEGNPKRLDDVAWVLSVYKDDAEVEAKLRELPLPNADKLVDALLDIRFDKFSNLSIKALRQIVPFMELGQRYDEAVANIPEYGHHSQLHIAGAGEHKYLPPFYSGRDKDGRMVFNEDMDIPRNPVVLRALNQARKVVNALIKEYGSPHEVHIEMARDLTKPLRGHWNDQGKFIEGRQDILKKQEEFRDRNKKDKAKFAEFASTFNIVGSVKGKEFEKYQLYREQQGKCAYSLEPIDLHRLFETGYVEIDHALPYSRSFDDSKNNRVLVLARENRNKGNRTPFEYLDGKDNSERWRQFSGFVEGNKAYRLAKRSRLLRKDFGEKESKEFRERNLNDTRYICKFFKNYVEQYLQLHEDSDAKRCVVLSGQMTSFLRARWGLVKIRGDSDRHHALDAAVVAACTHGMVKRLSDYSRRKELGQVREGFVDVDTGEILNPAMFEQIEKHFPNPWPHFRNEVEARLKLDDPVLLREELQRLGTYSDQALEAVHPLFVSRAPQRRNSGAAHKDTIYAQPERLKAQGGVMQKIALTSLTLKDMDKLVDPHRNEKLYAAIRARLEQHGGKGDKAFPASNPLRKPDSAGNPTGPIVRGVTMVIDKLSGIPVRGGIAKNDTMLRVDVFTKAGRFHLVPVYVYHAVAKVLPDRAIVAFKDEAEWTLIDDSFGFCFSLYPNDLLQVTLKQEKWIGYYAGCDRSTGNVNLWAHDRSLVVGKDGLIRTGVKTALSIEKFNVDALGNRYPAPPEKRRDLA

SEQ ID NO: 15988 - protein, 1101 aa, unidentified
  REGION 1..1101: note = Cas Enzyme sequence
KEGESLNLARRTARLLRRRLRRRAWRLTKLARLLKREGLIADANFFKKQIPFTQSLWQLRVEALDRRLTGEEWARVIYHLCKHRGFHWISRAEAKAADSDNEGGRVKKGLAGTKRLMQEKSYRTAAEMVIHEFPDAQRNKSGDYSKALSRELLEEEAKKLFQHQRELGNPHASAELETAILGNGDKKSGLFWAQKPALAGKDLLKMLGHCTFEKEEYRAPKASFTAERHVWLTRLNNLRIVVDGKMRPLNEQERHIALPHPYIQASDLTYKQLRSALVKAGLSDSFRFVGLSYPSKRQEDTEKAKNPETEKLIKLPAWQTLRKTLKDAGLEMEWQQISVAALDGKPELLDQIAWVLSVYKDDAEVEAELRKLDLPNKAKMVDALLDVRFDKFSNLSLKALRKIVPHMETGLRYDEACEQAGYHHSQLHKVGEGEHKYLPSFYSGRDKDGKLKFNEDMDIPRNPVVLRALNQARKVVNALIKTYGSPHEVHIEMARDLSRALDERRDIEKAQKEYRERNDRDKASFASEFNIVGTVKGKDFEKWQLYREQQGKCAYSQQPLAPNGDIQRIFDAGATEIDHALPYSRSFDDSKNNRVLVLTRENRNKGNMTPYEYLDGKNNSERWRLFVAFVESNKSYRQAKRNRLLKKDFGEDESKDFMERNLNDTRYICRFFKNYVEQYLQLHADSTAKRCVVLSGQMTSFLRARWGLVKVRSDSDRHHALDAAVVAACSHGMVKRLSDYSRRKELDQVREGFVDVETGEIVNPAMFDKLEQHFPSPWPHFRDELLARLSMDSAETLRTEMARLGTYPPEALEALRPLFVSRAPQRRNSGAAHKETIYAQPESLKAQGGVTQKVAVTSLKPADVDKLIDPHRNEKLYAALRDWLQQRDEREKRAKEIEAGAGRGKDKRALTADEQAEIERLRALPRKPDKDGNPTGPIVRTVTMVIDKLSGIPIRGGIAKNDTMLRVDVFKNKKDGKFHLVPVYVHHSVARTLPGQAIIQGRDESEWTLIDDSFGFCFSLHSNDLVRVQQKGKSAILGYYSSCHRGTGSLNLWAHDRNLQVGKDGMVEGIGVKTALSLEKFNVDVLGNIYPAPPEKRRDLA

SEQ ID NO: 15989 - protein, 1149 aa, unidentified
  REGION 1..1149: note = Cas Enzyme sequence
MAGKNNNHGSLTFGLDIGIASVGWAVLGDNHIVGLGVRCFDKAETADKGESLNLARRSARLLRRRLRRRAWRLTKLARLLKREGLIADVGILKQPPAKGFKTPNLWQLRVDALDRKLDAEEWVRVLYHLVKHRGFHWMSKAEEKKADEDKEGGAVKKGLAGTKRLMQEKNYRTAAEMVIHEFPDAHRNKRGDYSKALSRLLLAEELATLFERQRALGNPHALPELEDKLLDRKTGLFWAQKPALSGEDLLKMLGKCTFEKDEYRAPKASFTVERHVWLTRLNNLRIAVDGELRPLSEGERAIALPLPYNQASDFSYKQLRKALVKAGLPEDFRFAGLSYPSERQKAEEKAKDPEDEKLVKLPGWQALGKTLKGAGLEDEWRRISVAALDGKPQLLDEIARVLSVYKEDGEVERELGKLDLPNKAKMVEALLTLRFDKFSNLSLKALYAILPHMEAGARYDEACEKAGYHHSQLFKAGEGEHKYLPPFYVGRDKAGRLKFNEELDIPRNPVVLRALNQARKVVNALVKTYGAPHEVHIEMARDLSRPFDERRDIKKAQEEFRDRNEKDRAAFNAEYNASGELKGRDFEKWQLYREQHGKCAYSLKPLDINRLFEMGYVEIDHALPYSRSFDDSKNNRVLVLTQENRDKGNMTPFEYLGGKENSERWRQFVAFVDSNKSYRQAKRNRLLKKDFGEAEAKDFRDRNLNDTRYICRFFKNYVERYLKLHEDSEAKRCTVVNGALTSLLRARWGLPSSKKKREESDRHHAMDAAVVAACGHRVVQHLSTYVRAQGWVQRKNETTGFMEYINVETGIILSTQDFVRQDEVGKLFPRPWPHFRDELVARLSIDDRQVLRAEMERLGTYPPEALEELRPLFVSRAPQRRNGGAAHKETIYAQPERLKQTGSVTQKIAVADLKPGDVDKLIDPHRNEKLYAALREWASKREEREKRAREIEKSAKEARRELTADEKADIERLRALPRKPDKHGNPTGPLVRTVTMVIDKLSGIPIRGGVAKNDTMLRVDVFAKAGKFHLVPVYVHHRVTGLPNRAIVAFKDEEEWTLVDDSFQFCFSLYPNDLVVVSTKKERLFGYYAGCDRSGGTINLWAHDRNQAIGKDGLIRGIGVKTALNVEKFNVDVLGNLYPAPPEQRRDLA

SEQ ID NO: 15990 - protein, 1477 aa, unidentified
  REGION 1..1477: note = Cas Enzyme sequence
MKTPETIWSFDLGLGSVGEAVRHGIEFPHKDSLIIPPEFAKTDAAASRRRMSRTREAHREREKWLDEIWRAAGLPVPSKRFVMPIGQYCEWPKKKKANGKLERPKIKSGKWQLVFKADYWLERESPPAHKFDRNGNPKKYKDGKAKDGAPAATKEDFETCYNSALLRIKLLRGEKLEPWQIYKAFHSAIQKRGYGSVPWTESKPATSASEGQNPQYVEAKGRWDRFVQQPDVAKLSNDYHRACYYDAFHMKLWSPEHPEHLGLWCPDSPEKHGTLKIDCSAKSTRNVVFPADTIEKEILALADAAAAQDQLPALTTTFEKLMAEFKSTRLKRVQDINTKRKEKGRKLLEEPRFHRVAKTVGEFIAFGPGGRAETKGDERPIAAFDPEIRKETGLRPGTKDDWKGVLGQKIPRFENRILNKCALIPRLHVCRNPSREGFASLPLDKLLPAQVTFLMKLKNMRVEENTPQRKQRGLRHDQIKKIFDDCDPKRKYNLTLPQWKKWCDHFGALPITIDTGKTTKVASGSTNGETSEEKKKDKDAVEAPATEGRSRFSRPALRLLRALILSGESPSSFREYLLPPTGVAYVQIAFDNEREPLAVFTNCDDPVLSRKERVVRDKENGLTGLLVSDLQFLLSMRKAGAKEDSWDDLFIPNQRLDQVVQEIGAESESENQDARRKRRDKAINELIGSQNDPVVRHRLTVFWERLRTLEKKHGTPDQIVLEFIREDFMGQKAKDKLKKFQDERGTARKESKELGGLKFELWKAQGGECVYGKPATKDGHCLYTMHALPQPGTVGWDELDIDHIVPTSAPYNGPDSSVNKVLTFPNLNREHKKNRIPYEWFHQDRPQEWDAYKRFVQSKVGMLGGKKVQLLTRADATELVSRYTSMAETAWISKLAQTLIRLHFGWPLDRERGRERITVVPGGLTGRIRRKYLLNTLLDERFKNLPTSKIQFENEEEAEKDRKDKRHHALDAMLISFFPDWMRNPQKHDFFRFPVPLDQPFPGKRNKHAVREYFKKLLDDVLPENLFLKKAKLAETAYGRSFQPEESNASGVAVKYKTTKMPLVEVAYLMPISGSAIFDYKHACRVANGIVDQEIRKQVVEFLKSRPAEADWTAFCKKVEEEIPKAKRPKSGKIEVRRIMEIRAHRDAIKEMAYEKGSSREYDLEYARGHVVEIVEDSPEQTSIKAKLREFFANNPTETQWRVFAESLKPIDRCKLRAEPDETGKKTKARPVKFQVFAHRPIPMKFNLKKAHARIDKICDEHIRQRLRAFVNQTPLPDQTSWNGFCESLAQERRDKEGNLLKDTDGNILYGAAIKKVRMNEGSPDEFRDFSKDGTGAFFKNKKEHKGYFVYLANDDSQEGVVNVRPVYVFESVQRVKSEVEALPKLKRLVGYLQSGCTVSIDQPVGVASFKIVTWTDENKKKLEAATLPLVPGKYLLKTIITDSRAVELETATGIEIKSTLKPLIKAGFRRVLKNRE

SEQ ID NO: 15991 - protein, 1442 aa, unidentified
  REGION 1..1442: note = Cas Enzyme sequence
MKNILGLDLGTNSIGWAYVKQAQNDSEKSEIVELGVRVNPLTVDEKTNFEKGKPISTNADRTLKRGARRNLQRYKLRRQELIALLKEYQVISDKTILAEDGKGTTFETLRLRAKSAKEQVSLEELARILLMINKKRGYKSSRKAKNEDEGQLIDGMEIARRLYDENLTTGQLSLQLLKEGKKSLPDYYRSDLQHELDKVWNFQKQFHPDILTDEFYSAIQGKGQKATRESFSSKYRIDTAENKGSREEKKLQAYQWRADAIHKELTKEELAFVITKINNNINNSSGYLGAISDRSKELIFANETVGEYLWKQIQNDPHTSLKNQVFYRQDYLDEFERIWKIQSEFYPQILTESLKNELRDILIFYQRKLKSQKALVSICEFESKEIPLKDKQGNPISKNGIPVTKLVGPKVAPKSSPLFQEFKIWQNFNNVLVRPKGSRKRKVTTDQQSTLLEGQEPVFELNLEQKELLFEELNLKGNLKTDYCLELIGYSAKEWEMNYPTLEGNKTNKALYEAYLKIIDSEGYDAKKLLKVKTDKDDINLDDIKVSASEIKIMISDIFNELGINTKILDFDAELERKQFEAQASYRLWHLLYSYEGDDSKSGNELLYRLLEDKFGFKREHSKTLASVSLLSDYGNLSTKAIRTIYPYIKENKFSTACELAGYRHSKLSITKEENENRTLKDTLDVLKKNSLRQPVVEKILNQMINLINELIKKHSEKDEKGNIVKYFKFDEIHIELTRELKKNAEERRELESKVRESKARNEKIITILKSEFGLPYPTKNDITRYRLYEELKDNGYKDLYTNTYIPREKLFSKEIDIEHIIPKSRLFNDSVSNKTICYRQDNLNKGERTAYDYIEGLGKTQLDEYLNRIENLYANKIITKAKYRNLLKKESEIGDGFIERDLRETQYIAKKAKEMLLQITRHVVSTTGSITDRLRYDWELVNVMRELNLPKYKALGLTEIQERKNGQTVEVITDWTKRNDHRHHAMDALTVAFTKHSHIQYLNFLNARKDEKHKEYSNIMGIQQLETEKITDKDGKDRRVFKTPIPNFRQVAKEHLEAILISHKTKNKVVTRATNKIAGSKKQQETLSPRGQLHKETVYGKYRRYVQKEEKIDSKFDLQTIERVANPLYKRLLTKRLEENGGDPKKAFTGKNALAKTPIYLDEVQTQQLPEKVKLVWLETDFSIRKDITPDNFKDEKSIDKVLDEGIKRILKGRLKSFDGDAKRAFTDLEQNPIWLNKEKGITIKRVTISGVSNAEPLHTKKDHLGNEIFDETGKPIPVDYVSTGNNHHIAIYRDENGDLHDEVVSFLEAVTRANEGLPIVDKTYNRHLGWQFLFTMKQNEMFVFPDKETGFDPQEVDLLDPKNKKLISPNLFRVQKLSKLMYDNSSVREYVFRHHLETTVEDKKELQQITYQQIKSLSPLNNIVKVRINHLGDIVHIGEY

SEQ ID NO: 15992 - protein, 1434 aa, unidentified
  REGION 1..1434: note = Cas Enzyme sequence
MKNILGLDLGTNSIGWAYVKQAQNDSEKSEIVELGVRVNPLTVDEKTNFEKGKPISTNADRTLKRGARRNLQRYKLRRQELIELLKDYQVISEKTILAEDGKGTTFETLRLRAKSAKEQVSLEELARILLMINKKRGYKSSRKAKNEEEGQLIDGMEIARRLYDENLTTGQLSLLLLKEGKKSLPDYYRSDLQHELDKVWNFQKQFHPDILTDEFYTSIQGKGQKATRESFSSKYGIDTAENKGSREEKRLQAYQWRADATHKELTKEELAFVITEINNNINNSSGYLGAISDRSKELIFANETVGEYLWKQIQNDPHTSLKNQVFYRQDYFDEFERIWETQSGFYPQILTESLKNELRDILIFYQRKLKSQKALVSICEFESKEIPLKDKQGNPISKNGIPVTKLVGPKVAPKSSPLFQEFKIWQNLNNVLVRPKGSRKRKVTTDQQSTFLEGQEPVFELNLEQKELLFEELNLKGNLKTDYCLELIGYSAKEWEMNYPTLEGNKTNKALYEAYLKIIDSEGYDAKKLLKVKTDKDDINLDDIKVSASEIKTMISDIFNELGINTKILDFDAELERKQFEAQASYRLWHLLYSYEGDDSKSGNELLYRLLEDKFGFKREHSKIIANVSLLSDYGNLSTKAIRTIYPYIKENKFSTACELAGYRHSKLSITKEENENRTLKDTLDVLKKNSLRQPVVEKILNQMINLINELIEKHSEKDEKGNIVKYFKFDEIHIELARELKKNAEERRELDSKVRESKARNEKIITILKSEFGLPYPTKNDIIRYRLYEELKDNGYKDLYTNTYIPREKLFSKEIDIEHIIPKSRLFDDSFSNKTICYRQDNLNKGERTAYDYIEGLGKTQLEEYLNRIENLYANKIITKAKYRNLLKKESEIGDGFIERDLRETQYIAKKAKEMLLQITRHVVSTTGSITDRLRDDWELVNVMRELNLPKYKALGLTEIQERKNGQTVEVITDWTKRNDHRHHAMDALTVAFTKHSHIQYLNFLNARKDEKHKEYSNIMGIQQLETEKTTDKDGKDKRVFKAPIPNFRQVAKEHLESILISHKTKNKVVTRATNKIAGSKKQQETLSPRGQLHKETVYGKYRRYVQKEEKIGSKFDLQTIERVANPLYKRLLTKRLEENGGDPKKAFTGKNALAKTPIYLDETQTQQLPEKVKLVWLETDFSIRKDITPDNFKDEKSIDKVLDEGIKRILKDRLKSFDGDAKRAFTDLEQNPIWLNKEKGIAIKRVTISGVSNAEPLHTKKDHLGNEIFDDTGKPIPVDYVSTGNNHHIAIYRDENGNLQEKAVSFFEAVTRANQGLPIVDKTYNRHLGWQFLFTMKQNEMFVFPNKETGFDPQEIDLLDPKNKKLISPNLFRVQKISTKNYFFRHHLETSVETHNALNGVTYKSQLGLNGITDIIKVRINHLGDIVHIGEY

SEQ ID NO: 15993 - protein, 1442 aa, unidentified
  REGION 1..1442: note = Cas Enzyme sequence
MKNILGLDLGTNSVGWAYVKQAQNDSEKSEIVELGVRVNPLTVDEKTNFEKGKPISTNADRTLKRGARRNLQRYKLRRQELIELLKEYQVISDKTILAEDGKGTTFETLRLRAKSAKERVSLEELARILLMINKKRGYKSSRKAKSEDEGQLIDGMEIARRLYDENLTTGQLSLQLLKEGKKSLPDYYRSDLQHELDKVWNFQKQFHPDILTDEFYTSIQGKGQKATRESFSSKYRIDTAENKGSREEKRLQAYQWRADATHKELTKEELAFVITEINNNINNSSGYLGAISDRSKELIFANETVGEYLWKQIQSDPHTSLKNQVFYRQDYFDEFERIWETQSEFYPQILTESLKNELRDILIFYQRKLKSQKALVSICEFESKEIPLKDKQGNPISKNRIPVTKLVGPKVAPKSSPLFQEFKIWQNLNNVLVRPKGSRKRKVTTDKQSTLLEGQEPVFELNLEQKELLFEELNLKGNLKTDYCLELIGYSAKEWEMNYPTLEGNKTNKSLYEAYLKIIDSEGYDVKKLLKAKTDKDDINLDDIEVSASEIKTMISDIFNELGINTKTLDFDAELERKQFEAQASYGLWHLLYSYEGDDSKSGNELLYRLLVDKFGFKREHSKTLANVSLLSDYGNLSTKAIRKIYPYIKENKFSTACELAGYRHSKLSITKEENENRTLKDTLDVLKKNSLRQPVVEKILNQMINLINELIEKHSEKDEKGNIVKYFKFDEIHIELARELKKNAEERRELDSKVREGKDRNEKIIAILKSEFGLPYPTKNDIIRYRLYEELKDNGYKDLYTNTYIPREKLFSKEIDIEHIIPKSRLFNDSFSNKTICYRQDNLNKGERTAYDYIEGLGKTQLDEYLNRVENLYVNKIITKAKYRNLLKKESEIGDGFIERDLRETQYIAKKAKEMLLQITSHVVSTTGSITDRLRDDWELVNVMRELNLPKYKALGLTEIQERKNGQTVEVITDWTKRNDHRHHAMDALTVAFTKHSHIQYLNFLNARKDEKHKEYSNIMGIQQLETEKTTDKDGKDKRVFKAPIPNFRQVAKEHLESILISHKTKNKVVTRVTNKIAGSKKQQETLSPRGQLHKETVYGKYRRYVQKEEKIGSKFDLQTIERVASPLYKRLLTKRLEENGGDPKKAFTGKNALAKSPIYLDEAQTQQLPEKVKLVWLETYFSIRKDITPDNFKDEKSIDKVLDEGIKRILKDRLKSFDGDAKRAFTDLEQNPIWLNKEKGIAIKRVTISGVSNAEPLHTKKDHLGNEIFDETGKPIPVDYVSTGNNHHIAIYRDENGDLHDEAVSFFEAVTRANQGLPIVDKTYNRHLGWQFLFTMKQNEMFVFPNKETGFDPQEIDLLDPKNKKLISPNLFRVQTISVVKYGNNVVRDFKFRHHLETTVEDKKELQQITYQQIKSLSPLNNIVKVRINHLGDIVHIGEY

SEQ ID NO: 15994 - protein, 1325 aa, unidentified
  REGION 1..1325: note = Cas Enzyme sequence
MKNFNDDYYAGFDIGTDSVGYAVADTDYNLCKFKGNAMWGVDLFEESNSAAERRIFRSARRRGLRKRNRIEWLQMLFDEEISKVDNAFYQRLKESCLYLDDKSSNVPYAVFADGNYTDKEFHTDYPTIYHLRKELIKSSQPHDIRLVYLALHHIIKHRGHFLFDNMGSDFESESSFEALFDDLKLYLKEEYEIEFECNDSLRFSEILKDKTLKKTAKSSESYKLFGYSKRNNPYETALIDLMCGRKVKFSDMFGDKSFDSEEVNGITFESGYDDNENTYRDLLQEKFELIEKAKAVYDWAILADILNGEKYISFAKVKTYEEHSSDLKMLKDFVKERCKSLYGEIFRITKDKLDNYTAYCGKYKENGRNGVIQYRTNQADFCKYLKKKFEKLDKTGYEEMFDKIENGTFMPKIVVKDNGVIPMQVNRNELKAILKNASTYLEFLNKKDENGISVSDKIVKIFEFRIPYYVGPLNNHSLKSWLVRSDEKIYPWNFDSVVDIEQSAENFINNLTSKCTYLPTKDVIPKNSILYSAFTVLNELNNLRLDGKKPDVSLKQAIFNDLFMTHKKVRRKDLLNYLKSEKGITPDITGIDGDFKSSMRSAIEMSQFNLTDSEKEDAIKAITVFGDDKKLLRKRLKRQLGSKLSDEDIMRISKLKYKDWGRLSKEFLTEVYNVDKNTGELQFNIIHALWQTNDNLMELLGSKYGFEQSRQNYLDGIQTGQSLEKMVENLYISPAVKRPVYQSLKIMHEINKIQGHAPKKIFVEMTRKDGVKGDKGRKESRKTKLVDLYKKCGEDSGELWESLEKTPDDEFKRDRLYFYYTQFGKCMYTGEPINLSELYNQNIYDVDHIFPRSKVKDDSLDNRVLVKKQVNAHKDNTYPLDSSIREKMKGFWHLLMDKGLISKKKYERLTRVTELTDSELSDFIARQIVETSQSTKAVASLFKELYPDTEIVYVKASTVSEFRHEYDFLKCREVNDFHHAKDAYLNIVVGNVYNERCTHNKSIFIEGLKTKDYSLNKMFSFNTPNAWSIDDNKSIKIVRKTMNKNNIRFTRYALTRNGGLFKMNPLKKGSGQVSLKQNSPLSDIGKYGGYDKPASSYFSFVKYEGKKGKEMRRLVAIDSYIKARYEANPEKYLSETLGLKNPVVLIPVVKYNACIEIDGFRMHISAKTGKQIIYKPAMQLTVSYDTEKYIRNVVKLNSKPENYNITELDKVSAEENVELFDILISKMTDTILKVKFGDMGVKIASHRDAFEKLDVRKQCFVLAEILKIIHSNVVTGDLTLIGEAKKAGVVYTNSVLSEIKGVKSIYLVHQSVTGLFEKKIDLLNM

SEQ ID NO: 15995 - protein, 1327 aa, unidentified
  REGION 1..1327: note = Cas Enzyme sequence
MKNFNNDYYAGFDIGTDSVGYVVADTDYNLCKFKGNAMWGVDLFEESNSAAERRTLRSARRRGLRKRNRIEWLQMLFDQEISKVDNAFFQRLKESCLYIDDKSSNVPYAVFADGNYTDKEFHTDYPTIYHLRKELIKSSQPHDIRLVYLALHHIIKHRGHFLFDNMGSDFESKSSFEALFDDLKFYLKEEYEIEFECNDSLRFSEILKDKTLKKTAKSSESYKLFGYSKRNNPYETALIDLMCGRKVKFSDMFGDKSFDSEEVNGITFESGYDDNENTYRDLLQEKFELIEKAKAVYDWAILADILNGEKYISFAKVKIYEEHNSDLKMLKDFVKERCKSLYGEIFRITKDKLDNYTAYCGKYKENGRNGVIQYRTNQADFCKYLKKKCEKLDKTGYEEMFDKIENGTFMPKIVVKDNGVIPMQVNRSELKAILKNASTYLEFLNKKDENGISVSDKIVKIFEFRIPYYVGPLNNHSLKSWLVRSDEKIYPWNFDSVVDIEQSAENFINNLTSKCTYLPTKDVIPKNSILYSAFTVLNELNNLRLDGKKPDVSLKQAIFNDLFMTHKKVRRKDLLNYLKSEKGITPDITGIDGDFKSSMRSAIEMSQFNLTDSEKEDAIKAITVFGDDKKLLRKRLKRQLGSKLSDEDIMRISKLKYKDWGRLSKEFLTEVYNVDKNTGELQFNIIHALWQTNDNLMELLGSKYGFEQSRQNYLDGIQTGQSLEKMVENLYISPAVKRPVYQSLKIMHEINKIQGHAPKKIFVEMTRKDGVKGDKGRKESRKTKLVDLYKKCGEDSGELWESLEKTPDDEFKRDRLYFYYTQFGKCMYTGEPINLSQLYNQNIYDVDHIFPRSKVKDDSLDNRVLVKKQVNAHKDNTYPLDSSIREKTKGFWHLLMDKGLISKKKYERLTRATELTDSELSDFIARQIVETSQSTKAVASLFKELYPDTEIVYVKASTVSEFRHEYDFLKCREVNDFHHAKDAYLNIVVGNVYNERCTHNKSIFIKGLQTKTYSLNKMFSFNTPNAWSIDDNKSIKIVRKTMNKNNIRFTRYALTRNGGLFKMNPLKKGSGQVSLKQNSPLSDISKYGGYDKPTSSYFSFVKYEGKKGKEMRRLVAIDSYIKARYEANPEKYLSETLGLKNPVVLIPVVKYNACIEIDGFRMHISSKSSGGKQIVYKPAMQLTVSYDTEKYIRNIVKLNSMPENYNITERDKVSADENLKLFDILTSKMTDTILKVKFGDMGVKIASHRDAFEKLDVRKQCFVLAEILKIIHCNILEGDLTFVGGAKQSGSIKMSSVISGIKGVKSIYLVHQSVTGLFEKKIDLLNM

SEQ ID NO: 15996 - protein, 1324 aa, unidentified
  REGION 1..1324: note = Cas Enzyme sequence
MKDYYVGFDIGTESVGWAVSDFYYNLCKFHGKSMWGYELFDECNTAVDRRTFRNSRKRIDRKKQRIAWLQLLFNEEISKVDIAFFQRLKESNLYLEDKSTNVPYAVFADKNYTDVDYHNAYPTIYHLRKDLIEREDPHDIRLVYLALHHLIKNRGHFLFDNLNSDYDSDSSFDFLYDDLVTYLSEEMGIVLECSDSSNVADVLKDKSKSRSVKKKELSNYFQITKKNNPQEVEIITLLCGLKGTLSTIFSDKTLDDAEKNKIVFDNSFDENEDDYIAILQDRYELIEKVKAIYDWAVLADILNGESYISFAKVKTYEEHKNDLRMLKDYVKERCFDKYDEIFRVSSDIPNYTSYSGKYKENGKTGVLARKNKATQEEFCSYLLKSFKNLDHSGYEDMFLKIENNTFMPKIVVKDNGVIPMQVNEKEVKMILNNASKYLPFLSEKDCDGISVSDKILKIFQFRIPYYVGPLNTHSDNSWLIRGKEKIYPWNFDKVVDVEKSAEAFITNLTSKCTYLFDRDVIPKNSILYSKFMVLNELNNLRLDGEKPDVQFKQDIFNDLFMHHKKVTRKSLVNYIKSKTGETPDITGIDGDFKTSMRSAIELSSYDLALEEKEMIISSITIFGDDKKLLKKRLKKNFADKLSDDDIKKISKLKYKDWGRFSKDLLTEIYDFDENTGEVKDNIINSLWNTNDNFMELLGSKYNFQKSIENANREIQNSTSIRKMVEALYVSPKIKRPIYQSLLIMKEIEKIQKSQPKKIFVEMTRSDGVKGDKGRKHSRKKRLEELYKNCKEDSGELWESLEKTPDNEFQQDKLYLYYTQFGKCMYTGESIDISDLFNQNIYDIDHIFPRSKVKDDSLDNRVLVKRTVNSHKDNDYPLDKSIRDKMKSFWYVLYSKELISKKKFERLTRSTSLTDSELSDFIARQLVETSQSTKAVADILKILYPNTEIVYVKARYASEFRKKYDMLKCRTVNDMHHAKDAYLNIVVGNVYNERFTHNRINFIKGLQTKKYSMNKMFSYDVKNAWIAEDNYSLNIVKKTMNKNNPIYRRYSFVQHGALFKVLPLKKGKGQAPLKENSPLSNINKYGGYDKPTSSYFSYVEFEGKKGKKSRQFVPIDSYLRKEYEGNPIQYLTERLGLVNPKILIPIVKYNACIEIDGFRMNISSKSNGGKTIVYKSAMLLVLGYQGELYVRNITKLLESPEDHTITEFDGVSFDENIDLFDSLVNKMCNTILKVKYSDMGKKINQKRDVFLSLDLRTQCFVLNEILKILHCNVLMGDLSKIGLAKKSGALTSNSVLTEIKNVKSIYLVNQSVTGLFEKKIDLLNM

SEQ ID NO: 15997 - protein, 1088 aa, unidentified
  REGION 1..1088: note = Cas Enzyme sequence
VITKGGVAMTYRFAFDIGTNSLGWAIFELGDRTSPEGVVEREVPIALKDLGVRLYGDGREPKSQESLASLRRIPRGARRRRDRFLQRRRYLFSLLTNYGLLPPEGKRGELFSQNPYPLRARGVTEELTLHEFGRALVHINQRRGFKSNRKAPAGDDEESGKIAIGGATLSTRLKEEGFETIGQFYASRQSARSPRDREPVRVHLRGNGANSTYDFYPLRQMFEHEFDVLWKMQASFHKELDNQQRDRIRDAIFFQRPLKPVEPGRCTFFPDQPRLSDAMPSAQAFRIYQMVNNIRLVDGRSERRLGKAERDSVVSELLAGRKLTWTQFRKLLDLPKGQQINLELGGEKHLLPDRVAFSMIGATDRNPGPLRDSWHEMTERERVVIIDKLRNAEEDEEVIAWAMAELSLDEIRSTQLARIRLPDTYRRLSAKAIDMIVDQLESDVITYAEAVNRCGFSHSDMRGDTQYKRLPYYNRLPELQRSLGKSSGNPEDPPDVRFGRIANPTVHIGLNQLRRVCNALIDRYGAPAQIVVEIARDLKQSKDQKKKTADLNRNNRDANDRRREKLTELGIVTEGERRIGEALMRMRLWEELGEDPKRCPYTGKTIPLSKLFDSEIEIEHILPFSRTLDDSPSNKTVAYREANRLKRNLSPSEAANRFPDSFDQQKILDRVRLCGMPKNKQWRFEADAMDRFENEEEFMARQLAETQYLSRMASGYLECLFPPAEQDGSRRKYVWVVPGRLTSLLRRRFGIGFNSNGRKNRDDHRHHALDAAVIGIMDRSLIQRLTRTAAKAEDEGLDRVLAELSEPFEGYRSSIMDRAEDIYVDSRARHFDVDPDPKRTTGKLHEETYYGIVQDLPENAEVLKLGNVVRRKPVTSLSVPEISLVRDGALRKQLQKAVEIDPQTRKSKLTKKEHEAALVQWSERTGVKRVRVLKKEATLLQIANRGSGIPYKAVVPSENAYLDVFENDQGRWVCHTVDSMTANAPTGVRMNDCPGRFVMRLHKGDFVQLFDSEGIVNEVKRVHRLNPSAKRVFLAGHLEGGELQKRHDSDEDLFRWDLASMERLRQRRARRVRFTPTGRMKTIPHGRV

SEQ ID NO: 15998 - protein, 1083 aa, unidentified
  REGION 1..1083: note = Cas Enzyme sequence
METALELRFAFDLGTNSIGWAVYQLGERTNSLGQKETDVPVQLVDLGANLFSDGRAPNTGESLAALRRVPRGARRRRDRYLQRRKHVLNLLQQHQFLPTDENELARILRADPYPIRATAAEREVSLYELGRALFHLSQRRGFKSNRKAPAGDEETSGKIATAAQNLQERLHKNGYLTLGQFLAARQSNPNARLRQTTRVRLSGAGVQSNYEFYPLREMVEAEFNVLWNTQSAFHAALTDEVQDVLRHAIFFQRPLAPVEPGRCTFFPDELRLSDATEAAQEFRIYQMVNNLRIIYQRSERCLSLEERDRIADVLVAGETLTWTKVRKLLGIDSSHLLNLQEGGEKELKGNRVANLMQGTKKKPGPFRDEWHTLSEIERREVIACLKEADNDEEVVAWAQTHLCCDEDKARLLAAVRLPDDYRRLSEKAVDMILDRLKTEVITYAEAVEQCGLHHSDLGGGEHYQRLPPYNKIPSLQRFLGRSTGDPDDPPDLRFGRIANPTVHIGLNQLRRTCNALIDRYGTPSQIVVELARELKQSEKQKKVTQNRIKENREKNDERRERLVELKQIEPDQKRIGETLLRLQLWDELGDLPRLCPYTGQPISITSLFSSNIEIEHILPFSRTLDNSPANKTVAFRKANRLKANLSPSEAATRHPDVIDRKAMQDRVRLSGMPANKRWRFEDDAMERYENEEQFLARQLNETQYLSRLARAFLSTLFASKDETGHGRQNVWVVPGRMTSLLRNRYAVNLGTSNRKSRDDHRHHAIDAAVIGVLDRSLIQRIASISAKREADGVDRLLADLEPPYPAFREQILNRVNTIHVSNRARHLNESPDSHHTSGKLHEETYYGIVKDLPENEEALSLGNVVRRKSVVSLTVPEISQIRDGKLRGELQKVAEIDPETRKTELTKKAVEQKLVVWSEQRGIYRIRVMKKKSTVIPIASRKTGEPYKAVVPDENAYFDIYKDNAGKWYGIAVNSFHANQKGVDSELTEGVFIMRVYKGDYLQLRDLETGFNAIKRVTQIKAASNLLVLVGANEAGNIQQRHDDDDDELRKDFANIAKLKSRAARRVRFTNAGRMKTVPHGKI

SEQ ID NO: 15999 - protein, 1083 aa, unidentified
  REGION 1..1083: note = Cas Enzyme sequence
METALGLRFAFDLGTNSIGWAVYQLGERTNSLGQKETDVPVQLVDLGANLFSDGRAPKTGESLAALRRVPRGARRRRDRYLQRRKHVLNLLQQHQFLPTDKNELARILRADPYPIRATAAEREVSMYELGRALFHLNQRRGFKSNRKAPAGDEETSGKIATAAQNLQERLHKNGYLTLGQFLAARQSNPNVRLRQTTRVRLSGAGVQSNYEFYPLREMVEAEFNVLWNTQSAFHVALTNEVQDVLRHAIFFQRPLAPVEPGRCTFFPDELRLSDATEAAQEFRIYQMVNNLRIIYQRSERCLSLEERDRIADVLVAGETLTWTKVRKLLGIDLSHLLNLQEGGEKELKGNRVASLMQGTKKKPGPFRDEWHTLSEIERREVIACLKEADNDEEVVAWAQTRLGCDEDKARLLAAVRLPDDYRRLSEKAVDMILDRLKAEVITYAEAVEQCGLHHSDLGGGEHYQRLPPYNKIPSLQRFLGRSTGDPDDPPDLRFGRIANPTVHIGLNQLRRTCNALIDRYGAPSQIVVELARELKQSEKQKKVTQNRIKENREKNDERRERLVELKQIEPDQKRIGETLLRLQLWDELGDLPRLCPYTGQPISITSLFSSNIEIEHILPFSRTVDNSPANKTVAFRKANRLKANLSPSEAATRHPDAIDRKAMQDRVRLSGMPANKRWRFEDDAMERYENEEQFLARQLNETQYLSRLARAFLSTLFASKDETGHGREHVWVVPGRMTSLLRNRYAVNLGTSNRKSRDDHRHHAIDAAVIGVLDRSLIQRIASISAKREADGVDRLLADLEPPYPAFREQILNRVNAIHVSNRARHLNESPDSHHTSGKLHEETYYGIVKDLPENEEALSLGNVVRRKPVVSLTVPEISQIRDGKLRGELQKVAEIDPETRKTELTKKAVEQKLVVWSEQRGIYRIRVMKKESTVIPIASRKTGEPYKAVVPDENAYFDIYEDNAGKWYGIAVNSFHANQRGVDSELAEGVFIMRVYKGDYLQLRDLETGFNAIKRVTQIKAASNLLVLVGANEAGNIQQRHDDDDDELRNDFANIAKLKSRAARRVRFTNAGRMKTVPHGKI

SEQ ID NO: 16000 - protein, 1052 aa, unidentified
  REGION 1..1052: note = Cas Enzyme sequence
MVGAGKRPYRLGLDVGSNSLGWFMVWLDEQGRPKELGPGGVRIYPDGRDPKSKTSNAVDRRAARGARRRRDRYLTRRARLMALLVAHGLMPEDETERKRLEALDPYELRAKALDAALPAHHVGRALFHLNQRRGFLSNRKTEKKDGETGIIREAAGKLQAAMENAGARTLGEFLYGCHRAREPVRARNRSTGAKAEYDFYPTRQMALDEFNAIWEAQAPHHPAMTPAARTAIGLAIFYQRPLTQPPVGKCSLDPALDAEDAAGFRCPWAHPLAQRFRIWQEVRNLAVAETGKKPKPLSKEEGDKIALALFQNGKLSFDKMRALLRLPPEARFNLESEKRQDLLGDETAAKLSGKSLFGKAWRSLPLWRQIDIVARLLDEQDEARLIAWLTAEAGLDQAAAARVASAFLPEGHCRLGLRAIKKILPFMESGMIYPEAAKAAGYDHAHVPTGELSPTGHLPYYGEWLQDDVLGSGDPHEAKDKRWGRFPNPTVHIGLGQLRRVVNALIREYSAPAEVAVEMTRAFKLSPEQLAKVEKEQAENQRKNDARREELGNLGQAGNSRNLLKLRLWEELNPRDPLDRRCPFSGEVINIARLLSAEVEIEHLIPFQDSWDDSAANKVVCLRSANRLKGKQTPFEAFGSSPEWSDISLRANSLPKNKRWRFQPDARRRFDAMGGFQARQLNETGWLARVAKQYLAAVADPYKIHVLPGKLTAMIRAKWGLNTLLPDHNYSDEKNRKDHRHHAIDAMVAAMTDGPLLHRMSSAYDEERDKIEVPPPWPSLRDDLDTKLKAVVVSHKPDHGVAAQLHEDTAYGAVENPEAEGGNLVYRKAFLMLNEKETERIRDARLRDLVRAHVEAEKAAGKDLKSALQSFAARTDIPGLPKGVRHVRLIKAEKPEYLITLRDKSGKPYKSYSAGKNAFVDIFETSDGQWRGEAVTIFKANQKEERPRWPSEYPSARLVMRVFKGDMIRIEHEGKEKVVTVERLEPSASRLRLAENNEAGSLQSRHEDAADPFRWIFGYYADLKEWSAEHVRVDELGRLWRVWPDEAARAAQ

SEQ ID NO: 16001 - protein, 1349 aa, unidentified
  REGION 1..1349: note = Cas Enzyme sequence
MKKILGLDLGTTSIGWAYVQEAQDDDTEKSTIINTGVRIVPLTTDEEADFKKGNTISINADRTLKRGARRGLQRFKQRRGALLGIFKKIGFIKMDYIYAEEGKETTFSSYAVRAKAAHETVSKEELVKVLLMLNKKRGYKSSRKAKTAEDGQAIDGMSIAKELYEKNITPGQWVFNHLSNGGKTVPDFYRSDLQSELESIVVHQNQFYPEVINDKLLEEIKGKSRTLTSQHFTRILKIELTENKGSREQTRLQHYKWRSQSLNIQLSLNELAFVITEINNQLNQSSGYLGAISDRSKELFFKNETVGQYLYKQLAANSHAKLKNQVFYRQDYHDEFDRIWEVQSAFYKELTDDLKHEVRDITIFYQRRLKSQKHLVSLCEFEHQHKAIPKSSPLFQEFRIWQNINAIVIKNTETKESFILHEDLKKELAESLNYNALFTDAELIAFCDLKKKEYEINFKKIEGNRTNAALYKAFENILKLEGNDALDFNNLEPEEIKKITKSVFTDLGINTTILNFNAEIPGDTFDKQPYYQLWHLLYSSDEDDKLKKILFEKFGFKEAHLPYLLNIDLQADYGSLSAKAIKKILPHLKDGHVYDKACLMAGYNHSSSLTKEENDNRPLNDRLELIKKNSLRNPVVEKIINQMINVVNAIIINPEMGKPDEIRVELARELKANNDQRSEMTRAINNATKEHDDIKKLLSAEFGIKRVTKNDIIRYRLWKETNGVSLYTGKPIETSKLFSKEYDIEHIIPKSRLFDDSFSNKTLCERQFNIDKSNRTAFSYCGEKLNEFDFAQYEARVKDLFKTGKIKYTKYKKLLMADADIPEDFIERQLRETQYIAKKATEILREVARDVTSTTGSITDRLRDDWELVEVMKELNWDKYHKLGLTREEEGKNGERLYKIKDWTKRNDHRHHAMDAITVAFTKPVYIQYLNNLNAKNKEDKKSKAIYTIEEKYLYRDKHNKLRFKQPVEQFREEAKKHLEAILISYKAKNKVVTKNKNITKIKGGTLQKIQLTPRGQLHKETVYGKLKKYATKEEKVNANFTADYIANVAKKQYREALLKRLTENGNDPKKAFTGKNALSKSPVFLDIEKTLALPEKVKLVWFENDYTIRKEITPDLKVDKVIDEGIKVILKKRLAEYGNDYKKAFVNLSENPIWLNKEKGIEIKRVTISGISNAQALHTKKDHSGKEILDKNGKPLAVDFISTGNNHHVAIYKDEKGNLQEEVVSFYEAVTRRNLGLSVINKEHEKGWEFLFSMKQNEFFIFPSSTFKPSEINLSNPENYSKISPNLFRVQKLATKNYMFRHHLETSVEEKNEVKDIAYKSIRSTSPLLNIIKIRLNHLGQIVQTGEY

SEQ ID NO: 16002 - protein, 1132 aa, unidentified
  REGION 1..1132: note = Cas Enzyme sequence
MTAISKSLELAFDVGHSSIGWAVLSVVPGDISPTVAGCGTVLFPKDDCLASERRSFRRMRRHVRSTRLRVERIKRLLAHTGVLSVEALNTVESSSPWQMAAYVLSGGGLLSWPQLWDVLRWYAHNRGYDGNRRWSSESDDEAKDTEKVTNARALYEKHGTKTMAETLCKHLGIDPLGKTAASRVRFKDLNAAFPREDVEAEVRLILTRHLGKLSGVTPELLRALIGNDSDDKHAWSAVECPSLKMRLNYFGSLLFGQLIPRFENRIIATCPISFERRYQTVLDVTGDPLRANHEAERDAKVPSKECVEFYRYRWAMQVANIRISTGEKQTRPLSKEERNALNSRIQERGFFTTGELKAAVQQITGAVTSNLTQMLLHPDAAEALILDPVRKLIHTKLDNIWPTLTPQAQKRAIGKWRRGAKIKLGTLGDWCGAERAAFDAATKRRLDGEGTRRTKKQQPLHIADVLNESFSVEPLSGRAPFHRSILREVVEFVFSTDKHPAEDGGPLFRSESLRQNQLQRAIDDQTNNHLIRNRLTLLDRLHRDVLKEYAGGDPSRVSRVTIEVNRDIREFSGKTAKDIAMDLGSRLKDFKGIVKKLENDFEGQNIRISPGLIRKARIAEDLGWRCPYTGKDYDSFALAYTRVDKDHIIPRSLKPSDGLDALVVTFPEVNKLKGNRTALRFVEEFQGQPVPGRPDLTVVTLRQYQAFVDRLDTSKGHEDDKKRKKRRKEALQLKDYVDKEFTPRDLTQTSHLVRLGAQLLERVYIPQKQKPVIASIPGSVTGAVRKSWRLIGCLAGINQSLPADSEDISKGDLRESTHMHHALDACVQALASHLLPRDGSLWEILLKRRLNAYEQQIARERLKGLAEIDSEGRLRLSDLPVAIKTQIRARLFEKRVVQHIPADQGGMACDQTVWRVFDPFDEHPSAQRLAKWFRALKIEIPAPVAETVLIVCRKRKGDLGGEGGKLLHAGKTWRWVYDLKAKSALIGLSPKDPEKSKLKQIKAVKVLGDNFGLALDPEPVVLRPIKVWEQLAELRARNGGKRPRVLRKGSLFYIPNKTGRADYRGMWVVRSIKLNQKTNGTFGLFLDMSTPDRIDCKGAGQKDVFINVSLATLMTDGLTAFHIRPLTGLVKK

SEQ ID NO: 16003 - protein, 1040 aa, unidentified
  REGION 1..1040: note = Cas Enzyme sequence
MDYILGIDMGVASIGWAAVFRDEARIDCGVRVFPAGVDNFNSAKEKHPNQDRRAARCMRRRIRRKAQRKQAIRNALQETELMPTDPHELDAWWHMDVYKLRHRAIQEKLLLTEIGRIFYHLNQRRGFLSLRKKDEAPSRTPKEKGMLEQISELQRDIDESGYKTLGNYLFHLYESHAEKVRLRNRHTRRSMIYDEFCAIWNEQNKYYPDLLNNTLRYGEIGPNPKPMAVVKPLPRSPKTLLEQFGLENIIFFQRAVYWEPASIGFCELEPDEYRSPIADRLFQRFRMLQEVNNLRVVDPSQEQVKERPLTTEERNLIVKYLERKKESDFDSIRKYLAKKLKNDDAHRLQFNLEQGGRTKISAMTTDYLLASTKAYGKDWWTLQDDLRNQIVGILYKPAVTDDDIEAALNELDIDQTIIQRLVHTHLPTGYSHLSIKALSKLLPYMEQGFIYHTQDKERSALHAAGYIRRDEVLNKARNILPAYDDEGLRLPIINSPIVIRALTELRKVVNGVIRKHGKPSRIHIEMARELKMGLNKRKEVNRENHARAEERAEARKALEKLNIIPNREAENLYLLWKAQEEKCAYSCKIIGIHQLFSGEIEIDHIYPFSRSADDSFMNKVVCLRSENRDKMNRTPYEWLAQSDPEKYDRIIQQAKHWPYPKRTRLLAEKIPEGFIQRDLNDTAWMARAAQQYLACLFDKPHHVQGTKGAHTALLRDHWQLHGLLRNDAVNLKNRDDHRHHALDAAVIALCDQNTIANLAKVHHFGLDLQPVGNNWYRVSYHDVDRNRLPEPWNGFREVLKESLNNIWVSHRPRRKISGKLHDETYYGKTPDGQLVVRKSVSNLKDKMVKNIRDSFIRTLIENHLAKGGSLQETILMPSGIPIKKVRILVKNPSIAIRDGSTHVQSAATHHLAIYKLPDGTHHFEGNTLMEVMRRLRNKEPIVRKVLPTLAEGASFLMHLCPGDSIMTTLNGHDDLFIFNTMALTSKQIWFTHHADATPGHKDRETKSSLLISCMPSSFDKKFPMARKVSILPSGEIRTAQ

SEQ ID NO: 16004 - protein, 1040 aa, unidentified; identical to SEQ ID NO: 16003
  REGION 1..1040: note = Cas Enzyme sequence

SEQ ID NO: 16005 - protein, 1129 aa, unidentified
  REGION 1..1129: note = Cas Enzyme sequence
MKYTLGLDMGVASLGWAVVSEDKQFIDSGVRIFPAGIDKFGTGKDTHLNQERRKARGARRRVTRKAKRRIMIRELLTQLGWIPSASDQLQTWENLDVYHLRSRALSEKISLPEFARIILHLNQRRGFLSLRKSEVDAAEGEDKKKLEGMLGKIESLQDAIHQKFPDPSQRTLGNHLFHLRSEEGGIHGNLLRLRNRHIRRDMLHHEFSLIWKKQSEFHPELTDELRYGTHGPQKNPTVVVKPIPRQKDRTVLQQFGLENLTFFQRRVYWPTSSIGKCELEKEELRAPIADRRFQEFRMISELNNLRLIDNSADGKPVERKLSPPEREVALAYLSSNPKPKSKTVPKHTLAELKTRLSQLPNSPAKGQITFNLEEDERDNIGGLQTDLKLAKAFGEKDWAKLSEERKNKIVEILTMPEPGATKVIQRTDDETKELLQQIPELTVPQIELLLRVSLPSGYCNFSIKALEKLLPHIRAGFNYLGKTEKDSALHLAGYKRRDEAASKTLKKLPLLTQLTNPNSDLHDANFPHVNNPLVLRSLHELRKVVNGVISKHGPPARIHLEMARDLKMSAKQRKDHAKKNNEHKKSRELAATKLEENGIAPTRDAILLYRLWEEQNKRCIYSGRIISFAQLVSGEVDIDHIYPRRANDDSYMNKVVCFEKENKEKGDRLPSEWLGEHSEKFQALAARVESLPYGKRKRLLAEKVPEGFANRDVTDTAYMTRVARHYLTYLVEKEHHIFCTKGKHTAFLRKQWGLNSLLRHDLLDLKNREDYRHHALDAIVIAACGPSLLQKISRELTFKNNWKDKTDEHGHPIRIYRLKPIAHSITPPWTSFPDDAATSLNAIWVSHRPNRKVSGPLHEETNYGPTQTSGVLVRRKAISSLKETELKKIRDPEVARAVTDYLHREKRLYRKDIGGQAFKEELDTLFSKKESLLQSDIDQIDEKKLRDSLTVKLEKKNPLQDADLGKITLPSGIPIKKARLLIANKTAIPLRDRQPKELLIPGNTHHLAIFSLGDGKYHFEPVTLLEATRRKRAKLPIIDQTSPEKFPEAEFAMSLCSGDLISTYDGDSTRLFVFSNIAATNGQMRFVEHTDARDSKSRKLFTATPGSFAKNFPDAQKVEIWPSGELRPV

SEQ ID NO: 16006 - protein, 1120 aa, unidentified
  REGION 1..1120: note = Cas Enzyme sequence
MNYTLGLDMGVASLGWAAVSEDNQFIDSGVRIFPAGIDKFGTGKDTHLNQERRKARGARRRVMRKAKRKELIREILGSFEWIPSGPLELQSWEDLDVYDLRSRGLHERISLQEFARIILHLNQRRGFLSLRKSEVDAAEGEDKKKLEGMLGAIETLQDNIDSTFPAPSDRTLGNYLYHLRGKEGGIHGNLIRLRSRHIRRDMLHHEFSLIWEEQSKHHPELTDALRYGTHGKQKNPTVVVKPIPRKKEQSLIQQFGLENLTFFQRRVYWPTSSIGKCELENDELRAPIADRRFQEFRMLSELNNLRLIDNSAEGKPAPRKLTAAEREVALSYLSSTQKPTFKALKGKISKLPNSPAVSQITFNLEEGKRDNIGGLSTELKLAKAFVQEDWARLNDDQKNQIVQILTMPEPGASKVIQRTDDETKDLLLQIPNLTEPQIESLLRVSLPSGYCNFSIKALEKLLPHIRNGFNYLGKTEKDSALHLAGYKRRDESSDRLLKKLPLLTELTNPKLAHYDPNFPHVNNPLVLRSLHELRKVVNGVIAKHGPPTHIHLEMARDLKMSAKQREDYVKRNNENKKSREIAANKLEEHGIAATRDAILLYRLWQEQNERCIYSGHTISFKHLTSGEVDIDHIYPRRANDDSYMNKVVCFRKENSDKGDRLPSEWLGETSEKFQDLTKRVETLPFGKRQRLLAESIPDGFAARDAVDTAYMTKVARHYLTYLVEKDDHIFCTKGKHTAFLRRQWGLNSLLRHDLLDLKNREDHRHHALDAIVIAACTPSLLQKISRELNFQNNWREKTTDQGKPIRIYRLKPVADGITLPWPNFAKNTEDSLNCIWVSHRPDRKVSGPLHKETNYGPTETPGVVVRRKAISALKENELEKIRDPEVARAVTQYLTREKRLHPSDFGKKLNEEIIDIFGSNESIVQTDIDQVEDLKIRDTLTKKLKAKNPLQDADLGKITLPSGIPIKKARLLIANKTAIPLRMHQPKELLIPGNTHHVAIFSLGEAKYHFAPVTLLEATRRKQAKLPIIEKHPPKEHPEAEFVMSLSAGETLLAKRDNVVQLFRFANVKATTLEIRMLTHNDARDSKGRKLFTASPGSFAKNFPEAQKVEILPNGEKRRC

SEQ ID NO: 16007 - protein, 1225 aa, unidentified
  REGION 1..1225: note = Cas Enzyme sequence
MDYTLGLDMGVASLGWATLDFDNGFIDSGVRIFPAGIDKFVTGKDTHLNQERRKARTARRRGHRKSKRKQLIRQLLADLGWIPENVTEWEQLDVYALRAKALREPVTLTEFGRIILHLNQRRGFLSLRKSEVDAVEGDDKKKLEGMLGQMDNLQDHIAKAFSDPSQRTLGNYLHHLREADGGEHGNLIRLRNRHIRRDMLHHEFSLIWAKQSRHHPELTNSLRYGTHGPRKNPTAVTRPVQRNQSESLLEQFGLENLTFFQRRVYWPTSSIGKCELEEDQLRAPIADRRFQEFRMLSELNNLRLFDHSAAGKPSERKLTEAERSVSLTYLSSTQKPTLKGLKSKISKLPDSPSVSQITFNLEQDQRDNIGGLATELKLAKALGKSEWANLSDDRKNEVVEILTMPEPGASIVIQRTDDETKALLKEIPGLTEPQIESLLRVSLPSGYCNFSIVALEKLLVHIRKGFVYQGKDDKDSALHLAGYKRRDEFSSRTLKKLPLLSELTNPKSEFHDRHFPHVNNPLVLRSLHELRKVVNGVISKHGLPARIHLEMARDLKMSAKQREDHARKNNEHKKAREIAATKLDENGIAPNRDAILLYRLWEEQNERCIYSGKTISFHQLVSGEVDIDHIYPRRANDDSYMNKVVCFAEENRQKGDRLPSEWLGESSEKFDTMAQRAQTLPYGKRKRLLAEKLPEGFAARDATDTAYMTKVARHYLTYLVAEPHQVFCTKGRHTAFLRKQWGLNSLLRHDLLDLKNREDHRHHALDAIVIAACGQSVVQKISEELTFQNKWKEKICDDGVNRRIYRLKPVADAISPPWDSFGHDAEASLGSIWVSHRPNRKVSGPLHEETNYGSTDRQGILVRRKRISTLTDAEVNKIRDREVATAVTQYIEREKRLYRSDIGGKQYQDELDKLFSGLENLVQSDIDHIEDRKLRSALTAKLKKKNPLWDAELGKIMLPSGIPIKKARLVIANKAAVVLRERQPKELIIPGNTHHLAIFSLGDGKYHFEPVTLLIVAQRMAENRRRKRSNLPQLPLIDETPPSEHPGSEFLMHLSYNDAIWCRIDEVPQLFIFKGVHSTQLTAKFVHHLDGRKNNEKDPTTGKAVSIQRTCKPNTFEKNFPDAVKVDVLPNGELRGGGKDATNELAEEGTTLSKFESPASREKGTKAKQDSLFHRRGRWGGSASLICHFVFSLLTLFDRDQAHSGDFSASRSPLSTEGATHHSSR

SEQ ID NO: 16008 - protein, 1083 aa, unidentified
  REGION 1..1083: note = Cas Enzyme sequence
MNYTLGVDMGVASIGWAVVSVKDSFLDTGVRVFPAGVDNFNSPKEKHPNQDRRSARGMRRRIRRKAQRKATLKQALQELSWVPTESTTDAPNEPSEIDLWHALPVYELRHRAVREKISLPELGRVILHLNQRRGFLSLRKSDEAAAEKESKGMLGQISELEQKIADSGLKTLGSYLFSEYQKHGLHQPIRNRDQSQQVYRHNRKMLHDEFSLIWETQQKFYPDLLTDKLRYGSEGPAKNLFKVCTPERRKKAESWLEQFGLENITFFQRRVYWPQESIGRCELEKEEPRAPVADRRFQEFRLLQEVNNIRITDNSVVGSPVERGLTPEEREEALGFLSKKDKPKIEELKKHLCKCRHLPQFPKELGNVRFNLENGGRSTISGAPTDYLMKSAKALGKEWENFSEEIKNQIIEALTLPAATDEDIRTELEKLPALTPQQVERLLGLSLPTGYGHLSIKALEKLLPHMQKGIVYMHKDEAQSAMQAAGYQRRDEQSHQSLETLPLFDDLLNSQSPAYDPNQVAINNPVVLRSLNELRKIVNALIRRYGKPSRIHLEMARDLKMSPKQRKEYEKQTRGFEKERAEAKKLLDECGLIPNRDAIQLLRLWKEQKEICPYSGKAISLAQLFSGQGEIDIDHIFPYSRSADDSMANKVVCHAHSNRSKGNQTPREWLAASDPAAYEAMLQRTKDYPANKRRRFYAEEIPEGFVNRDLNDTAWMAKAARQYLARLMSAPHLVQGTKGTYTALLRDHWELHSLLRHDGINLKNRDDHRHHALDAVVIALCDQSLIKQLVSQQKFRAQFSAAKEEGKKIYHLRHTGDKLGQPWPEFRSSVETSLNKIWVSHRAHRKVSGPLHKETNYGKTKEGLLVIRKAVTGLSEKEVEGIRDPEIKRIITDYMTANGGSVKCLKEINSENPLKMASGIPIRKVRTAIPYAHLTIRKGTAHETHVQSAATHHVAIFALGDDKYHFEPVSLYEASQRLRRKEPIVQKRYPNMPAEAEFLFHLCPGDSLMATIDGVDQLFIYKTMASTSKQVSFAYHNDGTQGNEDRETGRSLLRTCMPGTFEKNFPKARKSIILPDGRVRSAT

SEQ ID NO: 16009 - protein, 1131 aa, unidentified
  REGION 1..1131: note = Cas Enzyme sequence
MTGKQKNLGALTFGLDIGIASVGWAVLGENRIVDLGVRCFDKAETAKEGESLNLTRRSARLLRRRLRRRAWRLTKISRLFKREGLIPHISTLKIPFAQSLWQLRVDALDRPLNAEEWARVIYHLCKHRGFHWISRAEEKAAEGDSKSEGGKVKQGLAGTKKLMCEKSYRSAAEMVLAEFPEAQRNKQGDYSKALSRVILSEEFALLFKRQRELGNPHTSAEFQEKILGTGDKKSGLFWQQNPALAGAALLRMLGKCTFEKTEYRAPKASFTAERHVWLTRLNNLRIVVDGTTRSLNEAERRVALPMPYLQAGDLSYKQLGSALIKAGYLAKDSFKFTGLTYPNKQTSDEKAKDPETTVLVKIPAWQTLHKTLKDAGLESEWQQVSTDALEGRPQLLDDIAWVLSVYKEDAEVEAQLRKLALPNQDKLVQALSYVSFDKFSNLSLKALRQIVPFMEQGQRYDEAVANIPEYGHHSQLHAVGAGEHKYLPPFYSERDKTGRMVFNEDMDIPRNPVVLRALNQARKVVNALIKEYGSPHEVHIEMARDLSRPLDERREVEKLQKEFRDRNEKDKATFASEFSLIGTVKGKEFEKYQLYREQQGKCAYSIQPIDINRIFEQGYVEIDHALPYSRSFDDSKNNRVLVLARENRNKGNLTPYEYLDGKSDGERWRQFAAFVNGNKSYRLAKRSRLLRKDFGGEESKGFRERNLNDTRYICKFFKNYVEQYLQLHTDSDAKRCVVLSGQMTSFLRARWGLVKVRSDSDRHHALDAAVVAACSHSMVKRLSDYSRRKELEQVRAGFVDVDTGEILNPDMFDQIEKHFPNPWPHFRDEVKARLNIDNPALLREEMQRLGSYSEQALEAVHPLFVSRAPQRRNSGAAHKDTIYAQPERLKTQGGVTQKITLTSLTLKDLDKLVDPHRNEKLYAAIRTRLEQHGGKGDKAFPASNPLRKPDSAGNPTGPIVRGVRMEIDKLSGIPIRGGIAKNDTMLRVDVFTKANKFHLVPVYVHHAAAKVLPNRAVVAFKDEAEWTLIDDSFDFCFSLYPNDLVRVQQKGKVAILGYYSSCHRGTGSINLWAHDRNQAVGKDGMIEGIGVKIALSIEKFNVDVLGHIYPAPPEKRRLYPAQRGGAEHDLA

SEQ ID NO: 16010 - protein, 1131 aa, unidentified
  REGION 1..1131: note = Cas Enzyme sequence
MTGKQKNLGALTFGLDIGIASVGWAVLGENRIVDLGVRCFDKAETAKEGESLNLTRRSARLLRRRLRRRAWRLTKISRLFKREGLIPHISTLKIPFAQSLWQLRVDALDRPLNAEEWARVIYHLCKHRGFHWISRAEEKAAEGDSKSEGGKVKQGLAGTKKLMCEKSYRSAAEMVLAEFPEAQRNKQGDYSKALSRVILSEEFALLFKRQRELGNPHTSAEFQEKILGTGDKKSGLFWQQNPALAGAALLRMLGKCTFEKTEYRAPKASFTAERHVWLTRLNNLRIVVDGTTRSLNEAERRVALPMPYLQAGDLSYKQLGSALIKAGYLAKDSFKFTGLTYPNKQTSDEKSKDPETTVLVKLPAWQTLHKTLKDAGLESEWQQVSTGALEGRPQLLDDIAWVLSVYKEDAEVEAQLRKLALPNQDKLVQALSYVSFDKFSNLSLKALRQIVPFMEQGQRYDEAVANIPEYGHHSQLHAVGAGEHKYLPPFYSERDKTGRMVFNEDMDIPRNPVVLRALNQARKVVNALIKEYGSPHEVHIEMARDLSRPLDERREVEKLQKEFRDRNEKDKATFASEFSLIGTVKGKEFEKYQLYREQQGKCAYSIQAIDINRIFEQGYVEIDHALPYSRSFDDSKNNRVLVLARENRNKGNLTPYEYLDGKSDGERWRQFAAFVNGNKSYRLAKRSRLLRKDFGADEAKGFRERNLNDTRYICKFFKNYVEQYLQLHTDSDAKRCVVLSGQMTSFLRARWGLVKVRSDSDRHHALDAAVVAACSHSMVKRLSDYSRRKELEQVRAGFVDVDTGEILNPDMFDQIEKHFPNPWPHFRDEVKARLNIDNPALLREEMQRLGSYSEQALEAVHPLFVSRAPQRRNSGAAHKDTIYAQPERLKTQGGVTQKIALTSLTLKDLDKLVDPHRNEKLYAAIRTRLEQHGGKGDKAFPASNPLRKPDSAGNPTGPIVRGVTMEIDKLSGIPIRGGIAKNDTMLRVDVFTKAGKFHLVPVYVYHSVAKVLPNRAVVQAKDEAEWTLIDDSFSFCFSLYPNDFVRISQKGKEQIIGYYSGCDRATANLALWAHDRNQQVGKDGLVRGIGVKTALNIEKFNVDVLGNRYPAPPEQRRLYPAQRGGAEHDLA

SEQ ID NO: 16011 - protein, 1213 aa, unidentified
  REGION 1..1213: note = Cas Enzyme sequence
MKKILGLDLGVASIGWALVEEENGIVTIVALGSRIIPYDSTEGQDFVKGTGESRNAQRTKARTIRRGYDRYQLRRKFLVETLVKNKMMPNEALKNAPKMHLWKLRNKAVTENISKQELGRLLLWFNQKRGYKSGRRDINLNKKDTDYVKEVKSRFDKIKDLKVTIGQYFYEELKKNEYFRVKENVFPREAYMEEFDVICARQKEHLGLTDELISKIRNEIIYYQRPLKSQKGLVAICEFEGFWVKKDGKEFFVGPKVAPKSSPLFQLSKMWENINNIKLSSKFGEIVELTQEEKQKVFEHLDNNEKLTATDLFRILKKSKREYTITKQLEKGIQGNITKNAITKILDKNGKYKDLLRFDLNTVETDKLCYLYARDTGEILGEKRLKYTDAVVEYEPFYQLWHTIYSIDDLQECSAALQKRFGIDVETADKLAAIDFNKYAFGNKSVKAIRKILPYLMEGDRYSEAMSYAGYNHSNSLTKDENFDRKLLDKLKPIDKNSLRQPIVEKILNQMIHVVNAVIDEYGRPDEIRIELARELKQGKEERNDADKAMSKRQRENENIKKRLAEYGLRATRNNIIKWRLYEEINNQDKKLNAICIYCGQPISVTEAIKGEDVDVEHIIPKAKLFDDSQSNKTLAHRHCNSNKRDMTAYDFMKTKTQQEFSAYVERVNKLFADKIISKTKRDKLLMSEDKIPSDFIDRQLRESQYIAKKAREILQTICYNVWSTTGTITAELRHLWGWDDVIMNLQMPKYKDLGLTEIVEWVSEHGKRIHSKEVITDWTKRDDHRHHAVDALTIACTKQIFIQRFNTLSASKTREDMQWEIEKRSKQYKEKLSLLEKYIISQCPIAISDVEKAVAEVLVSFKSGKKVAVIGKRKVGKRGNKQVVQKGIVVPRGALSEASVYGKIRMIEKNKSVKYLFENSSLIFKPYIKKLVEQRLAKFEGDSKKALASLKEEPIYLDAERSKILEYGTCFKEEVVIKYSVDTNFNKTDDVIDGKTKEILQNRLNKFGGKPKEAFKDVKRGEKTLKWYEDEELEYPIHSVRCSTGLVAVVPIRKDENGNEIGFVKPGNNHHVAIYVDKEGNRLETVCTFWHAVERKKYGFPTIIKNTNEVWDKVTSMKDDTYPQSFLDQLPSYNLELELSMQQNEMFILEMEGDDIKIAIESRDYRTISEHLYRVQKLGSNDYTFRHHLETNLINSDISKMSKRYFRVQSLK

SEQ ID NO: 16012 - protein, 1433 aa, unidentified
  REGION 1..1433: note = Cas Enzyme sequence
MKKILGLDLGCNSIGWALVNEAENTEEISSIIKLGVRVNPLTVDEMQNFEKGKSITTNADRTLKRSMRRNLQRYKLRRDTLIEVLKEHGFITDSTLLSEHGNKTTFETYRLRAKAAVEEISLEKFARVLLMINKKRGYKSSRKAKGSEDGVLIDGMDVARKLYEEGLTPGELCLQILEAGKKNLPDFYRSDLLNEFDRIWNFQKQFNPELFCDTVKEEVRGKNRSQTWAILAKFFVWSEKESVWNEKEARTEERVKEYKLVGLKRDTKGNELKLENYRWRVQALSEQLNPEIVAIVLQEINGQISASSGYLGAISDRSKQLYFNRQTVGQYLMSELEKDPNVSLRNRVFYRQDYLDEFDRIWEKQAEFHEELTVELKKEIRDIIIFYQRRLKSQKGLISFCEFEKREVVVEEDGRKKNKTVGCRVIPRSHPLFQEFKIWQTLNDIEVFAWDKQSKRKKADKSSILFDNSEDALLVEGKRFLYQEEKELLAKELFVKENMKKAEVLKLLFENYQELDLNFKQIDGNHTGFALFSAYSKMIEKYGYEPVDFKKSADEIIEKLETIFTNLGWNTELLSIDLSKEDKELERQSYFRLWHLLYSFEGDNTPTGNGKLLEKIMQLCDVEKEYAVELANVSFQEDYGSLSAKAIKKILPYLKEGNQYDVACDYAGYRHSKSSLTKDEIENKILKDKLEILPKNSLRNPVVEKILNQMVNLINTLIDTYGKPDEIRVELARELKKNAKEREELTKSIARNTREHDEIRQLLRTEFGMMNVSRNDIIRYKLYEELKDNGYKTLYSNEYIPREKIFSKEIDIEHVIPQARLFDDSLSNKTLEYRAINIEKGNKTAYDFVKEKYGNDGLEKFLNRCETLFKDKRTKLRKLKMEEKDIPEGFIDRDLRNTQYISKKAFAMLNEISRRVVATTGSITDKLREDWQLVDLMKELNLPKYEKLGMVEMFEDKDGRKIKKITDWTKRNDHRHHAVDALTVAFTKDVFIQFYNNKNAAWMPASKEHANITGIKARYFENGKALAPMPLAQFRAEAKRHLENLLVSIKAKNKVITSNVNRTKNKNGENRKLQQTPRGQLHLETVYGSHRQYATKIEKVNAAFDVTKIATVSKLAYRNALLKRLEAFGNDPKKAFTGKNTLEKNPLYLDENQTEMVPEKVQTVEFETVYTIRKPIDPNLSIDKVVDVKIRSVLEKRLKEYGGDAKKAFVNLDENPIWLNEAKGISIKRVSIRGISNAQSLHEKKDKDGNLILGKEGRKIPVDFVNTGNNHHVAIYKKPVLDKVGQIVLDEEGNPKYELDEVVVSFFDAVTRANLGQPIIDKDYRRSEGWQFLFSMKQNEYFVFPNAKTGFNPKEVDLLNPENYALISPNLFRVQKFAYKNYVFRHHLETTIKDTSSTLKGITWTDFRSSKGLDKIVKVRVDHIGQIVSIGEY

SEQ ID NO: 16013 - protein, 1416 aa, unidentified
  REGION 1..1416: note = Cas Enzyme sequence
LVNEAENTEEISSIIKLGVRVNPLTVDEMQNFEKGKSITTNADRTLKRSMRRNLQRYKLRRDTLIEVLKEHGFITDSTLLSEHGNKTTFETYRLRAKAAVEEISLEKFARVLLMINKKRGYKSSRKAKGSEDGVLIDGMDVARKLYEEGLTPGELCLQILEAGKKNLPDFYRSDLQNEFDRIWNFQKQFNPELFCDAVKEEVRGKNRSQTWAILVKFFVWSEKESVWNEKEARTEERVKEYKLVGLKRDTKGNELKLENYRWRVQALSEQLNPEIVAIVLQEINGQISASSGYLGAISDRSKQLYFNRQTVGQYLMSELEKDPNVSLRNRVFYRQDYLDEFDRIWEKQAEFHEELTVELKKEIRDIIIFYQRRLKSQKGLISFCEFEKREVVVEEDGRKKNKTVGCRVIPRSHPLFQEFKIWQNLNDIEVFAWDKQSKRKKADKSSILFDNSEDALLVEGKRFLYQEEKELLAKELFVKESMKKAEVLKLLFENYQELDLNFKQIDGNHTGFALFSAYSKMIEKYGYEPVDFKKSADEIIEKLETIFTNLGWNTELLSIDLSKEDKELERQSYFRLWHLLYSFEGDNTPTGNGKLLEKIMQLCDVEKEYAVELANVSFQEDYGSLSAKAIKKILPYLKEGNQYDVACDYAGYRHSKSSLTKDEIENKILKDKLEILPKNSLRNPVVEKILNQMVNLINTLIDTYGKPDEIRVELARELKKNAKEREELTKSIARNTREHDEIRQLLRTEFGMMNVSRNDIIRYKLYEELKDNGYKTLYSNEYIPREKIFSKEIDIEHVIPQARLFDDSLSNKTLEYRAINIEKGNKTAYDFVKEKYGNDGLEKFLNRCETLFKDKRTKLRKLKMEEKDIPEGFIDRDLRNTQYISKKAFAMLNEISRRVVATTGSITDKLREDWQLVDLMKELNLPKYEKLGMVEMFEDKDGRKIKKITDWTKRNDHRHHAVDALTVAFTKDVFIQFYNNKNAAWMPASKEHANITGIKARYFENGKALAPMPLAQFRAEAKRHLENLLVSIKAKNKVITSNVNHTKKKNGENRKLQQTPRGQLHLETVYGSHRQYATKIEKVNAAFDAAKIATVSKLAYRNALLKRLEAFGNDPKKAFTGKNTLEKNPLYLDENQTEMVPEKVQTVEFETVYTIRKPIDPNLSIDKVIDVKIRSVLEKRLKEYGGDAKKAFVNLDENPIWLNEAKGISIKRVSIRGISNAQSLHEKKDKDGNLILGKEGRKIPVDFVNTGNNHHVAIYKKPVLDKVGQIVLDEEGNPKYELDEVVVSFFDAVTRANLGQPIIDKDYRRSEGWQFLFSMKQNEYFVFPNEKTGFNPKEVDLLNPENYALISPNLFRVQKFAYKNYVFRHHLETTIKDTSSTLKGITWTDFRSSKGLDKIVKVRVDHIGQIVSIGEY

SEQ ID NO: 16014 - protein, 935 aa, unidentified
  REGION 1..935: note = Cas Enzyme sequence
MKKAEVLKLLFENYQELDLNFKQIDGNHTGFALFSAYSKMIEKYGYEPVDFKKSADEIIEKLETIFTNLGWNTELLSIDLSKEDKELERQSYFRLWHLLYSFEGDNTPTGNGKLLEKIMQLCDVEKEYAVELANVSFQEDYGSLSAKAIKKILPYLKEGNQYDVACDYAGYRHSKSSLTKDEIENKILKDKLEILPKNSLRNPVVEKILNQMVNLINTLIDTYGKPDEIRVELARELKKNAKEREELTKSIARNTREHDEIRQLLRTEFGMMNVSRNDIIRYKLYEELKDNGYKTLYSNEYIPREKIFSKEIDIEHVIPQARLFDDSLSNKTLEYRAINIEKGNKTAYDFVKEKYGNDGLEKFLNRCETLFKDKRTKLRKLKMEEKDIPEGFIDRDLRNTQYISKKAFAMLNEISRRVVATTGSITDKLREDWQLVDLMKELNLPKYEKLGMVEMFEDKDGRKIKKITDWTKRNDHRHHAVDALTVAFTKDVFIQFYNNKNAAWMPASKEHANITGIKARYFENGKALAPMPLAQFRAEAKRHLENLLVSIKAKNKVITSNVNHTKKKNGENRKLQQTPRGQLHLETVYGSHRQYATKIEKVNAAFDAAKIATVSKLAYRNALLKRLEAFGNDPKKAFTGKNTLEKNPLYLDENQTEMVPEKVQTVEFETVYTIRKPIDPNLSIDKVIDVKIRSVLEKRLKEYGGDAKKAFVNLDENPIWLNEAKGISIKRVSIRGISNAQSLHEKKDKDGNLILGKEGRKIPVDFVNTGNNHHVAIYKKSVLDKVGQIVLDEEGNPKYELDEVVVSFFDAVTRANLGQPIIDKDYRRSEGWQFLFSMKQNEYFVFPNEKTGFNPKEVDLLNPENYALISPNLFRVQKFAYKNYVFRHHLETTIRDTSSTLKGITWTDFRSSKGLDKIVKVRVDHIGQIVSIGEY

SEQ ID NO: 16015 - protein, 1445 aa, unidentified
  REGION 1..1445: note = Cas Enzyme sequence
MKKILGLDLGTNSIGWALVQLGQFGKEGSIVGMGSRIIPMDGDAMQKFQSGNPVSKNADRRMARTARRLKQRFKLRRSRLIEALKTLQWLPADFPSDFKSYAENNQDKPFSISHYLPFAPSTIGEAQKALGTSNIPEDWVVYYLRKKALSEKISLNELVRIIYMMNQRRGFKSSRKDQKREDDADDIKYPLFEKWIQLLFVEDIREISEERGLKLLEIKTAEITGQIKRRNIPNWKGTTIELEVTKKTLKSGEISYSFSAPDPNDWVNKKAALEESIKNSGYYVGEYLFHQLAKDKNYRIRQRIVDRSLYIEEFRAIWQKQSEFHPELNDVSKIPDVSRVLYRHNLEKQKELNANDILYLLQNDIIYYQRPLKSQKHSIAHCKLEVKYDDQGTSYGIRVAPKSSPEFQEFRIWHTIHNLRVLKQESEVNGKTQIDVDCSSLVLSNEAKGRLYQLFDSRAKVSTSSILRELKLSEKEYRLNYASEKEFLGNETKSIFRKIFKEHGIKEAGEILLADSKKRAKLWHIIYSLDDTKNIQSTLRNPKHGFNLPESVIAHLSKIPDLPKQYAAFSSKAINKMLPLMRCGQYFDPENIGEPIKDRINKIITGEFDVNINDETRKKLSALTDIQFLQGLPTWLASYVIYGRHSEKETEGKYTVSTEMDILKLIPNNSLRNPIVEQIIKECLSLVKDIWERYGHPDEIHIELSRDLKKTAEERKKTDDQNKINEAERRRIRTILRELPYGNPDSLADIDRLKLWEETGNEIARVGAVKFSKEPTKSEIEKYKLWGEQNHISPYTGKVIPLSKLFTPEYEIEHIIPRSRYFDNSFVNKTICETYVNDFKGHRTARNLIETDGGRTVTHKGHTFTLLTPEAYYDHCKQTFRGPKHRNLMREDIPTDFIQRQLNDTRYITRKLAELLYPIAKEKEGIVFTIGQITNELKDKWGLNRVWKEILRPRFERLQEITGEQLIDLDEKTNNIHFKKDYKRVDHRHHSLDALVIACTTREHIRYLNSLNATEESSKYRYLVKTRYSDFVLPWETFTKDARRQLNEIIVSHKNRNRLVNKAINKYTKWVQKPDGRCVKELVRQEKGKLLSVRKSMFKEPFGKIHLREYSDVSIKQAIALQREFLISKTRNIAPQVADKHLRHTINEIIKNSEFDLNEADKFLKKHSIKDIEGNTITKIKILEFKEYAAKRVALDSSFTEDKIKNKIPNVEHSWLAKLLLEHLQEFNNDPTEAFRGEAMDLLTRKAGRPINKVTTYEKIGKKSNFAGKLVEADKGTNIFFAIYEHLQTKERIINEDSSVPMLDAIERLSNKWPVADDKLGYRTIILSPNDLVYVPEEAENVSIIDWTKEKDRLQRRIYKMVSCSKNTCYFIPHFISGLLLPYDSKTQKGEFGSPNKSEKSLDEIMIKNVCIKIKVDRLGNIIEANGKKIVQPALTEQRSYESVI

SEQ ID NO: 16016 - protein, 1087 aa, unidentified
  REGION 1..1087: note = Cas Enzyme sequence
MNIKDKNLHRTEAHLHVSFDVGHSSIGWAVLQTGEPLEIKGCGSVVFRTDDCLSSSRRVYRRQRRHIRSTRQRIARIKILLKHLGLMTEADLDKPGCAWPWKLAAQVLQGDELLTWPELWDVLRWYAHNRGYDGNRRWSAAETEAQTEDSEKEVKAHSLMDKYGTKSMAETFCAICGINPLDKKKSANMSGDKRPKGQNAAFPREIVECEVRQILQKHFGTLKNVDANLERVLLGRDSNDKLAWQAISCPELKLPKRYEGGLLFGQLVPRFDNRIISTCPISGQKVPSRNCPEFLNFRWAMQLANIRVGKKADRELRRLSGAECVSLNNQMHERGYLTPGQLKEAVRSVTGCERDNLETMLMHPDSKEALIVDPVQKLISSDDLHPFWMLLTERLQKRLRGKWHRGKHVSLAQIRTQLKPLGDITAFDAELQRQIDTQNTKTKKKDKPITLDELLKKTFPSRPLKMDGRAAYARHLMQRAYEDVLAGKPHPKEEGGCLFITEEIREAQINRAIADQTNNHLVRHRLVILERLLKDIVKEYADGNKTRIGNITIEVNRDLREMSGKTAKEKAQDMGLRIANHHAVATKLEKAFAEEGIRQPITAGLIRKARIAEDLGWKCPYTGQTYEPKNLITRLVDKDHIVPRSERASDSLDSLVITFSAINKWKGKRTAWQFVTEEQGKPIPDMPQLSIMSLSRYKQFVDGLETYKGHDDDKRRKKKRKELMMLLKYEEKEFTPRDLTQTSQLVRLGAQVLKRTFADCKEKPMVTSLPGSVTGAVRKAWKVLGCLSLANPQVLDENKTVKCKTDIRNITHLHHALDACVLALSAHFIPNNGRIWELIVKRNLNDSEKRELEALGVFGFNAENRFEMRDLDNRLKDQIRDRLAEKRVVQHIPARMDGLRVEQNTWGVVAKHEDGTAIIRQRIRQPNGTRPEKVTEEKTGKLLGLNPINGNGKLAKNKGALVIPDNYGVALDPQPTVIPFHKVWTRLQELKKANGNKMPRILRNGQLIRIVRGSRAGIWKVLSTKDTKAYGIALDLALPDRVKLDRGNAPIKTLIQDGLEILDCSFVGIDSSKITITEAKKRPRKPK

SEQ ID NO: 16017 - protein, 1000 aa, unidentified
  REGION 1..1000: note = Cas Enzyme sequence
MKMLLLHLGVLTENDLSSVGHAAPHALAARALAADGPSLNWQELWHVLRWYAHNRGYDGNSRWSKQEVDSDDTDKEEAALQLMAEHGTKSMAETICTMLELDEGKKKISSHIAYKTHNAAFPRDIVRGEVLEILNRHKGQLKMLDDNFINTLIASDDTKGKMAWATIAVPGIELPRRYFGGLLFGQLIPRFDNRIISKCPISGGKVPNKATLEFLRFRWAMIIANIRADGRPLSATERQLLNGKMEQKGRLTGKQLREAVESIAGTTRTNCKVYFELHPDSEEALVLDPALALFQGEGVSSKNLKPYWECLSDTTKYRAMGRWKKNRPVTLEWMLADCIKEKHDTSLLVQEIDKAFTADQKKKKASYPTRDHLLRMSFAPKSLSGRAPYSRKVMTDTVDFILSTDKHPTEKDAPLYRSKEIIKAQRDRPIDDLTNNHLLRQRLTILLRLVDDILNDYASGDSRLVSDIVVEVARDLQAYSGMTAKEMAGELTKRLSHFKSAVVYLEEHAPDLPATGSLIRKCRIAMDMDWKCPFTGKKYDVMELPRLEREHIIPYADRPTNSLDSLVLTFDWVNRLKGKRTGVEFIKQAADDDRILSISQYTQLVNGLKEAKRTTYPDDFRRQSSRKKLMLIEHYEAKDVGFTQGALTQTSHLNRLSARQLEKRFSDPMSGDCSVRITSIPGQVTAETRKGWNLLHTLDIACPECAGKNKTEIRGITHLHHALDAAVLGITQYYLPGIRSGESENEKGAIWQAMLRRRKTSSQQRLLLKTGVYASCSRIDREGKSTKETDVQLKDLSPNLKNQLAVRLAEKRVIQHIPADQSSAALEQNQWRVWGVHGDPNDPQTEVTLRQQSSEVKDGKRIIKRKETKDKAGKLVGLKPGKLSKNKAVLVIAENYGLALDPEPTIIPFHNVHERVNNLRKLNDGTIPRILRNGNLIHVGDGRYQGHWQIRSVKNNSGGLAVSLGFPHINKVYKQNVLVSSLLSAGITMLSPPLIGIAIE

SEQ ID NO: 16018 - protein, 1000 aa, unidentified
  REGION 1..1000: note = Cas Enzyme sequence
MKMLLLHLGVLTENDLSSVGHAAPHALAARALAADGPSLNWQELWHVLRWYAHNRGYDGNSRWSKQEVDSDDTDKEEAALQLMAEHGTKSMAETICTMLELDEGKKKISSHIAYKTHNAAFPRDIVRGEVLEILNRHKGQLKMLDDNFINTLIASDDTKGKMAWATIAVPGIELPRRYFGGLLFGQLIPRFDNRIISKCPISGGKVPNKATLEFLRFRWAMIIANIRADGRPLSATERQLLNGKMEQKGRLTGKQLREAVESIAGTTRTNCKVYFELHPDSEEALVLDPALALFQGEGVSSKNLKPYWECLSDTTKYRAMGRWKKNRPVTLEWMLADCIKEKHDTSLLVQEIDKAFTADQKKKKASYPTRDHLLRMSFAPKSLSGRAPYSRKVMTDTVDFILSTDKHPTEKDAPLYRSKEIIKAQRDRPIDDLTNNHLLRQRLTILLRLVDDILNDYASGDSRLVSDIVVEVARDLQAYSGMTAKEMAGELTKRLSHFKSAVVYLEEHAPDLPATGSLIRKCRIAMDMDWKCPFTGKKYDVMELPRLEREHIIPYADRPTNSLDSLVLTFDWVNRLKGKRTGVEFIKQAADDDRILSISQYTQLVNGLKEAKRTTYPDDFRRQSSRKKLMLIEHYEAKDVGFTQGALTQTSHLNRLSARQLEKRFSDPMSGDCSVRITSIPGQVTAETRKGWNLLHTLDIACPECAGKNKTEIRGITHLHHALDAAVLGITQYYLPGIRSGESENEKGAIWQAMLRRRKTSSQQRLLLKTGVYASCSRIDREGKSTKETDVQLKDLSPNLKNQLAVRLAEKRVIQHIPADQSSAALEQNQWRVWGVHGDPNDPQTEVTLRQQSSEVKDGKRIIKRKETKEKAGKLVGLKPGKLSKNKAVLVIAENYGLALDPEPTIIPFHNVHERVNNLRKLNDGTIPRILRNGNLIHVGDGRYQGHWQIRSVKNNSGGLAVSLGFPHINKVYKQNVLVSSLLSAGITMLSPPLIGIAIE

SEQ ID NO: 16019 - protein, 1069 aa, unidentified
  REGION 1..1069: note = Cas Enzyme sequence
MATSENLILSFDIGHSSIGWAVLAKTKTSPDIRGCGSVIFPKDDCLASARRGFRRSRRNIRSTRQRIARMKMLLLHLGVLTENDLSSVGHAAPHALAARALAADGPSLNWQELWHVLRWYAHNRGYDGNSRWSKQEVDSDDTDKEEAALQLMAEHGTKSMAETICTMLELDEGKKKISSHIAYKTHNAAFPRDIVRGEVLEILNRHKGQLKMLDDNFINTLIASDDTKGKMAWATIAVPGIELPRRYFGGLLFGQLIPRFDNRIISKCPISGGKVPNKATLEFLRFRWAMIIANIRADGRPLSATERQLLNGKMEQKGRLTGKQLREAVESIAGTTRTNCKVYFELHPDSEEALVLDPALALFQGEGVSSKNLKPYWECLSDTTKYRAMGRWKKNRPVTLEWMLADCIKEKHDTSLLVQEIDKAFTADQKKKKASYPTRDHLLRMSFAPKSLSGRAPYSRKVMTDTVDFILSTDKHPTEKDAPLYRSKEIIKAQRDRPIDDLTNNHLLRQRLTILLRLVDDILNDYASGDSRLVSDIVVEVARDLQAYSGMTAKEMAGELTKRLSHFKSAVVYLEEHAPDLPATGSLIRKCRIAMDMDWKCPFTGKKYDVMELPRLEREHIIPYADRPTNSLDSLVLTFDWVNRLKGKRTGVEFIKQAADDDRILSISQYTQLVNGLKEAKRTTYPDDFRRQSSRKKLMLIEHYEAKDVGFTQGALTQTSHLNRLSARQLEKRFSDPMSGDCSVRITSIPGQVTAETRKGWNLLHTLDIACPECAGKNKTEIRGITHLHHALDAAVLGITQYYLPGIRSGESENEKGAIWQAMLRRRKTSSQQRLLLKTGVYASCSRIDREGKSTKETDVQLKDLSPNLKNQLAVRLAEKRVIQHIPADQSSAALEQNQWRVWGVHGDPNDPQTEVTLRQQSSEVKDGKRIIKRKETKEKAGKLVGLKPGKLSKNKAVLVIAENYGLALDPEPTIIPFHNVHERVNNLRKLNDGTIPRILRNGNLIHVGDGRYQGHWQIRSVKNNSGGLAVSLGFPHINKVYKQNVLVSSLLSAGITMLSPPLIGIAIE

SEQ ID NO: 16020 - protein, 1080 aa, unidentified
  REGION 1..1080: note = Cas Enzyme sequence
MSIALSFDIGHSSIGWAVLKPNKDKSEILGCGAVVFPKEDCQNQQRAGFRRQRRNIAARRNRIKRLESFLTHIGALTPADVEYCRKHPHPWPWLLAAQVLVAQRTLSWKELWAIIRWYAHNRGYDGNALWAGEDSDPDDVKKVKAARKLMSDCQTSNMCETICKLMSIDPKSTENPEIKYYFKDENAAFPRDVVVAEVRKVLDQHVGILTGVSSDFIRTLLENWQITKKTGFDPKLPERYTGGLLFGQMKPRFENRIIPKCRKTDEKTPSKHSRAFYKFRWAMLMNNLRVLDEVEGGSRSLNAAERGQLNEIMKLTGYLTKTSLKKALEKDFGLEPANLDAMLLVPEMEKALTLDPALREMNGSKYKKIWQEIPESWYLVFLNQLFKGKKYHTKPPSLEQWRSRIQSKGTVSDNLDAALREAYEAECKSLSKKKQIEELPTYKAFLNRPLRITQSHLASGRSPYSRIKLKEATEAIMRGEDPRSKGGALEETSDVLERQEAVVVDEKTNNHLVRHRLKIFEKTLNDLVKHYANNDPSLIDWVSVEEVRYLVEFSGKTAKEKARIVGEKRWHHRKISKYLEKERETNKGAWDISASLIKKVRIADDMNWKCPYTGQFYSLNQILSGDVDREHIIPRSKRPTDAMHALVLTFTEINRMKGARTALKFIEETKDDSRTLTPKQFRELVNALKKKNGPSTDDEKRCTKRKIALLTRDYEPRGKVKVKGKAAEESVDGFTEGSLTQTSHINKLAIQRVKHWFDQRLRENEKKPKVTQLSGSVTAATRRSWDVLKALEAVHPEIRNKNKTEIREITHLHHALDAIIIGLAVEYFPEDGRLWTLLSKRSIQNPVDRAYMKAKLKELISFSNNGEWQLDSLNNSIMSQIVRRLGEKRVVRHNPRTTRGLRIQQNIWRIEGEDPDDPTKLLIRMKPRNEDGLKVSKQRSERKAKLFGSSPNRIEGKLKNLKGALIVEDNYGVTLDPEPKVIPYQQVWMQIEELKKQNGGKPVRILRNGDVIRVKSGKDYPGIWRIHSIKDANAGLLLDMASPEVVKAGNGITNAKMNVRLNTLIRNGLELLNLDYSFHE

SEQ ID NO: 16021 - protein, 1355 aa, unidentified
  REGION 1..1355: note = Cas Enzyme sequence
MKSIRKESQEPYYIGLNVGPTYAAYAVTNTSYNLSRFKGKDMWGVYKYDEAETAEDRRRFRQGRNSNLKEKERIRLLRSYFFDEIQKVDENFFVRLDNSFYYSEDKDIRLNGDRNVLFADKDYSDRQYMSEYPTIYHLRSELAHGSKKPDIRCLYLAVSHMMKNRGNFYTKNLEDTDKSLGEVYENICTKAAEYDIVLKMEVPAEKIMDIMINPGISGKVKATLVTQLVDATSKPALSIIKLMCGLKAKIADIFPELAESLEEDEKKLSFSFKDEDYFERADSIEKLIGENEYSLIESVKEMYDAAIIKNIIQDYRYVSDAKIASYEKHANDLEILKAELKTILSKNEYKRFFSKEEPGTYSAYVHFSNHNNQITRRKSDKGRTQEDLYHTIKKYLADADDEQAEYILDEIDKGTFLPKQRIKDNSLIPNQLYSVELKAILENASKYYDFLNSRDESGLTVSERILSLFTFTMPYFIGPVSPYNSRGWAVRKEPGKVYPWNLKDKVDMGQSAKQFIEKIIGKCNYLSGEKVLPNASLLYEKYRVLNEINSISVDGEKISVEMKQAIVNELLAGGKTVSKKKILSFLVKKGSATSDSIITGIDDKLNNSMASHRFFADIFGSLNKDNEAVAEDIILWSTIYGSSKDFVTEQILNKYPDMFDEEQLRKIHNLNCKDWGRLSRGFLNMKGLDKDNNELISVIDAMWSNNLNLMELMYDTRFDFSVRVKDKTENAVKNLFSFDYDDLNDLYATTAQRRTIWASVKIVREIVKIKGYAPESIFLDTVKSRPNDIPKESRKGKLTALYKGMKGVSADWKKKMISLIDQCDADGSLKAKNVYLYFLQMGKDMYTGEDISLEELKSPDKRKKHNIDHIYPKHFVKDESIDNLVLTNTDLNRDLSDRYPVPQDIYDNMHEFWQQLRRSGLISAEKLARLSDRNPLSDEKRASFIGKLYNQAGSSTRMMADIFKNILPKDTKVIYAKTSETNEFRHKFDFPRTTIINDDYLAKDAYLNIVVGNVWYTKFTASPIWYIKEEYRKKKSEYNLNRMYDFNVIRDDRIAWITDKTNPEAATIHTVNKVMNRNTVITITRTTQGHGGLTNATITRADKAKEGVYLPLKTSNERMSVTKYGGKTSITSAYMFLAEHTLKKSRVRTIYSLPLHLVSQIKGKKDLEKYCTDVLHLIEPVIKIAKIMLYSELIIDGYSYLLGGKAGVQYYLRNNVPMRVNAEWQKYVSKIEKYINYKSLDKDMSADKNIELYDELVDKHTNSIYSKRRNTAGDMLKKGRDTFIKLSVKEQLEVLNQIFTLTRMGTNIANLSGIGAGQHVGSITMGCNISTFDSVKLVNRSVTGLFSNEVDLLHI

SEQ ID NO: 16022 - protein, 1361 aa, unidentified
  REGION 1..1361: note = Cas Enzyme sequence
MKNEENIYLGLDIGTDSVGYAVTDDKYKIMKYHGNAAWGSTIFDAGALGADRRVFRSARRRLDRRQERIQLLQEIFANEIAKVDERFFIRLLESGLWRDDAEDRYVFFNDKEYTDVQYMREYPTIHHLICELIYNSNKHDVRLVYLACAWLVTHRGHFLSNINTENIADLVDIHNVYNGFMRFFEENEIICDWREVNVEELGRVLAANIGINEKYRNLSTVLFATRKPDKKAKEGFPYSEDAIVRLLAGGTCKLKDVYIKEEYDEFGSITLGMDDEKMTEVMADIGDDFDLIKALRSLYDWGILANILVNENNSPLISQSKVKVYEQHREDLANLKYLVHKYIPHKYNEIFREIRGDNYVAYSYHYELKNDEKMGKKADVEKFSKFLLKILEGISVDEQDKVVYDNMIERLTLRLFLPKQKNTDNRVIPHQLYEYELISILKNTKNYLPFLKEKDSDGISNEDKIISIFKFKIPYFVGPLNCNSQFAWIQRKADGKIFPWNFEDKVDFDASEQAFIQRMTNQCTYLPEESVLPKQSLYYQKFMVLNEINNIKIDGRKISVAMKQELYNEIFEKKKRVRKKDVIDFFVSNGYLEGGKEALISGLDEQIHTNLSSFHAFHRLLQNHILSVEDVESIIERASYSDDKGRVLLFLKNKYSFLTDEDIKYICKIKIKDFGRLSKKFLVDFEGMCKETGEISTVLRLMWETNNNLMELLSDKYTFANGIKENRKKYYTEQQKTLDDRLEEMYISNSVKRTIYRTLSVVKDVTKAFGVPKKIFVEMARTNNPDLKGKRTRTRQQQVIELYAKCDEEDVRELKHQMESLGEYVDNKLQSDKLFLYFIQFGKSAYSGKMIDLEKLMSGSKVYDIEHIYPQAYVKDDSIINNKVLVFSEENGAKQDIYPIKTEIRKQMSGIWTTWHHVGAVSDEKYKRLTRSTPFNEDEKYGFINRQLTETSQSTKAIAQILNEKYPETEIVYVKAGLVSDFRHEFGLYKCRSYNDLHHATDAYLNVVVGNVYNMKFNRKWFSVDSKYSIKTKTIFSHSLVCNGKTIWDKEKMLPMVLKNAKKNNAHFTKYQFMKTGGFFDQMPCKKASGLVPRKKGLDTERYGGYNKSGIMFLTPMRYKIGKKSDIIILSVELLYGKLFLKDEVFAKKYAEERLQKIIGKKADEVSFPMGMKPWKINTVLSLDGFNVCITGIGGGGKCLSAQPIMQLSLPYELVKYLKKIEKFVEKNKNNANYIYDEQYDSVSVDENIKLYDVYLDKLENSIYNKRINSPEAILKNGREKFCKLNVLEQAVTLINIQSIFGRMTGGCDLENIGGKKHSAATVNFSSNVSNWKKYYNDVRVVYQSPSGIWERRSQNILELL

SEQ ID NO: 16023 - protein, 1361 aa, unidentified
  REGION 1..1361: note = Cas Enzyme sequence
MKNEENIYLGLDIGTDSVGYAVTDDKYKIMKYHGNAAWGSTIFDAGALGADRRVFRSTRRRLDRRQERIQLLQEIFANEIVKVDERFFIRLLESGLWRADAEDRYVFFNDKEYTDVQYMRDYPTIHHLICELIYNPNKHDVRLVYLACAWLVTHRGHFLSNINTENIADLVDIHNVYNGFMRFFEENEIICDWREVNVEELGRVLAANIGINEKYRNLSTVLFATRKPDKKAKEGFPYSEDAIVRLLAGGTCKLKDVYIKEEYDEFGSITLGMDDEKMTEVMADIGDDFDLIKALRSLYDWGILANILVNENNSPLISQSKVKVYEQHREDLANLKYLVHKYIPHKYNEIFREIRGDNYVAYSYHYELKNDEKMGKKADVEKFSKFLLKILEGISVDEQDKVVYDDMIERLTLRLFLPKQKNTDNRVIPHQLYEYELKSILKNTKNYLPFLKEKDSDGISNEDKIISIFKFKIPYFVGPLNCNSQFAWIQRKADGKIFPWNFEDKVDFDASEQAFIQRMTNQCTYLPEESVLPKQSLYYQKFMVLNEINNIKIDGRKISVAMKQELYNEIFEKKKRVRKKDVIDFFVSNGYLEGGKEALISGLDEQIHTNLSSFHAFRRLLQNHILSVEDVESIIERASYSDDKGRVLLFLKNKYSFLTDEDIKYICKIKIKDFGRLSKKFLVDFEGTCKETGEISTVLRLMWETNNNLMELLSDKYTFANGIKENRKKYYTEQQKTLDDRLDEMYISNSVKRTIYRTLSVVKDVTKAFGVPKKIFVEMARTNKPDLKGKRTRTRQQQVIELYAKCDEEDVRELKHQMESLGEYVDNKLQSDKLFLYFIQFGKSAYSGKMIDLEKLMSGSKVYDIEHIYPQAYVKDDSIINNKVLVFSEENGAKQDIYPIKTEIRKQMSGIWTTWHHVGAISNEKYKRLTRSTPFNEDEKYGFINRQLTETSQSTKAIAQILNEKYPETEIVYVKAGLVSDFRHEFGLYKCRSYNDLHHATDAYLNVVVGNVYNMKFNRKWFSVDSKYSIKTKTIFSHSLVCNGKTIWDKEKMLPMVLKNAKKNNAHFTKYQFMKTGGFFDQMPCKKASGLVPRKKGLDTERYGGYNKSGIMFLTPMRYKIGKKSDIIILSVELLYGKLFLKDEVFAKKYAEERLQKIIGKKADEVSFPMGMKPWKINTVLSLDGFNVCITGIGGGGKCLSAQPIMQLSLPYELVKYLKKIEKFVEKNKNNANYIYDEQYDSVSVDENIKLYDVYLDKLENSIYNKRINSPEAILKNGREKFCKLNVLEQAVTLINIQSIFGRMTGGCDLENIGGKKHSAATVNFSSNVSNWKKYYNDVRVVYQSPSGIWERRSQNILELL

SEQ ID NO: 16024 - protein, 1140 aa, unidentified
  REGION 1..1140: note = Cas Enzyme sequence
MKNEENIYLGLDIGTDSVGYAVTDDKYKIMKYHGNAAWGSTIFDAGALGADRRVFRSARRRLDRRQERIQLLQEIFANEIAKVDERFFIRLLESGLWRDDAEDRYVFFNDKEYTDVQYMREYPTIHHLICELIYNSNKHDVRLVYLACAWLVTHRGHFLSNINTENIADLVDIHNVYNGFMRFFEENEIICDWREVNVEELGRVLAANIGINEKYRNLSTVLFATRKPDKKAKEGFPYSEDAIVRLLAGGTCKLKDVYIKEEYDEFGSITLGMDDEKMTEVMADIGDDFDLIKALRSLYDWGILANILVNENNSPLISQSKVKVYEQHREDLANLKYLVHKYIPHKYNEIFREIRGDNYVAYSYHYELKNDEKMGKKADVEKFSKFLLKILEGISVDEQDKVVYDNMIERLTLRLFLPKQKNTDNRVIPHQLYEYELISILKNTKNYLPFLKEKDSDGISNEDKIISIFKFKIPYFVGPLNCNSQFAWIQRKADGKIFPWNFEYKVDFDASEQAFIQRMTNQCTYLPEESVLPKQSLYYQKFMVLNEINNIKIDGRKISVAMKQELYNEIFEKKKRVRKKDVIDFFVSNGYLEGGKEALISGLDEQIHTNLSSFHAFHRLLQNHILSVEDVESIIERASYSDDKGRVLLFLKNKYSFLTDEDIKYICKIKIKDFGRLSKKFLVDFEGMCKETGEISTVLRLMWETNNNLMELLSDKYTFANGIKENRKKYYTEQQKTLDDRLDEMYISNSVKRTIYRTLSVVKDVTKAFGVPKKIFVEMARTNNPDLKGKRTRTRQQQVIELYAKCDEEDVRELKHQMESLGEYVDNKLQSDKLFLYFIQFGKSAYSGKMIDLEKLMSGSKVYDIEHIYPQAYVKDDSIINNKVLVFSEENGAKQDIYPIKTEIRKQMSGIWTTWHHVGAVSDEKYKRLTRSTPFNEDEKYGFINRQLTETSQSTKAIAQILNEKYPETEIVYVKAGLVSDFRHEFGLYKCRSYNDLHHATDAYLNVVVGNVYNMKFNRKWFSVDSKYSIKTKTIFSHSLVCNGKTIWDKEKMLPMVLKNAKKNNAHFTKYQFMKTGGFFDQMPCKKASGLVPRKKGLDTERYGGYNKSGIMFLTPMRYKIGKKSDIIILSVELLNGKLF

SEQ ID NO: 16025 - protein, 1095 aa, unidentified
  REGION 1..1095: note = Cas Enzyme sequence
QKNSRIENFGVRIFDSGELKNGKRRKSQVRRGFRGVRRLIRRRYFRKELLKAHLQNIGLLNEKVMREYERIKDQNVHVLKAKGVSEELSPAELYKCLIHTCNHRGYRDFYEDDETLDMEDETSVNRAAASEFEKMFKSSGCETVSLFICKHFVNEAGQIEFRNRDSRKDKYLLIRRSLLRDELRIILDKQAEYHSALTPHNIETIDKIIFSQRNFEDGPGNPDDPFRRYTGFLESLGSCPFCTGDRRGFRGTVIADVYAVVNTLSQYRFVDKETGEYCLKPDIARQLIDFLLKNASLTLSDVKRILKANNFELLKSENSDDKALTKAVRFLKLAKSSIENGGENWEDWISEEQFDIEKPSKLHKIGELLSKYQTPSYRSSKFKELGFMTPQLIKAFSGKKISGTAGAGYRYMCDAIHAFLDGDIYGNFQANKLKQISEEKNISKRSVKLLPEHIDDEDIKQNPVVFRAINETRKVLNAIIELYGSPEVIVVEVASELNSSFLERNETAKRQKENERKNDEAKRVISELLGISVEEVTGNMLDKYKLYHEQQGKCLYSGRPLGDLTEVLKDKDKRYEVDHIIPYSLILDNTLNNKALVWSNENQAKGQRTPLMYLGAEKAAAFKARVNEMRTRKENCISDRKYRYLMLESIYGTEAEDLLSQWKSRNINDTRAITKYIVSLLSKNLVFSGTSGQPVFGVKGALTSKFRRIWLGNTVWGDSDKDRTTYLSHAVDAVVLANLTPPYIEIASDNIKLQQIYRKYKSQSAAEYQDYLEKCLDKMQKYGFSREYTLHLLTKTQRVPSYLPNIASEVEIRFDDEDEERFKTNVVKFYGDALESFIVKPQMPIASIKQERKFRGEIADANPIRVVEINSEPHKIARKDIKSITKKDIDKLYTTDTTLVATLNRIFEGKDDKYTVEKYLKENNLTSFKTDSGQPVYKVSWDDGKISNFFRKEISETNFTVLGDLNYYCVEVYKDKKGNTKVWGIRYVDIRRKDKKLHVIKERMPEDYCSHVMYLFKNDYIRIYRGGEVRFEGYYKHVDNINKKRLVFSYGNYTNTRDIVIAQKDEVRKVYIDILGRLGGEVKCSAPLLSISEKE

SEQ ID NO: 16026 - protein, 1271 aa, unidentified
  REGION 1..1271: note = Cas Enzyme sequence
LQKTGESTEQHVGGWIAPYICRVDPNFFIRRSESALFSEDTQHGVRIFDGGIDDKEYYRKYPTIHHLIVDLMTADSPRDIRLIYLACAWLVANRGHFLSEASADQFGNFQKPYAEFLRCFNQNYECQSPWADSVSSETVQEIMQTRDGINQKKSAFKTRVFGGNKPSKKPEEEFPFSRDAIVSLLSGGKVSSADLFGNEAYKELDSVALSMDEENFERILTELGDDADLLRKMRAMYDCALLNITLQGKQSISEAKVTIYEQHKRDLIFLKYFIRKYCRKDYSKVFRDATKDNYVAYSGNVKSCKEADRGTRSDKNAFCDFVKRLVKDIQPEKEDQAKYADMMDRLTQYTFLPKQKDSDNRVIPHQLYAYELDQILDHASNYLTMLGKADADGITNADKIRAIFRFRIPYYVGPLNQSSPFAWLKRKPDKIYPWNFEKIVDLDRSEQNFIQRMTNTCTYLPGEDVLPYCSLLYSRYMVLNEINDLKINRQPIPVQLKQEIYQALFVDSGKKVTKKTISGYLKSHGYIGADDEISGVDDTIKANLKPYHSFRAMLSAGTLSEEQVEDIILHAAYSEDKSRMNRWLENHYPALSEDDRKYILRLRLKEFGRLSGRLLTEIMGAAVNGSGEAMSIMDALWQTNDNLMQLLSSRYTFRDQIRDFAADYYSEPSRKSPLSQRLDDMYVSNSVKRQIIRSLDICTDVVKAMGCAPERIFVEMARGATESQKGKRTKSRKQQLLDLYKQVKHEDAPELLAELEAMGDEANSRLQSDKLFLYYLQLGKCAYTGQAIDLSQLLSKTYDIDHIYPQSKVQDDSILNNKVLCLSTENGEKGDHFPIKHEIREQMQPFWNQLKNIGLITEEKYHRLTRNTGFTDDELRQFINRQLVETRQSTRVVTQLLQERYPNAEIVYVKAGLVSRFRQEFDMLKCRSVNDLHHAKDAYLNVVVGNVYHEKFTRRWFDVHQDYSLNVRPLFTHPVVSGGAAVWSGEDDLAKVRKVMGKNAVHITQYAFCRHSGQNGGFFDQQPKKAQEGLIPRKKNLPAEKYGGYNGATTSFFVLVRYSQGKKRELMFFPVDLMCSSRFLTDDLLAVEHIAKTLKDNGKNVSNIEFPLGKRILKTNTVLSLDGFLCCLSSGSIKDGRVGFLPLTQFVCSYETERYIKYLERVCEKRKFYPHYSISEERDHVSVQENMKLYDLYISKIEDSIFSKRPGVSAENLMSKKAAFAKLPIDIQCSALLKMQMLFARQPNPIDLSDLDLSKNAFKARRSMYISGWKN

SEQ ID NO: 16027 - protein, 1227 aa, unidentified
  REGION 1..1227: note = Cas Enzyme sequence
MTADSPRDIRLIYLACAWLVANRGHFLSEASADQFGNFQKPYAEFLRCFNQNYECQSPWADSVSSETVQEIMQTRDGINQKKSAFKTRVFGGNKPSKKPEEEFPFSRDAIVSLLSGGKVSSADLFGNEAYKELDSVALSMDEENFERILTELGDDADLLRKMRAMYDCALLNITLQGKQSISEAKVAIYEQHKRDLIFLKYFIRKYCRKDYSKVFRDATKDNYVAYSGNVKSCKEADRGTRSDKNAFCDFVKRLVKDIQPEKEDQAKYADMMDRLTQYTFLPKQKDSDNRVIPHQLYAYELDQILDHASNYLTMLGKADADGITNADKIRAIFRFRIPYYVGPLNQSSPFAWLKRKPDKIYPWNFEKIVDLDRSEQNFIQRMTNTCTYLPGEDVLPYCSLLYSRYMVLNEINDLKINRQPIPVQLKQEIYQALFVDSGKKVTKKTISGYLKSHGYIGADDEISGVDDTIKANLKPYHSFRAMLSAGTLSEEQVEDIILHAAYSEDKSRMNRWLENHYPALSEDDRKYILRLRLKEFGRLSGRLLTEIIGAAVNGSGEAMSIMDALWQTNDNLMQLLSSRYTFRDQIRDFAADYYSEPSRKSPLSQRLDDMYVSNSVKRQIIRSLDICTDVVKAMGCAPERIFVEMARGATESQKGKRTKSRKQQLLDLYKQVKHEDAPELLAELEAMGDEANSRLQSDKLFLYYLQLGKCAYTGQAIDLSQLLSKTYDIDHIYPQSKVQDDSILNNKVLCLSTENGEKGDHFPIKHEIREQMQPFWNQLKNIGLITEEKYHRLTRNTGFTDDELRQFINRQLVETRQSTRVVTQLLQERYPNAEIVYVKAGLVSRFRQEFDMLKCRSVNDLHHAKDAYLNLVVGNVYHEKFTRRWFDVHQDYSLNVRPLFTHPVVSGGAAVWNGEDDLAKVRKVMGKNAVHITQYAFCRHSGQNGGFFDQQPKKAQEGLIPRKKNLPAEKYGGYNGATTSFFVLVRYSQGKKRELMFFPVDLMCSSRFLTDDLLAVEHIAKTLKDNGKNVSNIEFPLGKRILMTNTVLSLDGFLCCLSSGSIKDGRVGFLPLTQFVCSYETERYIKYLERVCEKRKFYPHYSISEEHDHVSVQENMKLYDLYISKIEDSIFSKRPGVSAENLMSKKAAFAKLPIDIQCSALLKMQMLFARQPNPIDLSDLDLSKNAFKARRSMYLSGWKKEYTDIRIVDMSASGLFESRSGNLLELL

SEQ ID NO: 16028 - protein, 1313 aa, unidentified
  REGION 1..1313: note = Cas Enzyme sequence
MNESFRLGIDFGYAYTGIALLNSGNKVLDYKVLKHRNDLSDALEKRRSIRGQRRRKLSKTRRLRDFYALLKGMGIEPRHAKPKEKSSWKEKASLGNRLYALAHYRGWDYASLLEMLISWQDEDKSPSQPPIVKEIDNILIQEFGAPVEFKERQKGRGETEAEYKKSKEDAWKEFNKNSRFREDQRFSSNAARFVCIKGERTCLGELWQMAKEVHALRKKLERSPTAEIENRLTEREGEYRSLLSRLKESGVEEIVNWIEERLALVYESASLESDMREQIVLRIMTMLGLRTGERLFEEGKIYRPHRNRHRDEMLGDLQRMMKVACGLTEDSDFQECLDETFLRLKKSNLNANKEVLFREEVEQDWRQSIEAVHQKAGEIARKTGSSPEKVKEKWVKASQKIVNRAYRKKRFENRNSMGKCPAKIDDGCRCNRNVPKKHKENIRKLQFEIELRQMNVKRHGEDIEKLSEGEVKEIMTKLIFKKKPEGEAIRKNSETIKGFFTGKKGNRYVPPAENESRGKKEILKDIACGEQSGRAGFCIHHLQEKLQLLKDGETQGEKWKRLHEERILTLRDDAPPSIRQKVQKVIGVVRQMLREQGVSDINNPPIEHVGIETARFDINLLAQDEGKRLKKKLKPKRYQQSAGGDKPSLIEDQGGRCIFCGDLLFADAHIDHLFPKGKGGGNIALNKVVGHSICNINKHKKAVPLSGEVLDSIKEKNRNKYDFIRRRLETDGRLPQDMLDAPQHTMFGAKLLQGAFADEFNLTSQEIRKIRAADASYLRRFWFPFMNRQKQALRQRFGFKAEAGKEWQVDIEKLKLDQELFSGKLEISRLNKGENWLEINKRNGKAVILGIPKPAEAGGNQFLIKDNNSNQLVMEVERIVEEERKLLDRFTMKLGQPMKLPLKDIFSRDKGIKELLKSSDVAVQVEFWKKDKDLERDWLRVEEGELVGTPAIYLRDNLRSYVPWCDMRITNKATGEVLDKVEIKNYIAERVLHVTVEPEKDDPIREFHHAIDAVVLAADVDWEGMNRLHKDTREWNYRERKRANEQARKENAPVFGGSMRQDKKGNLLAPERSSSWYIEDKRKQDSPESSWTDLEPLRIAGASVIQRKPMDSISKKNIKNIQSDEIKKAMSEAWEEIDSMEESEKKKVVSGSGNDQTISQYYFLSLDENHILNPQRTRSVLCKVEGAGPRQMFFHKDRKTGGHHKFKRAVPWQKVEVIRYKDNRGREKVSAVRFASQFYWKDKGKPQYERNEVDQELPRKYETLAIFRRGDLVEVTGKNGKWKIAKLGESATISNAETQEEATSSYRKLTKVG

SEQ ID NO: 16029 - protein, 1313 aa, unidentified
  REGION 1..1313: note = Cas Enzyme sequence
MNESFRLGIDFGYAYTGIALLNSGNKVLDYKVLKHRNDLSDALEKRRSIRGQRRRKLSKTRRLRDFYALLKGMGIEPRHAKPGEKSSWKEKASLGNRLYALAHYRGWDYASLLEMLISWQDEDKSPSQPPIVKEIDNILIQEFGAPVEFKERQKGRGETEAEYKKSKEDAWKEFNKNSRFREDQRFSSNAARFVCIKGERTCLGELWQMAKEVHTLRKKLERSPTAEIENRLTEREEEYRSLMSRLKESGVEEIESWIEGRLGLVYESAPLESDMREQIVLRIMTMLGLRTGERLFEEGKIYRPHRNRHRDEMLGDLQRMMKVACGLTEDSDFQECLDETFLRLEKSNLNANKKVLFREEVEQDWRQSIEAVHQKAGEIARKTGSSPEKVKEKWVKASQKIVNRAYRKKRFENRNSMGKCPAKIDDGYRCNRNVPKKHKENIRKLQFEIELRQMNVKRHGEDIEKLGEGEVKEIMTKLIFKKKPEGEAIRKNSETIKGFFTDKKGNRYVPPAENESRGKKEILKDIACGEQSGRAGFCIRHLQEKLQLLKDGETQGEKWKRLHEERILTLRDDAPPSIRQKVQKVVGVVRQMLREQGVSDINNPPIEHVGIETARFDINLLAQDEGKRLKKKLKPKRYQQSAGGDKPSLIEDQGGRCIFCGDLLFADAHIDHLFPKGKGGGNIALNKVVGHSICNINKHKKAVPLSGEVLDSIKEKNRNKYDFIRRRLEADGRLPQDMLDAPQHTMFGAKLLQGAFADEFNLTSQEIRKIRAADASYLRRFWFPFMNRQKQALRQRFGFKAEAGKEWKDDSEELRLDQELFSGKLEISRLNKGENWLEINKKNGKAVILGIPKPAEAGGNQFLIKDNNSNQLVMEVERIVEEERKLLDRFIMKLGQPMKLPLKDIFSRDKGIKELLKSSDVAVQVEFWKKDKDLERDWLRVEEGELVGTPAIYLRDNRRSYVPWCDMRITNKATGEVLDKVEIKNYIAERVLHVTVEPEKDDPIREFHHAIDAVVLAADVDWEGMNRLHKDTREWNYRERKRANEQARKENAPVFGGSMRQDKKGNLLAPERSSSWYIEDKRKQDSPESSWTDLEPLRIAGASVIQRKPMDSISKKNIKNIQSDEIKKAMSEAWEEIDSMEESEKKKVVSGSGNDQTISQYYFLSLDENHILNPQRARSVLCKVEGAGPSQMFFHKDRKTGGHHKFKRAVPWQKVEVIRYKDNRGREKVSAVRFASQYYWKDKGKPQYERNEVDQELPRKYETLAIFRRGDLVEVTGKNGKWKIAKLGESATISNAETQEEATSSYRKLTKVG

SEQ ID NO: 16030 - protein, 1313 aa, unidentified; identical to SEQ ID NO: 16028
  REGION 1..1313: note = Cas Enzyme sequence

SEQ ID NO: 16031 - protein, 957 aa, unidentified
  REGION 1..957: note = Cas Enzyme sequence
MADQINNPKYGPKLAERIKEFNSAFKLGIDLGTKEGGIALVKDNQVLVARTFLDFHKENLKDRRAHRRNRRSRLAKKRRVAILRSWLLRQKVNGKQLPDPYKIKDISLFKRANAKNWIDAVISGQDTSPEAFVRALTMVFKKRGQSYEEMAKQIEDMTYRELKDYINSLGSITEEEYNALSEEIKYRNESSENPSEKNRYASLLESLKTKLSNKENIKNRGEREKELEQIVTTFCKANNVYESGKWISQLKSLLNKPIRKARFMNRIVIRCNVCDRPTPKKSRPDIRELLYTDAIRNFLRAGRIDPNEEVINYYKTLYEKAAEIRKSIIKKAPLTEEQKKLKKELSKQLRKYINKDYRASAQKKMLEQIKVLMFEKLSGRSRYCIEHLKARANGEDVEAGYHGRVQKRHDMNIAQKNHDKRVINLIEYMLFRRDESLAKELKDKGIMYITIEAPEPDTKKAKKGETTERDERNIKEKLLDEQFDVDEQRFICIYTGQELAKARLNEYEKDHIFPESRDGPSIRDNLVITTKEINKEKGDRTPWEWLHEDPVKWQEFENRVMRLYRSGKITERKKELLLNEGSEFPMDNPTELARAGARVNNFIADLNELLKKHGLPEAQTLFENGKPIVQVVRGSETQRLRRQWNTIDSSFIPLKDRAVSFNHAEDAAIAASMPPTFWRSQIYRYTWHFTPNKERPDFALPDIAPHWEDFIAKRNSPIIAVLGKTKYSWKNSIFDDTLYKSYNDRAFFKEIYKQTSNGSNKPMPINEHKMDPDYKYYHVKVDNTRFLIKSQKGGSLITIKPKHTLWPRQIQVNPTYQSLVLTKEDKGKIVPHYMPISPIISMYKQGIIMDMDEKLKHALSDKIRYEDNKRELHVHDIIYLPATKRHREGYFLVTKLGKSGVKVVPEDKLKIRDAKQNSKDLDSESEKNKSKNENVEIGLNKEDLSYLYNNLDSMHIK

SEQ ID NO: 16032 - protein, 967 aa, unidentified
  REGION 1..967: note = Cas Enzyme sequence
MAGQINNPKYGPKLAERIKEFNSAFKLGIDLGTKEGGIALVKDNQVLFAKTFLDFHKEDLKDRRTHRRNRRSRLAKKRRVAILRSWLLRQKVNGKQLPDPYKIKDIPLFKRANGAKNWIDAVISKQDTSPEAFVRALATVFKKRGQSYEEMAKQIEDMTYRELKDYINSLGSITEEEYNALSEEIKYRNESSEKSNEKNRYASLLESLKTKLSNKGDVKNRREREKELEQIVKTFCGANNVHESDKWIGQLKLLLNKPIRKARFMNRIVIRCNVCDKPTPKKSRQNIRELLYMDAIRNFLRAGRIDPNEEVINHYKTLYEKAAEIRKSIIKKVPLTDEQKKLKKELSKQLKKHINKDYRTDAQKKMLEQIKVLMFEKLSGRSRYCTEHLKARAKGEDVEAGYHGHIQKRHDMNIAQKNHDKRVINLIEYMLFRRDESLARELKDKGIMYITIEAPEPDTKRAKKGEVTKRDERNIKEKLLDEQFDVDGKRFICIYTGEGLSKARLNEYEKDHIFPESRDGPSIRENLVLTTKEINKEKGDRTPWEWLHEDPVKWQEFKNRVMRLYSSGKITERKKELLLNESPEFPMDNPTELARAGARVNNFIVDLNELLKKHSLPEAQTLFENDKPIVQVVRGSETQLLRRQWNAIDPRFIPLKDRAVSFNHAEDAAISASMPPTFWRSQIYRYTWHFTPNKERPDFVLPNIAPHWEDFITKRNSPIIAALGKTKYSWKNSGNIFDDTLYKEYNDRAFFKEIYKQPKEDGKDTGNQPTKPIPINEHKMDPNYKYYHIKVDNKRFLLKSQKGGSLITIKPKHTLWPRQIQVNPAYRSLVLTKEDKGKIALHYIPISPITSMYKQGIILDIDERLKRALSDKIRHEGPKRELRVHDIIYLPATKRHGEGYFLVTKLGKSGVKAVPEDRLKIRYTKQNGKDLDSESEKDKAKDEKVEIGLNKEDLLYLYNNPDSIHIR

SEQ ID NO: 16033 - protein, 964 aa, unidentified
  REGION 1..964: note = Cas Enzyme sequence
INNSKYSSKLAERIREFNSAFKLGVDLGTKEGGIALVKDNQVLFAKTFLDFHKKKLKERRTHRRNRRSRLAKKRRVALLRSWLLRQKVNGKQLPDPYKIKDTPLFKRTNAKNWIDAVVSKQDTSPEAFVKALTTVFRKRGQSYKEVAKRIEDMDYRELKDYINSLGSITEEEFNALSEEIKYRNESSETSSEKNRYAGLVDILETKLSNKENIKNRRKREEELEQVVKIFCKANNVDESDKWISQLKSLLNKPIRKVRFTNRIVIRCNICDRPTPKKSRPDIRELLYMDAIRNFLRAGRVDPNEEAINYYKTLYKKAAEIRKSIIKKVPLTEEQKKLKKELSKQLKKYINKDYRASAQKKMLEQIKVLMFEKLSGRSRYCTEHLKARANGEDVEAGYHGHVQKRHDMNIAQKNHDKRVINLIEYMLFRRDESLAKELKNKGIMCITIEAPEPDTKKAKKRETTKRDERNIKEKLLDEQFDVEGQRFICIYTGQELSKDRLNEYEKDHIFPESRDGPSIRDNLVITTKEINKEKGDRTPWGWLHDDPVKWQEFKNRVMHLYVSGKITERKKELLLYEGSEFLGDNPTELARAGARVNNFIADLNEMLKKHGLPEAQTLFEKGKPIVQIVRGSETQRLRRQWHAIDPSFIPLKDRTVSFNHAEDAVIAASMPPTSWRSQIYRYTWYFTPSKERSDFALPDIAPHWDDFIAKRNSPIIAVLGKTKYSWKNSGSIFDDTLYKKYNSSAFFKEIYKQLPPKENDDDKINQQTKPILTNDHYMKSNYKYYHVKVDNKRFLIKSHKGGSLITIKPKHTLWPRQIQVNPTYGSVVLTKRDKGEIEPHYTPISPIMSMYKQGIILDMDERLKRALSDKMRYEGPKKELRVHDIIYLPATKHHGEGYFLVTKLGRSGVKVVPEDKLKIRYTKQNSEDLGSESEKDKAKDKSAEIELNKEDLLYLYNNPDSIRIK

SEQ ID NO: 16034 - protein, 1360 aa, unidentified
  REGION 1..1360: note = Cas Enzyme sequence
MEKQKNTKKYYIGLDIGTDSVGYAVTDENYNLLKHRGEPMWGVTVFDATIQGQERRSFRTARRRLDRRQHRVALTEELLAPYIVPQDRDFFKRIHQSALIKDEVDNSYLFDSIEKTKEYYKKYPTIHHLLCALMNGTAENDTRLLYIACAWLVAHRGHFLSEVDKEKIDAVTDFHSVYFDFCNFFENNDSPVPWDANCVESNFESVMKQKLGMNKKLKLLKEAVFKNGKIPQNDEDCIVSWEHALKLICGGKVKLADLFSNDSYSEFGSLSLDSDDETIAQAVADVDSDGEILVKLKMLYDWSVLVDALKGKNSISEGKVEVYNQHKKDLAMLKMLVHKYLPTKYKDIFDATDNPLNYAAYTYHSTKGKVNKKASKTDFCDYIKKLFKEVKIDSDDVAAFEDMSSRLETESFMPKQRDGDNRVIPYQLYWYELKTILDKSSEKFPFLNTKDDDGISIAEKLLSVFEFRVPYYVGPLRNDGNNKNAWMERKATGKIYPWNFDKIVDLDKSENAFIEKMLGRCTYLSGESVLPKNSLLYSSFTVLNEINNLKINNEPISVEIKQEIYSEIFMNPTNRRVSLKKIQNYLLSRGYIEKTDTLSGADINLTSTLNPYHLFRRLLEKNILSENEVEEIITRSTYTEDRNRFEKWLRENYSKLCDDDIKYVRSLKLKDFGRLSKKLLCDMFGCPDDETGEARSVIRAMWDTNLNINQLILSDNYTYKAQIEAFNHDYYSRHPKSLNDRLDDMYISNAVKRPIIRTLDILKDITKVMRSAPEAVFVEMARGTNEDLKGKRTQSRLAQVKTLYEKIDKEEVRLLSQQLDSLGETAENRLQSDKIFLYFMQLGKCLYTGKTITFESVLKGDGTYNIEHIYPRCHVKDDSIINNKILVDSKANEAKGDSYPIAAEIQADRAGLWKYLHDSELISDEKYKRLTRKTRFTDEEKNGFINRQLVETRQSTKAVATILKEKYPDTEICYVKAGLVSDFRQQFSMLKSRAINDLHHAKDAYLNIVVGNVYYSYFNKNYFRLDDDYNLKTEIMFSREVKCGSRVVWEGGKSVDMVRRNVAKNTAHLTKYAFCRKGGFFDQMPLKANEGLIPLKKGMPTEIYGGYNKPTASFFVLVKYKTAKKEDIMVMPVELLYADKFIANEDFAKEYSLKTVESIIGKKTESVEFLLNKRILKVNTMLSLDGLRVCLTGKSGGGSKIMTMIMSSFKSTYENENYIKKLESFTNKKRNNDNIVYDIRYDIISKEKNEEIYCHFIEKFQRWPYNKRPANPVNTLTKAKEEFLKLDVSTQADVLLRILGLFGRINNADLKIIGGSGATGVATLSTSMSNWRKSYTDVRIIDTSASGLFETQSENLLDLL

SEQ ID NO: 16035 - protein, 945 aa, unidentified
  REGION 1..945: note = Cas Enzyme sequence
MMFVPPKLRDRIAEFLETYRLGIDFGEAAGGIALVHRNDILDAETFIDFHETTLEQKRTLRRGRRSRHSKKMRLARLRSWVLRQKVEGKQLPDLYRIMREHRYQTKPGMYQQKGKDPVSSPTWIDAAKAGAVDAEGFVCALTHLFQKRGYKWDDRGLKEMSDAEIKEFLLSSRIPSDDLQSQVSAEIERRAEYPDDPARGRTKVSPEELRSLSAEARKRERQPRKAEHRSIKEQDLRAVVVGFGKSAGLAPEVIARWQKELVQILNKTLRQARFENRLKTGCAWCGKATPRKTKVRDIAYRAAVHNLRAREGFRHRPLSVGELKVFWDWWENREGAPGVEKIKRHLKKLGAQDKMARQLYDLLKGKAEGRASLCRQCLGMAQLGRTMKDAGVDWQTISVRKAPNPCREQHDVRVLRRVERILFVDGKRGNDAWRRGPISYITLEVPRVVTTDLKKGEMAERVTMTLRERLHQEVGGRCVYCEAEITPEGMQIDHIFPESRGGPDLRDVNLVAACSACNDSKTGKRNQTPHEWFGADTARWAKFDKRVESLPFPIRKRELPLSESAEFPDNPTPLAHAGARPRQFIVELRKLFARYGVGEPTIFLKTGHPHVQRVEGDRTTRLRRSWMLKADEKTPNFPPKNRTDLANHAQDAALLAACPPHTWRDHIFCYGARRPSNHPDKKGQMVWMGGLALPELAPDWAAFERNRQNPLLRVLGRERLSWKRSFADQTFWQEPDDVEASKLKKHKPIVELTPESVKAVVQIEARERFEKLAAETNLKSKHSVPEDKIKSAFGQMRRVTVTSQKGGAIIQVKPHDGPLRKEQVKPGSRAVLIWQNRKGKIDLTIEAHPSIAHFVTRAEESRPPEGALLLARWERHKLVWLPAQGGHPAGFYRVKEFSDGGIILLHERALPVEIARRAGIGADEGGKPRERKLGKTELARMFAQP

SEQ ID NO: 16036 - protein, 1404 aa, unidentified
  REGION 1..1404: note = Cas Enzyme sequence
MKKLKQMSGPYSIGFELSSTAHGFVATDPNGNVLYHGKQPVMGTRVFKEGQHAAEARMPRTSRRGIQRRRGREHEMERVFAPVISSIDPDFFIRRRMSYKLGKIRFESDPIGFSYSRLFHSFPTLAHLDVALMESDSAMDPRLIFESVANHVVRRGHFLLENQNVSSTNSDIDTQVANYAEVLVSYFEDTLDERIEPSLEALDINGNVTARELQKRFASAMCVSGDENQKKTEKAQIKAIADLVAGYKADLTALVPDAEKLPKVSISDGDALEEFLSDSCPDSLVSVLMAAQALYTSWKLQGMLSYAPGKSLSHNQVAQYDVYGKQLRMLKNLALKYVAKQDADGNIDEDGFKDYVRFFGGPKCEDRYRYDKVQVKKQDSPKKNMGYTAYNLNVLGYEEFAKRVELLFKDTDAVNDPQYKTMMEAFANHAFLRRIHTVDNAAIPYQLHAEVVNRIIDNQGRFYPWLIDAREHILKVLTSRIPYYVGPLDSTDHGKAGENGTRFAWVKRLAGHEDAFVSPWNYEDHIDIDTTAELFIRRMTGECSYLDGEDVLAKNSLLYEKYCFFNELASLSFTEDGDSWMPFDAGMRKAIYDAASDGKTMTVKRIESVLQRDFFIAHPHVRGTSNPKAMSSKRSNYAYFCRLFDVKALSASDMSMAEDLVLWNTVFEDRDILRRKILKTYGDLLTEKAVDDFCHKRLSGWGKLSERLLTGIWADTASGDMCVMDVLEQGRPYGRYRGSSMNLMQILNDDVLGFKMEIKRLNDSHMQMTEGFDLNALPGSPALRRGVSQAIKVLDDIVSVAGKAPDRIYLKVTRTASNSRKGKRTAKRSDKIKQALKALDADAAADLGAAKLLRELGMFDEKEINERIYLYFHQAGKCLYTGKPIDITRIASNDYYVDHVVPLAYRKDESLDNKVLVYAEASRYKSETLLVSPAVQRKMLPFWRMLRNAGLMSERKLNALIRTEISEGMLKSIIGRQFTENSWEAKLFTAAIAAKYPGTVVIPVKAGVIGAVRSRIGIPKSLKANQFYHAHDALLAAEVGRYMELAKPAFVHNRVKYEQYMRKIKLVNEENKKTPKSQLDFFAGGFFFDRVDKDTGEVYWNKDEEVERIYRACGWKNLRVTYATFEDGGAFWKQTIYSPREKSKLIATKSDRPAEIYGGYSSQTFANFFVYEVMKKKVKQLRFGAVPAAIASKSDPDTYNAMLEMYARGLAKTAKEKFVRIVRARVLKNTMIELYGERFRIAGEKQVYPVRQMPLAIDEMYLLKGVETIVAAGNAGASARIDFEKAAESLVGFWDLLLEKLPVNYPKLTVQLKLGSLKHPKDILAATSESEFPAIVYKIAEAEIQVMEQASGLRNMSDTKILGGNTFGGSLVFTFNKVLNDPKSKACFIDTTPAGLHEVKTKIW

SEQ ID NO: 16037 - protein, 1011 aa, unidentified
  REGION 1..1011: note = Cas Enzyme sequence
VLARTLPRLQERIQEFLSRTRIGIDFGEHFGGIAVVRGNEILHAETFLDFHEATLEQRRILRRGRRSRHAKKMRINRLRSWVLRQKLPNGQRLPDPHGVMRDLRYMPQPGVYKQKGVDPRTAPSWIKLAKDGKTDAEGFVRALTLIFQKRGYKWDGDELEGMSDAKLKDFLQTARIPSDDASLASDIRENIDRRRQSPNDPARGRTKVSPEELEAFLQLACERGKRGPLPRRAEHRSVKIEELKAAVEGFTTSQGIPAGQKERWKKQLCGLLNKVLRPARFENRLKTGCAWCGKATPRKAKVREIAYRAAVQNLRARDGFQLRPLNDDEKKIFVGWWTDRSTAPGVDAIVKRIEKLNREQKKMARQFHDLLKNEKPKGRTSLCVDHLKMAAQGKTMKDAGVHLQTIAPRKAPNPCRERRDERVLHRLAQILFKPGAQCEAAWRYGPIQYISLEIPEPDTERTPKGKLTERQEMTLKERLAEETEGCVYKALGGCGGEMDKDHVFPRSLGGPDVRFNLAAACMAHNKEKGSKTPYQWFGDRSGQWQAFEARVQKLKIPERKKKILLNQTDEYPEGDPTPLARVGSRPRQFVVALRKMFEKHGVAPPRLDYHLGEPLVQRIAGRETSHFRLSWCRKPDGSENFPYPKDRSSLANHAQDAAILAAIPPHTWRERTLCQKGERPSRSGEWKERPGLAYLELAPDWPAFYAGREKPLIRILGSYPVNWKTKFADLTFWREPEHDTPRVKRYKLLRDIQRKDFKNIVSDSVGKMVEDIAAEIELGEKDTAVTALARRLAEPAVKQAMLEWDSNPKNDVQKRDKQMKKVWGAETEREIPRAMEELERRYPSLRRLQVSSQKGGTLARVEPEDGPLRKVQIKPASEGVVVWQQPRKKGKPKVNISILRPKPLQKFGLPRVDPPIPPGVTILGQLQRHQIIWLGQDLERLAGFYRVAKCQKTGVTVQPEEAVPAEIARRVNLRLDSKSADEAEGDEKATWTLGKRALTEYFEEKRRPSVR

SEQ ID NO: 16038 - protein, 1072 aa, unidentified
  REGION 1..1072: note = Cas Enzyme sequence
MEESMSKNELIYSFDLGSGSIGICARSGKNILYLDSLLIDSEFASVKDAAARRRQIHTRIAHKEREKWWNEQAKKAGIEILLTTQPTKENPTLKTDKRILIEFLPKDSKDKTIYSSHLLRIALLQGIKLEGWQVYKAIRSAIQRRGYDANLPWGSNTDNTDEKENFESLSRYNEKLKEFFGDKEEYYYPCYYEAYMQGIWSPEKPKDLNSRLSENPAPARNKETKTAEEKCFPSRQLVEKELKALLINATKLFPKLKDKEDFIIYGPAEKAYASYDNHDKYTQYRGTSWDWQGLLGQKVPRFDNRIIAKCRLIPRLNVCKAKKQINKNVSFLLNLKNMRYSKGNITSMALTPLQINDISKIYTQYIESEKEKEENKKSGVKIQNKRAGKDNPFTKTFWKNYIRDTLGGEVNIGQQQISEPKDSGRSSFCKPALHILHSLILSGKNPHDYYKELVAANKNTDIGKGLVKDDYKFLLNIPNDWNSISIQDTREDDKKLSPKEASKKIEQIISSVSNRIVRHRLIMLVKQLEKLDSKFKKEYGHPDKVVFEIAREDFIGEKKKNDYISSQNANKKENEDVVKKLKDMGTTVNAQNILKIRLGNQQRWMDIYDTSKNRELGERKIAQYEIDHIVPQKLGGSDSFTNFVLTKNSLNHAKGRRTPYQWLSSSSDWEIFLKNIDAFAKFASHKKIELLTSEKAVEIENRKTDLQATSYLEKLAQQIAGLYFGFGINTKDTKKKIYFYTGGETANVRSKLDLNEILYSNKEDYEKAKQSDLKKKNRDNKRHHALDALVLSMLPEIKTKAKVVEEKPEYFNREYCKKEISKVIPKTIKQITPKLRETIYALRYRIEDGKKCYYFVSHFDSSIENFRLLEGKKKNDKCARKNVEKIFDLKIQKDFKNKLDDKGLSQEKWERFLNKYTDNSKRIKKISIIDSKCFDESDVFNTDGTLKEVIGEYGHKGVLKGQWIKGKEGHQGQIIYKDEKEKWKVVPIYVFESVYKKRKDYESKYKSVRLLKSGQLIALKEDYKNIKAGIYKLRTLRSDGWCELENINDQNKIGQNIGTFIEQCGMEAYKKQ

SEQ ID NO: 16039 - protein, 1038 aa, unidentified
  REGION 1..1038: note = Cas Enzyme sequence
MAEYSDPREFGFHPETVMTALMPYEQFSSKTRRLILGIDIGIASVGVCLIDIRNHEIILMASHIFKAPVEGKQKDISARPSGASIRRGYRSVRRTTKRRKNRKKVVRDIEKKYVLIPDDADGQWFAIRKDEPDVLHLRGKALLYKLNARELARILYAFAGRRGYIDHGKGTTDDDSGKVKKALSENRKILDENGYETIAQYLLKQPTSRNREGDYRYMVDIEMVTDEIHTIFRHQRDLGSDIATEELEGEYLSALRWLTDTSARDEKIYGRVGYCTYLGAPEKRAASSLISFEMVRAYEKLSNIKIEHQGREATYISPEKRNAIVASLFAGSKNPKPLKWSQLREKLDMQSSDSFDSRLPTDEKGDCIKIPAWNALCTGLFMSNRALLDRFHDDTDAADAVCSALTYASSGESLRNALENLSLDLSEQDIDSLLDLPYASKLFSGYCSTGVRALQMLRDAFKDPQIEKLYNAEKATGLYEARQALAAERNESKDGLLCPYLEFDPTCTNPVVLRATAQVRRMINSIIRHYGMPDIIRVEVAKDLKRSKHEKAIIAATNKANKDSNEQVKKDLVAFYGLPNDAHVSSTDFEKMWLYREQFGQDPYTGKGINLERMLNDRDYVEIDHILPFSRSCDDSKSNKVLCLTKSNRDKANRTPYEWMTSGEPSAPDFGDFCGRMDAWAGKGKSAHYTKSKLSKLKNSTFGKEEQKFIDRNLNDTRYMSRQLAMWVRECLPFPDDKRQHVFCVAGAATSLMRRIWGIGVVDEKGKKDRSDDRHHAVDGAVIACCSPEIVKGIARVNSGRSNIKERERLRYESMPYPEFKDQVEAWIPCIVPTRTVSRTATGSLLKDTVYPYVGVDDRGKDLYRRNGKIEPASTLWKDGSGGCKLYDGAYGLMAVFDESMKKSGSWRFDPIYYIDVPNVRQDFIREFTKGLSIDYWPKVQLKGDERRIFLKQGDVLLQDGCAMRYYMYNVSNGVVNSYSKIGEKSVPLQKTGPLSDESFPKQAKWDSSLTVMQEDCLGLCWLKFLSDRVGQFENSPV

SEQ ID NO: 16040 - protein, 1038 aa, unidentified
  REGION 1..1038: note = Cas Enzyme sequence
MVEYSDPRDFGFRPETVMTALMPYEQYSSKTRRLILGIDMGIASVGVCLIDIRNHEIILMASHIFKAPVEGKQKDISARQSGASIRRGYRSVRRTTKRRKNRKKAVRDIEKKYVLIPDDADGQWFAIRKGEPDVLHLRGKALLYKLNGRELARILYAFAGRRGYIDHGKGTTDDDSGKVKKALSENRKILDENGYETIAQYLLKQPTSRNREGDYRYMVDIEMVTDEVHTIFRHQRDLGSDIATEELEGEYLSALRWLTDTSARDKKIYSRVGYCTYLGAPEKRAASSLISFEMVRAYEKLSNIKIEHQGREATYISPEKRNEIVESLFAVSKNPKPLKWSQLREKLGMQSSDSFDSRLPTDEKGDCIKIPAWNALCRGLFTSNRALLDWLHDDTDIADAVCSALTYASSGESLRNALENLSLDLSEQDIDSLLDLPYASKLFSGYCNTGVRALQMLRDAFKDPQIEKLYDAEMATGLYEARQALAAERNESKDGLLCPYLEFDPTCTNPVVLRATAQVRRMINSIIRHYGMPDIIRVEVAKDLKRSKHEKAIIAATNKANKDSNEQVKKDLVAFYGLPNDAHVSSTDFEKMWLYREQFGQDPYTGKGINLERMLNDRDYVEIDHILPFSRSCDDSKSNKVLCLTKSNRDKANRTPYEWMTSGEPSTPDFGDFCGRMDAWAGKGKSAHYTKSKLSKLKNSTFGKEEQKFIDRTLNDTRYMSRQLAMWVRECLPFPDDKRQHVFCVAGAATSLMRRIWGIGVVDEKGKKDRSDDRHHAVDGAIIACCSPEIVKGIARVNSGRSNIKERERLRYESMPYPEFKDQVEAWIPCIVPTRTVSRTATGSLLKDTVYPYVGVDDRGKDLYRRNGKIEPASTLWKDGSGGCKLYDGAYGLMAVFDESMKKSGSWRFDPIYYIDVPNVRQDFIREFTKGLSIDYWPKVQLKGDERRIFLKQGDVLLQDGCAMRYYMYNVSNGVVNSYSKIGEKSVPLQKTGPLSDESFPKQAKWDSSLTVMQEDCLGLCWLKFLSDRVGQFENSPV

SEQ ID NO: 16041 - protein, 1149 aa, unidentified
  REGION 1..1149: note = Cas Enzyme sequence
MSFFVKKVNILCGSLIIIVIEEFVMNKKILSLDLGITSIGYSILDEMDNDRYTLIDYGVSMFDKATDKDGKSKKLLHSASHSSANLHNLRKKRTRNLASLFEKHNLGKSDEFLKQEKQNKFVNKWYLRAEKSFSEILTFNELFSILYLMAKHRGYKSLDTDDLLEELLIELGFEVEEKKEKDAEKGKIKQALKTVEAFRKKYPEKTVARIIYDIEIKKDNPTFRNHDNYNYMIRREYINEEIRKIIQAQSTFGLFSKGFDTELFIKELISTIDDQKDSTNDLSLFGNCEYYSEHKVAHQYSLLSDMFKMYQSVANITFGKTKISKEQIKVVTDDFFKKIKFGRNIADIKYKDIRKLLKLSDEVQIFGKEDFHVGKTGTKVQHTITKFHFLANLSKIDNSFIKSAFEKENKFEILKEIFDVLEFEKAPKSMYSQINDIFLKYELLEDEKLKDETIINLIKYKTGNSLNISAHAMIKFIPYFEKGMTIDEIKKELKLERKEDYSTYKKGIKHLHIKTFEADDNLEINNHPVKYVVSATMRLVKHLHATYGAFDEIRVESTRELSQNDEVKKAIKSANDANEKKFQEIMENEEYIKIANHYNKNLKKYARKLILWEEQEKLDIYTGKTIGFEDIFTNVVDIDHIIPQSLGGLTVKHNLVLAHRDDNVKKSNQLPMSFVKDTVAFNNRVEYLFKEYRINWKKKINLLATTLDDRYKDTFESKELRATSYIEALTAQMLKRYYPFPDKKKQVNGQAVAHVQGRATSNIRKLLGVKIKVRDTNIHHAIDAILIGLTNKSWLQKLSNTFRENMGVIDDEARANIKKELPLIEGIEPKELVELIEDAYNIYGEDAVFYKDIFGNTKAVNFWVSKKPMSSKIHKDTIYAKKPNNFFTVREDIIKQFVVLKTVVTTDSEVFIKGFEKKILLKMYLFKTNPNDIICKIVKSRADEVKFLLQSFVDIDSKNKEDMAEAKERLDVLIHKELVDNNGNVIRKVKFYQTNLTGFEIRGGLATKEKTFIGFKATKESGKLFYERIDVSNFKRIQKENDGSFKVYKNDIVFFVYEDDSFRGGKIVSFLADKKIVSFSNSRFPASIKFQPHSFLTLFKGVPNSHKQHSVNKAIGIIKFNLDILGNIKSYIKFGEVSKEVELKIFHKE

SEQ ID NO: 16042 - protein, 1079 aa, unidentified
  REGION 1..1079: note = Cas Enzyme sequence
MKYGIGLDCGINSVGYCIMELNSDDEPKRIVRLNSRIFTEAENQKDGSSLAAPRREARGLRRRIRRHKHRLERIRALLVRENIVTQAELDNMFSGTLSDIYELRTAALDAPLNNIEFARVLINLAQRRGFKSNRKSEKSSSDKETGKLLSAIEKNKESIEAGGYRTVGEMLFKDERYAKHKRNKGEAYLNTVSRDMIEAEIHAVFASQRNFGMPFASEKIENEYIDIALSQRPFDLGPGEGPENCKSPYAGKQIKNMIGPCTFFPEEKRAVKASYSFQLFSLLQGINNITLVSRDSNTFPLSQEQLKILKDYCFKTANVTYASIRKVLQIPQEYTFQNITYTDDGIEKSEKKTKFQHLKPYHEMKKVLGSAIQTLTPEELDEIGEIFTFYKDETIIIKQLEETEIDKSLYDLLLQLPTFEKAGHISTKACKMIIPFLEEGKTYDKACECAGLNFKAHTNMQKQMLLPAKSDELNDVVNPVVRRAISQTIKVVNAIIREMGTSPTYINIELARELSKSKKERDEINKKYKLNQAENERLKNEIIDNFKIKPNGQDIIKLKLWHEQDDGICPYTGVRIKYENLFDDGYAEIDHIIPYSLSFDDSFNNKILTTATQNRQKGNRIPLEYLPESEKDGFRVWVNSNIRNHRKRQNLLKEHFTEADKKEFKSRNLNDTRYLNKLLLNYINDNLLFTDFYNGKKKHVTSVNGAVTAYIRKRWGISKIREDGDLHHAVDAAVIVCVTQGMINRITAYSARNEAPYDLNTETGEIKERFPLPYPNFKKELDARTTIEDEKRLKSVLMSFSNYSYDDVEKAKPCFVSRTPHRKVTGAAHEETIRSGKVEGFTVSKTELTKLKLTNGEIEGYYEPESDTLLYNALLQRLNEFGGDAKAAFADEFHKPKADGTPGPVVKKVKTIKRSSSNVKARNKNGLGVADNGSMIRIDVFYVENEGYYFVPIYVADTVKEMPNEACPFGKDKKKIMTDDDFLFSLYPNDLIKITAKKDMKFSLANKESGLPKNKYANEVLVYYSAADISNASISVIMHDNAYKFRGCGIKSLVKLEKYTVDPLGNVSKVNREKRMYFK

SEQ ID NO: 16043 - protein, 1077 aa, unidentified
  REGION 1..1077: note = Cas Enzyme sequence
MKYGIGLDCGINSVGYCIMELNSDDEPKRIVRLNSRIFTEAENPKDGSSLAAPRREARGLRRRIRRHKHRLERIRALLVRENIVTQAELDNMFSGTLSDIYELRTAALDAPLNNIEFARVLINLAQRRGFKSNRKSEKSSSDKETGKLLSAIEKNKESIEAGGYRTVGEMLFKDERYAKHKRNKGEAYLNTVSRDMIEAEIHAVFASQRNFGMPFASEKIENEYIDIALSQRPFDLGPGEGPENCKSPYAGKQIKNMIGPCTFFPEEKRAVKASYSFQLFSLLQGINNITLVSSDSNTFPLSQGQRKILKDYCFKTANVTYASIRKVLQIPQEYTFKNITYTDDGIEKSEKKTKFQHLKPYHEMKKVLGSAIQTLTPEELDEIGEIFTFYKDETIIIKQLEETEIDKSLYDLLLQLPTFEKAGHISTKACKMIIPFLEEGKTYDKACECAGLNFKAHTNMQKQMLLPAKSDELNDVVNPVVRRAVSQTIKVVNAIIREMGTSPTYINIELARELSKSKKERDEINKKHKINQAENEKLKDEISENGKEPNGQNIIKLKLWREQDGICPYTRTPIKYENLFDDGYAEIDHIIPYSLSFDNSFNNKILTTATQNRQKGNRIPLEYLPESEKDGFRVWVNSNIRNYRKRQNLLKEHFTEADKKEFKSRNLNDTRYLNKLLLNYINDNLLFTDFYNGKKKHVTSVNGAVTGYIRKRWGISKIREDGDLHHAVDAAVIACVTQGMINRITAYSARNEAPYDLNTETGEIKERFPLPYPNFKKELDARTTIEDEKRLKSKLMSFSNYSYDDVEKAKPCFVSRTPHRKVTGAAHEETIRSGKVEGFTVSKTELTKLKLTNGEIEGYYERKSDTLLYNALLQRLNEFGGDAKAAFADEFHKPKADGTPGPVVKKVKTIKRSSSNVKARNKNGLGVADNGSMIRIDVFYVENEGYYFVPIYVADTVKEMPNEACPFGKDKKKIMTDDDFLFSLYPNDLIKITAKKDMKFSLANKESGLPKNKYANEALVYFIKAGITTASITIETHDGAYSIPSCGIKSLVKLEKYTVDPLGNVSKVNREKRMYFK

SEQ ID NO: 16044 - protein, 1113 aa, unidentified
  REGION 1..1113: note = Cas Enzyme sequence
  REGION 1107..1111: note = misc_feature - Xaa can be any naturally occurring amino acid
VYLSCSYNIPRTIRLLQKGRKPKSANGSFLEPLSFYLKKGKIMKYGIGLDCGIASVGFCITELDLNDEPKRIVRLGSRIFDKAENPKNGDSLAKPRREARGTRRRIRRHKHRLERIRYMLVRNGIVTQDELDTMFRGQLSDIYEIRTKALDEPISNIEFARVLINLAQRRGFKSNRKVDENTKDKETGKLLSAIENNRENIYKNNYRTVGEMLFKDERYLKYKRNKGENYLNTASRDMIADEIKKIFDSQRNFDVLFASEEIENEYTDIVMSQRPFDLGPGNGNEKSPSPYAGNQIEKMVGKCTFFPNEFRAAKATYSFQLFSLLQGINNITLIDNGGNTFTLSQQERSILKEYCFNTVNVTYASIRKKLGISLDYKFKNITYTQQGIEKSESKTKFQHLNAFHKMKKILGDSINTFSQDELDEIGKIFTFYKNDSKIIEQLENTSIDKSMYDLLLQLPSFSKTGHISTKACKMIIPFLEEGKTYNEACECAGIDFKAHSETSKQMYLPPKSYELDDIVNPVVRRAVSQTIKVVNAIIREMCNSPTYLNIELARELSKSKKERDEIDKKYQLNKAANDKIKAEIVEHFNIEPKGQDIIKLKLYYEQNGRCPYSLDPIEYERLFEIGYVDIDHIIPYSICFDDSYNNKVLTFSSENRQKSNRIPLDYLPESKHSDYRVWVNSTIRNYKKKQNLLKESFTEKDRKEFKSRNLNDTKYLSKVLYNYINDNLLFDDFLDGRKRHVISVNGSITAYMRKRWGIDKIRENGDLHHGIDAAVISCVTQGMINQISKYSFYKETEFDIDRQTGEVIERFPLPYSEFRNELYARSQISDEKYLKSILLRLPNYSYDDVETAKPAFVSRMPRHKVTGPAHEDTIRSGKVEGYTISKVALTSLNLKDIKENYYKPESDTLLYNALLQRLVEFDGNAQKAFAEEFHKPKADGTPGPIVKKVKILKRSSSNVPARNENKLGVADNGSMVRIDVFHIEGDGYYFVPIYVSDTVKSTLPDLACSQSKSGWKKMDDKDFVFSLYQNDLIKITSKKDMKFTLVNKDSTLPTIKYGNKLLLYYEGADISTASINGITHDNSYKFKGCGIKTLVNIEKFTVDTLGXXXXXVI

SEQ ID NO: 16045 - protein, 1078 aa, unidentified
  REGION 1..1078: note = Cas Enzyme sequence
MKYGIGLDCGIASVGFCITELDLNDEPKRIVRLGSRIFDKAENPKNGDSLAKPRREARGTRRRIRRHKHRLERIRYMLVRNGIVTQDELDAMFCGQLSDIYEIRTKALDEPISNIEFARVLINLAQRRGFKSNRKVDENTKDKETGKLLSAIENNRENIYKNNYRTVGEMLFKDERYLKYKRNKGENYLNTVSRDMIADEIKKIFDSQRNFDVSFASEEIENEYTDIVMSQRPFDLGPGNGNEKSPSPYAGNQIEKMVGKCTFFPNEFRAAKATYSFQLFSLLQGINNITLIDNCGNTFTLSQQERSILKEYCFNTVNVTYASIRKKLEISLDYKFKNITYTQQGIEKSESKTKFQHLNAFHKMKKILGDSINTFSQDELDEIGKIFTFYKNDSKIIEQLENTSIDKSMYDLLLQLPSFSKTGHISTKACKMIIPFLEEGKTYNEACECAGIDFKAHSETSKQMYLPPKSYELDDIVNPVVRRAVSQTIKVVNAIIREMGNSPTYLNIELARELSKSKKERDEIDKKYQLNKTANDKIKAEIVEHFNIEPKGQDIIKLKLYYEQNGRCPYSLDHIEYKRLFEIGYVDIDHIIPYSICFDDSYNNKVLTFSSENRQKSNRIPLDYLPESKHSDYRVWVNSTIRNYKKKQNLLKESFTEKDRKEFKSRNLNDTKYLSKVLYNYINDNLLFDDFFDGRKRHVISVNGSITAYMRKRWGIDKIRENGDLHHGIDAAVISCVTQGMINQISKYSFYKETEFDIDRQTGEVIERFPLPYSEFRNELYARSQISDEKYLKSILLKLPNYSYDDVETAKPAFVSRMPRHKVTGPAHEDTIRSGKVEGYTISKVALTSLNLKDIKENYYKPESDTLLYNALLQRLVEFDGNAQKAFAEEFHKPKADGTPGPIVKKVKILKPSSSNVPARNENKLGVADNGSMVRIDVFHIEGDGYYFVPIYVSDTVKSTLPDLACSRSKSGWKKMDDKDFVFSLYQNDLIKITSKKDMKFTLVNKDSTLPTIKYGNKLLLYYEGADISTASINGITHDNSYKFKGCGVKTLVNIEKFTVDTLGNISKVKKEKRMYFK

SEQ ID NO: 16046 - protein, 1098 aa, unidentified
  REGION 1..1098: note = Cas Enzyme sequence
MRKKIRYVLGLDIGIASVGWAVLLLDGEDNVCGIVRAGVHTFDEVTVGKEKITATANRRGYRSGRRLVRRKAHRIQRVKSLLQEMNIVSKKDMDEYYSGAVEDVYFLRWAAIQDEPVYILNNRELAQLLIYFAKHRGYKSTAVHEQEDEDDKKVLSAISENKKYMHEHGYRTAGEMIYKDAKFRQKRCGSSEENELLVARNSEGNYSNSISRDLLVEEVRIIFEKQRELGNTLATKELEERFLSIMQSQRNYDEGPGEGSPYGGNLIEKMVGECTFEKGEKRACKASYTSERFVLLEKINHLRICTADGNERPLNEDEKSAVIKLAYKTKVVKYNAIRKELKLDLEERFGGLTYSKVNNGDFKQRILDTEKKSDFISLKYWHEVKEILNLSYEDLTEEQKQLMDSVGKVLTYYKSEEKRREELSDLSLNQAQIEKLLKLNYAKFHNLSFKAMKKLMPELEAGYSYMESCLRVGYDSLSTDGVKAKYISKELLNEAVDKIMNPTVKRAVRRTVRILNEIVKLYGSPAEIHIEMARDLPHSGEVKKKIATAQKNNNKEKKEAIKFISENFGKIESDIRRKDILRYRLWKNQSQMDLYSEKLIPVEDILDYEKYEVDHIIPYSRSFNDSFNNKMLVKKKDNQDKKNHTPHEYIGHDDEAWNKFVKMVNNYVLSPGKRKNALTKSSDSEEWLSRNLNDTRYTTKVVADLVRRHLVFEPYIDGTRKKHVYPLNGGVTARLRHEWGLEKDREKSDKHHAQDAIVIASCTEKMIQKMSNIYKLEEQGGVVRKGNKLVDRRTGEILETTALPWEWFREEVEMVIADRPEDYIERAKARGYKGNIPKPIFVSRLPVKKKTGGISENTIRAVDAASSRTVEKTSLYKLKLVEVDGKKQIKDYYRPEDDVLLYNKLLDRLIRYGNAKDAFAEPFYKPKKDGSDGPIVKKVKLYVGVADDQVKVRGRGEDIDREGVKDRGGMYRCDIFRKDGKYYMVPVYYKDLYLHRMPTKAVVAHKETADWKEMDDKDFLFSLYPDDLIKVQKKNKEIENGYYKTSDRYSAGISYVQHDLGAKSYVRLCIQNLAIFEKLNVDILGNIYSCSKEEREWL

SEQ ID NO: 16047 - protein, 1098 aa, unidentified
  REGION 1..1098: note = Cas Enzyme sequence
MRKKIRYVLGLDIGIASVGWAVLLLDGEDNVCGIVRAGVHTFDEVTVGKEKITATANRRGYRSGRRLVRRKAHRIQRVKSLLQEMNIVSKKDMDEYYSGAVEDVYFLRWAAIQDEPVYILNNRELAQLLIYFAKHRGYKSTAVHEQEDEDDKKVLSAISENKKYMHEHGYRTAGEMIYKDAKFRQKRCGSSEENELLVARNSEGNYSNSISRDLLVEEVRIIFEKQRELGNTLATKELEERFLSIMQSQRNYDEGPGEGSPYGGNLIEKMVGECTFEKGEKRACKASYTSERFVLLEKINHLRICTADGNERPLNEDEKSAVIKLAYKTKVVKYNAIRKELKLDLEERFGGLTYSKVNNGDFKQRILDTEKKSDFISLKYWHEVKDILNLSYKDLTEEQKQLMDSVGKVLTYYKSEEKRREELSDLSLNQAQIEKMLKLNYAKFHNLSFKAMKKLMPELEAGYSYMESCLRVGYDSLSTDGVKTKYISKELLNEAVDKIMNPTVKRAVRRTVRILNEIVKLYGSPVEIHIEMARDLPHSGEVKKKIATAQKNNNKDKKEAIKFISENFGKTESDIRRKDILRYRLWKNQSQMDLYSEKLIPVEDILDYEKYEVDHIIPYSRSFNDSFNNKVLVKKKDNQDKKNHTPHEYIGHDDEAWNKFVKMVNNYVLSPGKRKNALTKSSDSGEWRSRNLNDTRYTTKVVADLIRRHLVFEPYFNGARNKHVYPLNGGVTARLRHEWGLEKDREKSDKHHAQDAIVIACCTEKMIWKMSNIYKQEELGGVVRKGNKLVDRRTGEILETTALPWKWFREEVEMVMADHPEDYIERAKDRGYMGDIPKPIFVSRLPVKKKTGVISENTIRVVDEASSRTVEKTSLDKLKLIEVNGKKQIKDYYRPEDDVLLYNKLLDRLIRYGNAKDAFAEPFYKPKKDGSDGPIVKKVKLYVGVADDQVKVRGRGEDIDREGVKDRGGMYRCDIFRKDGKYYMVPVYYKDLYLHRMPTKAVVAHKETADWKEMDDKDFLFSLYPDDLIKVQKKNKEIENGYYKTSDRYSAGISYVQHDFGAKSYVRLCIQNLAIFEKLNVDILGNIYSCSKEEREWL

SEQ ID NO: 16048 - protein, 1098 aa, unidentified
  REGION 1..1098: note = Cas Enzyme sequence
MRKKIRYVLGLDIGIASVGWAVLLLDGEDNVCGIVRAGVHTFDEVTVGKEKITATANRRGYRSGRRLVRRKAHRIQRVKSLLQEMNIVSKKDMDEYYSGAVEDVYFLRWAAIQDEPVYILNNRELAQLLIYFAKHRGYKSTAVHEQEDEDDKKVLSAISENKKYMHEHGYRTAGEMIYKDAKFRQKRCGSSEENELLVARNSEGNYSNSISRDLLVEEVRIIFEKQRELGNTLATKELEERFLSIMQSQRNYDEGPGEGSPYGGNLIEKMVGECTFEKGEKRACKASYTSERFVLLEKINHLRICTADGNERPLNEDEKSAVIKLAYKTKVVKYNAIRKELKLDLEERFGGLTYSKVNNGDFKQRILDTEKKSDFISLKYWHEVKDILNLSYKDLTEEQKQLMDSVGKVLTYYKSEEKRREELSDLSLNQAQIEKMLKLNYAKFHNLSFKAMKKLMPELEAGYSYMESCLRVGYDSLSTDGVKTKYISKELLNEAVDKIMNPTVKRAVRRTVRILNEIVKLYGSPVEIHIEMARDLTHSGEVKKKIATAQKNNNKEKKEAIKFISENFGKTESDIRRKDILRYRLWKNQSQMDLYSEKLIPVEDILDYEKYEVDHIIPYSRSFNDSFNNKVLVKKKDNQDKKNHTPHEYIGHDDEAWNKFVKMVNNYVLSPGKRKNALTKSSDSDEWRSRNLNDTRYTTKVVADLIRRHLVFEPYFNGARNKHVYPLNGGVTARLRHEWGLEKDREKSDKHHAQDAIVIACCTEKMIWKMSNIYKQEELGGVVRKGNKLVDRRTGEILETTALPWKWFREEVEMVMADHPEDYIERAKDRGYMGDIPKPIFVSRLPVKKKTGVISENTIRVVDEASSRTVEKTSLDKLKLIEVNGKKQIKDYYRPEDDVLLYNKLLDRLIRYGNAKDAFAEPFYKPKKDGSDGPIVKKVKLYVGVADDQVKVRGRGEDIDREGVKDRGGMYRCDIFRKDGKYYMIPVYYKDLYLHRMPTKAVVAHKETADWKKMDDKDFLFSLYPEDLIKVQKKNKEIENGYYKTSDRYSAGISYVQHDLGAKTYVRLCIQNLAIFEKLNVDILGNIYSCSKEERERL

SEQ ID NO: 16049 - protein, 1090 aa, unidentified
  REGION 1..1090: note = Cas Enzyme sequence
LGLDIGIASVGWAVLLLDGEDNVCGIVRAGVHTFDEVTVGKEKITATANRRGYRSGRRLVRRKAHRIQRVKSLLQEMNIVSKKDMDEYYSGAVEDVYFLRWAAIQDEPVYILNNRELAQLLIYFAKHRGYKSTAVHEQEDEDDKKVLSAISENKKYMHEHGYRTAGEMIYKDAKFRQKRCGSSEENELLVARNSEGNYSNSISRDLLVEEVRIIFEKQRELGNTLATKELEERFLSIMQSQRNYDGGPGEGSPYGGNLIEKMVGECTFEKGEKRACKASYISERFVLLEKINHLRICTADGNERPLNEDEKSAVIKLAYKTKVVKYNAIRKELKLDLEERFGGLTYSKVNNGDFKQRILDTEKKSDFISLKYWHEVKDILNLSYKDLTEEQKQLMDSVGKVLTYYKSEEKRREELSDLSLNQAQIEKLLKLNYAKFHNLSFKVMKKLMPELEAGYSYMESCLRVGYDSLSTDGVKTKYISKELLNEAVDKIMNPTVKRAVRRTVRILNEIVKLYGSPVEIHIEMARDLPHSGEVKKKIATAQKNNNKEKKEAIKFISENFGKIESDIRRKDILRYRLWKNQSQMDLYSEKLIPVEDILDYEKYEVDHIIPYSRSFNDSFNNKMLVKKKDNQDKKNHTPHEYIGHDDEAWNKFVKMVNNYVLSPGKRKNALTKSSDSDEWRSRNLNDTRYTTKVVADLIRRHLVVEPYFNGARNKHVYPLNGGVTARLRHEWGLEKDREKSDKHHAQDAIVIACCTEKMIWKMSNIYKQEELGGVVRKGNKLVDRRTGEILETTALPWKWFREEVEMVMADHPEDYIEMAKDRGYMGDIPKPIFVSRLPVKKKTGVISENTIRAVDEASSRTVEKTSLDKLKLIEVNGKKQIKDYYRPEDDVLLYNKLLDRLIRYGNAKDAFAEPFYKPKKDGSDGPIVKKVKLYVGVADDQVKVRGRGEDIDREGVKDRGGMYRCDIFRKDGKYYMVPVYYKDLYLHRMPTKAVVAHKETADWEKMDDKDFLFSLYPDDLIKVQKKNKEIENGYYKTSDRYSAGISYVQHDLGAKSYVRLCIQNLAIFEKLNVDILGNIYSCSKEEREWL

SEQ ID NO: 16050 - protein, 1098 aa, unidentified
  REGION 1..1098: note = Cas Enzyme sequence
MRKKIRYVLGLDIGIASVGWAVLLLDGEDNVCGIVRAGVHTFDEVTVGKEKITATANRRGYRSGRRLVRRKAHRIQRVKSLLQEMNIVSKKDMDEYYSGAVEDVYFLRWAAIQDEPVYILNNRELAQLLIYFAKHRGYKSTAVHEQEDEDDKKVLSAISENKKYMHEHGYRTAGEMIYKDAKFRQKRCGSSEENELLVARNSEGNYSNSISRDLLVEEVRIIFEKQRELGNTLATKELEERFLSIMQSQRNYDEGPGEGSPYGGNLIEKMVGECTFEKGEKRACKASYTSERFVLLEKINHLRICTADGNERPLNEDEKSAVIKLAYKTKVVKYNAIRKELKLDLEERFGGLTYSKVNNGAFKQRILDTEKKSDFISLKYWHEVKDILNLSYKDLTEEQKQLMDSVGKVLTYYKSEEKRREELSDLSLNQAQIEKLLKLNYAKFHNLSFKAMKKLMPELEAGYSYMESCLRVGYDSLSTDGVKTKYISKELLNEAVDKIMNPTVKRAVRRTVRILNEIVKLYGSPVEIHIEMARDLPHSGEVKKKIATAQKNNNKEKKEAIKFISENFGKIESDIRRKDILRYRLWKNQSQMDLYSEKLIPVEDILDYEKYEVDHIIPYSRSFNDSFNNKMLVKKKDNQDKKNHTPHEYIGHDDEAWNKFVKMVNNYVLSPGKRKNALTKSSDSDEWRSRNLNDTRYTTKVVADLIRRHLVFEPYFNGARNKHVHPLNGGVTARLRHEWGLEKDREKSDKHHAQDAIVIACCTEKMIWKMSNIYKQEELGGVVRKGNKLVDRRTGEILETTALPWKWFREEVEMVMADHPEDYIERAKDRGYMGDIPKPIFVSRLPVKKKTGVISENTIRVVDEASSRTVEKTSLDKLKLIEVNGKKQIKDYYRPEDDVLLYNKLLDRLIRYGNAKDAFAEPFYKPKKDGSDGPIVKKVKLYVGVADDQVKVRGRGEDIDREGVKDRGGMYRCDIFRKDGKYYMVPVYYKDLYLHRMPTKAVVAHKETADWKEMDDKDFLFSLYPDDLIKVQKKNKEIENGYYKTSDRYSAGISYVQHDFGAKSYVRLCIQNLAIFEKLNVDILGNIYSCSKEEREWL

SEQ ID NO: 16051 - protein, 1098 aa, unidentified
  REGION 1..1098: note = Cas Enzyme sequence
MRKKIRYVLGLDIGIASVGWAVLLLDGEDNVCGIVRAGVHTFDEVTVGKEKITATANRRGYRSGRRLVRRKAHRIQRVKSLLQEMNIVSKKDMDEYYSGAVEDVYFLRWAAIQDEPVYILNNRELAQLLIYFAKHRGYKSTAVHEQEDEDDKKVLSAISENKKYMHEHGYRTAGEMIYKDAKFRQKRCGSSEENELLVARNSEGNYSNSISRDLLVEEVRIIFEKQRELGNTLATKELEDRFLSIMQSQRNYDEGPGEGSPYGGNLIEKMVGECTFEKGEKRACKASYTSERFVLLEKINHLRICTADGNERPLNEDEKSAVIKLAYKTKVVKYNAIRKELKLDLEERFGGLTYSKVNNGDFKQRILDTEKKSDFISLKYWHEVKDILNLSYKDLTEEQKQLMDSVGKVLTYYKSEEKRREELSDLSLNQAQIEKMLKLNYAKFHNLSFKAMKKLMPELEAGYSYMESCLRVGYDSLSTDGVKTKYISKELLNEAVDKIMNPTVKRAVRRTVRILNEIVKLYGSPVEIHIEMARDLPHSGEVKKKIATAQKNNNKEKKEAIKFISENFGKIESDIRRKDILRYRLWKNQSQMDLYSEKLIPVEDILDYEKYEVDHIIPYSRSFNDSFNNKVLVKKKDNQDKKNHTPHEYIGHDDEAWNKFVKMVNNYVLSPGKRKNALTKSSDSDEWRSRNLNDTRYTTKVVADLIRRHLVFEPYFNGARNKHVYPLNGGVTARLRHEWGLEKDREKSDKHHAQDAIVIACCTEKMIWKMSNIYKQEELGGVVRKGNKLVDRRTGEILETTALPWKWFREEVEMVMADHPEDYIERAKDRGYMGDIPKPIFVSRLPVKKKTGVISENTIRGVDEASSRTVEKTSLDKLKLIEVNGKKQIKDYYRPEDDVLLYNKLLDRLIRYGNAKDAFAEPFYKPKKDGSDGPIVKKVKLYVGVADDQVKVRGRGEDIDREGVKDRGGMYRCDIFRKDGKYYMVPVYYKDLYLHRMPTKAVVAHKETADWKEMDDKDFLFSLYPDDLIKVQKKNKEIENGYYKTSDRYSAGISYVQHDLGAKSYVRLCIQNLAIFEKLNVDILGNIYSCSKEEREWL

SEQ ID NO: 16052 - protein, 1098 aa, unidentified
  REGION 1..1098: note = Cas Enzyme sequence
MRKKIRYVLGLDIGIASVGWAVLLLDGEDNVCGIVRAGVHTFDEVTVGKEKITATANRRGYRSGRRLVRRKAHRIQRVKSLLQEMNIVSKKDMDEYYSGAVEDVYFLRWAAIQDEPVYILNNRELAQLLIYFAKHRGYKSTAVHEQEDEDDKKVLSAISENKKYMHEHGYRTAGEMIYKDAKFRQKRCGSSEENELLVARNSEGNYSNSISRDLLVEEVRIIFEKQRELGNTLATKELEERFLSIMQSQRNYDEGPGEGSPYGGNLIEKMVGECTFEKGEKRACKASYTSERFVLLEKINHLRICTADGNERPLNEDEKSAVIKLAYKTKVVKYNAIRKELKLDLEERFGGLTYSKVNNGDFKQRILDTEKKSDFISLKYWHEVKDILNLSYKDLTEEQKQLMDSVGKVLTYYKSEEKRREELSDLSLNQAQIEKMLKLNYAKFHNLSFKAMKKLMPELEAGYSYMESCLRVGYDSLSTDGVKTKYISKELLNEAVDKIMNPTVKRAVRRTVRILNEIVKIYGSPVEIHIEMARDLPHSGEVKKKIATAQKNNNKEKKEAIKFISENFGKTESDIRRKDILRYRLWKNQSQMDLYSEKLIPVEDILDYEKYEVDHIIPYSRSFNDSFNNKVLVKKKDNQDKKNHTPHEYIGHDDEAWNKFVKMVNNYVLSPGKRKNALTKSSDSDEWRSRNLNDTRYTTKVVADLIRRHLVFEPYFNGARNKHVYPLNGGVTARLRHEWGLEKDREKSDKHHAQDAIVIACCTEKMIWKMSNIYKQEELGGVVRKGNKLVDRRTGEILETTALPWKWFREEVEMVMADHPEDYIEMAKDRGYMGDIPKPIFVSRLPVKKKTGVISENTIRAVDEASSRTVEKTSLDKLKLIEVNGKKQIKDYYRPEDDVLLYNKLLDRLIRYGNAKDAFAEPFYKPKKDGSDGPIVKKVKLYVGVADDQVKVRGRGEDIDREGVKDRGGMYRCDIFRKDGKYYMVPVYYKDLYLHRMPTKAVVAHKETADWKKMDDKDFLFSLYPDDLIKVQKKNKEIENGYYKTSDRYSAGISYVQHDLGAKSYVRLCIQNLAIFEKLNVDILGNIYSCSKEEREWL

SEQ ID NO: 16053 - protein, 1188 aa, unidentified
  REGION 1..1188: note = Cas Enzyme sequence
MEVKNKIMNNKNQNNQTILGLDLGSASIGWTLLNTNSDGIPNEVIDCGVRIFDSGREASKTGGLGDSKATSRRQARGIRRLLNRKRIRIKALCKLFDEYNISYFGNKEIISTNPYYLRDKALKEKLSSQELARVILHLGKHRGFKSNRKQGDSGGKLKKKFEELKNQLNNLTLGQYLYNSYISETTPNGNPNGAIRFKKGEDNDILPTRAMYMDEFNQIKSFQEPLHNLDEKFWKKAHDSIFYQRPLKSVEKGKCSYYLDKERAYKALPIFQKYRILDKLLNLTYINPNGEYLYVKDNLEYFNTLQKALNKKEKLTFDQIRKELNLDKGFKFRLEEGASQHIEGNKTNVEFNAFIPSFDNMDINQQTKITKALLNCSFLEDLENEKDINWQELLAPNKTLEELFEIIKLEDDIASFSEEFLNDLTKIMEEQTLPSYSAITQLSYNGEKLIWGKQNHHDGSMDKLPYYGKILTTRVAQKKPKNKIDLLQEENAKIEAEYGKIGNPSVHVNLNQLQKLVNAIIDKYGKPTYISIESSRELLGSKKYQETIDSQNNNNKENDRLKQLLTEHNMKINQKDLLKLKLWEELGENEKAKCPYCNNVSIGWENLFSDNKVEIEHIIPRSQSFDDNFNNLTLACSNCNRNKGNRTPYEFNPNLDLAYINSNEAISKTKKWRFGKEARDIFERALNEKLSKEEEKKYGIKNGSWLSRQMNDLSYTNRVAKEYLSCVVDYHKIFPAKGAFVQQIKRTLNFASPIKNELNEIIDENQYVKLPFNQKYFETKQGKKNRTHHYHHIIDSFVVALVNKKFYDKFNRDISKFYQEYKDKKDIELAKNDYINREICQNIGQLKKQLEQKLSKVVVSYKPEHNTNSRFLKEKALGKISTNDTTRSDSHLKNATPYEFVVNQPLSSFKSADIENIRDKKLRENIRNYIFSSGNIFTGLASDKADKKVQELLKPYGKEHNIKSIRVLTTGGGAKHITHTRKEDGKELEKYYINDGYAFVDIFEHTQYALDKNGNKIVKKDKQSGKDSKIWIGYFVESVDAMAEEMEINKIKANQKADPNYLINNVYKKQYEDSTGFKWDMTSKKIVRLYKKDLIRLTCNKNSPHWDDFFKLFATNMTELNNDNYEVILRIGQTDKSLHRVLTYPYFNSKTEKGIILGIGTSLPKFNLQKIYVDELGKIKTPRRLIIK

SEQ ID NO: 16054 - protein, 1080 aa, unidentified
  REGION 1..1080: note = Cas Enzyme sequence
MIALNNTKKGVFMALVFGLDIGIASVGWAAIDASQEIPLLGLGSRIFVSAEVPKTGESLAKPRREARGMRRRIRRRAHRMARIRRLFYRVGLINDVVPEVLADSTADDLTPWLLRADGLERKLNQRDWARTLLHIAKHRGFKSNRKSEVSDEKSEGGKLLKGVTGNAKLLIDKGYRTVGEMVWKDVKFADHKRNKGGDYSHTVARDDLLQEIQSLFEAQRNLGNSHTSKDFEAEYTKIFASQRPVDDGEIAEMVGDCTFEVGEKRAAKATYSAERFVLLSRLNNLMLIDAGERRVLDTEQRKIIETMAYKSAKVKYSQIRKALELPESIRFNLVQYKSGEIDKAEDTTFAELKAYHHMRLAITKACGELVWGNLTNQPDKLDAIATALTWYKSDDKIREILAPEQLEPTLLDAVLGLSFDKAVALSLKALRNINPFLAQGLRYDEAALAAGYDHSAPTEAQPQQFLPYIPTDEVRNPVVLRALTQARKVINAMIRRFGSPTQINIELSRELSQPYSERKDIEGKQKEFQAEKERTVKQFNDTFGRDPRGDEFTKFRLWREYNYCAYCGVYLEPARLLEEGYAEIDHILPYSRSMDDSLNNKVLCTSKANRDKGNKTPYEYLNGASQSQLWHEYKVRIETHKAFRQAKRNRLLRVDFEEKAEQEFRERNLNDTRYIARYLQEFVKTYLQFAPSENKIKVQTRNGAVTSFLRAHWGLLKVRADGDLHHALDAAIVACTTQGFVKKVSDYSRKKELWFSDLKSSDKKLGDNSRNLEIIDTQTGEITATNYQKKDGRDFPLPWENFRVDVKDALLDVFVSRAPTRKATGGVHDEKIRSTKKLMSDFITSSKMNLADFKIDSKKYKTTEALIKLLDGIPEKETRNANLYQALKKRIETGGKEPFAKPFYLGKNGEESDDAFGRLIKGVKLERTTKTGVLVRGGLADNGEMLRVDVFTKAGKFYLVPIYLADRVSGVLPNKAIKQAALEQDWPVMDGSYQFAFSLCNNDLILIADKKGEASFIRGYFKGAHRGTGNINIEGHDRSWKKEGVGVQNIGTFKKLQVDVLGNVYEVKKEPRYGLAESAD

SEQ ID NO: 16055 - protein, 1057 aa, unidentified
  REGION 1..1057: note = Cas Enzyme sequence
MALVFGLDIGIASIGWAAIDDEQAITPLLGLGSRIFVAAEVPKTGESLAKPRREARGMRRRIRRRAHRMARIRRLFYRTGLTSDVVPEVLSNITADDSTPWLLRADGLDRKLNPRDWARALLHIAKHRGFKSNRKSEAGDKEGGKLLQGVTGNAKLLHDKNYRTVGEMVWKDEKFADHKRNKGGDYSHTVARDDLLLEIKALFEAQRGLGNTFAEVAFETDYTKIFASQRPVDDGEIAEMVGDCTFELDEKRAAKATYSAEYFVLLSRLNNLMLIEAGERRVLDAEQRKAIETMAHKSAKVTYKQIRKALDLPETVRFNLVQYKSGEIDKSEDATFAELKAYHQLRGVITKTCGELAWGNLTNQPDKLDAIATALTWYKSDEKIREVLAPEQLEPALLDAVLALSFDKAVALSLKALRNINPFLAQGLRYDEACTAAGYDHSAPSEAQPQQFLPYIPTDEVRNPVVLRALTQARKVINAMIRRYGSPTQINIELSRELSQPYSERKDIQGKQKEFQAEKERTVKQFNDTFGRDPRGDEFTKFRLWREYNYCAYSGVYLEPARLLEEGYAEIDHILPYSRSMDDSLNNKVLCTSKANRDKGNKTPYEYLNGDSASQQWHEYKIRIETHKAFRQAKRNRLLRVDFDEKAEQEFRERNLNDTRYISRFLQEFLKLNLQFAPIENKIKVQTRNGAVTSFLRAHWGLLKVRADGDLHHALDAAVVACTTQGFVKRVSDYSRKKELWFSDLKQSDKKAGDNTRNLEIIDTQTGEITATNYQKKDGRDFPLPWENFRADVKDALTEIFVSRAPTRKATGGVHDEKIRSTKRMSKENPITTSKTKLQDLTLASLENIPEKETRNANLYQALKKRIETGGKEPFAKPFYLGKNGEESDDAFGRLIKSVKLERTTKTGVLVRGGLADNGEMLRVDVFTKAGKFYLVPIYLADRVSGVLPNRAIRAATPEQDWPVMDASYHFAFSLCNNDLILIADKKGEDDAFLRGYFKGAHRGTGNINIEGHDRSWKKEGVGVQNIGTFKKLQVDVLGNVYEVRQEPRHGLAESAD

SEQ ID NO: 16056 - protein, 1039 aa, unidentified
  REGION 1..1039: note = Cas Enzyme sequence
MKTSMKTSMNKLTFSFDIGYASIGWAAIVGDTSQASEPSVLGSGVVLFPADDCLASSRRDFRRQRRNIRSRRVRIERIGRILLTHGCITVEEKAAAGHPMPFYLAARALQGLQQLSAFECWQVLRWYAHNRGYDGNVAWANDTKDNEDSAKVVAAKKCMEDYACSSMAETICKRLELEPSNPDAKLSDESPAYKTMNMAFPRAVVVSEVESILRNSSIDPCVAALILKPVTEQREELARCNVRLPKRYIDSILFGQLLPRFDNRIIRRCPITWACEYSKAIEEDKSEEEAKKIASKYAKVPNANCLEFYEYRFARILANIRADGKPLAAEARQALFKRVKEVKRFTKTSLKKAVKEVVGDVQTNLYNFFQIHPDSEKALVMEPSKDSEQASGRAPYARPVLRQVVIEILRGEDATKPALSETRPKGEVKLADGILYSLLDPESAVNRIQQARRVDEMSNNHLVRHRMLIFDRLLRDMCNRYAEGDASRVNQFCIEIGRELREFSGKTAQEIVSELNERMKHFKKAVEYLQKNAPELALSASLIRKCRIAMDMNWTCPFTLLEYTPHNLQASRKYTAQDLPLLELEHIIPYADRQTNALSALVLTWPEVNKMKGRRTAFQFINECKGQAIAGRNQEVSNPTQYRKFVEKLDTKGAPDDWKRKKRRKQLLLVESITRSDRDGQGKADLGFTEGQMTQSSQLMKIAAHVTRQRFPKARVLLLPGAVTAAVRSSWHAWDILAEVCPDVRDPATGKIMDKDRIRGITHLHHALDAIVLGITPYLIPGIANGNLWQALGKRHLNEDQVMELRMTHQHRFFKISEKGHIYLNALPPSVRDSIAAALHEERVVRHVPADMSGAKLELNTWGVERIEGDRVFLRQRSSTVNADGKRRSRTMKKTTESIHKLVGVQPQGSHSKLAKIKGALVISNNYGVALDPTPSMIQHFSVYKKLQELKALNKGKPVRVIKRGQIIELTEMKKEEKNGLWLVKSVQNDAIKGLLFDLQRCSGALPKGKKSVSNWRSVSIKSLLAHMKILKRFNYTGI

SEQ ID NO: 16057 - protein, 1176 aa, unidentified
  REGION 1..1176: note = Cas Enzyme sequence
MGVSVFPAGVEEQTDKRGAPKNQARRSQRQQRRSIERRAKLKRRLRQYLIKKSWIPTEKKKLQEWQNLNPWILRKDALHRELNELKFGRILLHLAQRRGAWWFDEEPEETEKTKKKKKDPTEIPGTVEYTKAIMKEKKAETFGELIAIEYETRKKATGNKDKKRNDRVRNRNNAFGEKVSEFVADRHMVLDEFLKMWERQKSFGGKLAKQLTNEVKTEIYNPQKTNTWRRQGVLFSQRKAYWNLGTLGRCDLEPTDRKSPKADMYAQEFLVLTSVNNIRITPPGEPSRKLTDEERDKVVNAVKKQKTASESTIRKALRINKGANKTLYTLNTDGDEFTVNGDWFYSQIVSDIFGEEVWAAFDSKMKESVNRAILKFDPNDEDDKKKIKTGCNEWWKLDDKQTEKFIAAWKKRPKKDSRVNLSRKAIKNLLPYLREGWSVTEARDMYAEDALNDADDLTRRRYSTKDVAVNKRIRQFLKKHPDLLPPVSEGISNPVVRKSIHEVRKHLMEYIRQFGKPDRVVIELAREARQSEKVIADRMRKNKAIDALKKEIIKTHNLNAPDITSTQKEAAIKRIRLCRQQRKMCAYSGATITDKTAADGSGLEVDHIVPRSRGGNNGMNNLVLCYSTANQGKGQRTPIDWLSKENFEKLKQIFKHLKPKQLKSGEKPPTATKDNVDMVDNEKWKNLNRKTPKEGFTEEQLRSAAYAATQTTDWINKVLYGSEDRSKRYVFASRGDYTGILRRDWGLFFDENGERSEKGRKNRGDHRHHAVDAAIIAMTTQCLPKIKQSFIDFEKQKENKNVKSQWKTVEQPWDGFSEQIAEEYKKLKVSHRAYNKQIAGYLHKDTIYSPAVIYERHKKDDKKKGIKKGDVKIDKNGKPMLKKGMYIKSIPAIGIKQNHLRMPDGWDKLKEEYKNTTIKPQRKAIRKKMLSLEDVPPAKPGIIRDIELRDKIRDWLKEHNFADIGKAKAYIKENGLIINGTPVRKVRLLWKLNEVVEIPRKSFNFETGKIVKDNNHKALRVYQTQNNHHIEIRENNKGKWVGEVITNFDAAKRVRVKQPKPKPQGWTPPPVVNREDTKKGRFVMSLSKGEVVHMKHPDTQEANYFVVFKIDSSKTIHFTPHTDANPASSKKKDIKLREEIKVPPEKLRKTIIFSENGVPEKVKISPLGEVKVLVKD

SEQ ID NO: 16058 - protein, 1100 aa, unidentified
  REGION 1..1100: note = Cas Enzyme sequence
MKYRLGLDLGTNSIGWSVYSLDENNKPENLENLGVRIFTDGRNPKSKEPLAVERRTARGTRRLIHRKKVRRRATFRLLQKQGLFPVTKDEAKSIKLLNPYELRIKALDEKLEPFELGRVLFNLSVRRGFKSNRKDGSQEEVKENSKSEKLTQSDKCANLANAIKESGYRTLGEFLWKNQKENNGIRFAPDRMKYYPTRQLYIDEFNLIRQKQEVFYNDIDWDAIFDSIFFQRPLRPQERGKCQYLLENERTFKAMPCAQQIRILQDVYNLSFIADGKSKNLLPEWQEELILLLNSKEKVTFADMRKKLGLDEGITFNLESASREFLQGNSTAVKMRSKNRFGSLWDELTLKEQDDIVEKIITAEEDSEVMEMLNKYNLTQEQKDFITKKTILPSGTTSFCREFTETVIEEILKEKCQLHTAIQNLGYRYAEQTVEKYDTLPYYGKVLTGSTMGIKANYKNEEEQYGKISNPTVHIALNQTRTVVNALIKEYGKPEQIVVEVSRDLKASREAKAKIQQQITQNQKRNEILNKNIRDANPNLLYPNRLDRLKFKLWEELNPDNALDRRCIYCGKQISGADIFNDNTVQIEHILPFSRTLWDSEHNKTVAHTKCNQDKGNKSPFEAFGHNPSGYNWSDILERVSHLKDPQKKKLFAENAMESFDKNNSFIDRQLTDNAYLSKMALHYLKAIVKKDIWAVTGGMTKLLRDKWDIDSILKRKIGDKEIAHFGLKDEQIGTYKKNRYDHRHHALDACVIALIDRSLVQEISTKNARHEKNRIEVPQMPVLRSELITRTKNIVVSHKPDHGAQGKLSKETLLGKIKCPELLPISEIKTEKDILMIRNDKVRGEFEKSIAETKDIKKTVKELKDIYPQLWIYKEYFVSREPILGLTEKNIDSVIDKSIQEKLKIYVEQHNGEKIEVVMQKFSEETGIKKVRCKNKDQKPIEITNCDNTKRYLCTEDYYGAVIWEIPAKKDGSKTTYEGVFIRRDEVDENNQPKVENKPHPAAKKIGIIHKNDCIEFVDNGVWYKARIAGYSASQNKFDCRPIFSVTDCNDWLISTADNMTEPSWKQTKGHNFISINVLFGEKQARFITVNPIGKVFRK

SEQ ID NO: 16059 - protein, 1236 aa, unidentified
  REGION 1..1236: note = Cas Enzyme sequence
MKYSLGLDIGTASIGWAVVNLDKNRIEDLGVRIFERPEHPKSGESLAKPRRVARSARRRLRRRRQRLNYLKQFFISQKLLTKEQIDQLTAPDHAKGWHPQNPYALRVKGTTERLSPDELLIVLYHIAKRRGYKSNRKTIEEKDTTGDGKAVNSAIAQNAKVLSQYTTVGEALVKDDKFYDRKRNTTGDFRHSFARVDFLNEIRRILLCQQRYYPNQLAGDQIDHLLGIKISSLPADRPINDNDINRLTKLQSDNINGLFYQRPFMTSDLINKMRGKCPLESEQPRAPKASYSFEIFRLAQDLAHLQYIIDADKAEGNTEPTSQRAITKFLTSDQIKTCINKCLTTKKVTYRAIREVLGYAKNDPHFQFKYIRGKNPKDEEQKKDPLAKEKNTFAELKFYHSVKSGLKNLPDDWRKVGSNPELFDQIGEILTCNKDDYSIKEGLRKLEVLSDDAVDALLPIDFSGFGHLSLIALRNITPYLKEGNGITYDKAMEKAGYHFAARHSGDKTCLPPLNKDDAQQITNPVVKRAVSQTIKVVNAIIRKYGSPYRIGVECAGELAKSHDERKKIKDAQDENAFENEKLKKKLREEYNILTPTGTQITKFRLYKQQDGKCAYSGKPLDLDRLFDPGSRKDESYAEIDHIIPFSRCGNDTRANKVLVLNSYNQIKGNRTPYETWGNDPDFWQRLEANTKANPKLGQAKQRRLLTHTIPAEDWASRAINDTRYISKFISRYLKNHLEFSPYDESPDQASDSQPRQRQRVIMPAGAITTHLRRMWHQPGKNREADLLHHAVDATIIALTTQATIQDCAVYSAYIDDHTKQRFTGNTKTTGSDRLLRQLERITNTETGEISQADYEELMQSLLPWPNFDQELRKRASLPGENDTISTWRDQFRDIYSDQDSDFYNHLHPIFVSRMPKRRVSGKTNKDTVYSTKTRDNDGKTRSSRVGLADLTLDKLKNSAIRNVDETLYKQLEQYVADRKKWLDENKKWKVARREQKKLLKKSPVDEAVSTPAELPPEPIEPKIYKNGKHFDKNGNPISPIKSIKIYSPNPDTSGLLVNQGKAYVSNDSMVRLDVYKRPNKKGKIEHFFVPVYANMIRRGHPEVKPTRILPPPKKGIPLEIDDSFTFVCSLYPNDYVKVVLDDEVKEGYYAAYDIAGCKIKLLPHAGTSKDLPTKKKDKSSNGDQTDQSTDEAGDNDKKKTKIKHPNRYPAFRIAPRSATKIERLDINVLGDNYKWD

SEQ ID NO: 16060 - protein, 1258 aa, unidentified
  REGION 1..1258: note = Cas Enzyme sequence
MDDGIKYSLGLDIGTTSVGWAVVNLDKERIEDLGVRIFERPENPKNGKSLAEPRRTARSTRRRLRRRRQRLNYLKQFFINQGLLTKQEVDDIIGSAHTKAWHQAHDPYQLRVKGLTEKLSPDELLIALYHIAKRRGYKSNRKSIEQSDTTGDGKKVNSAISKNDQILSEMKYSSVSQALLADDRFRERKRNTIDDYRYSFSRVDFLDEIRHILDRQKDFYPNELSIDHINQLLGINVYRDENGQPIPIDHKLTNNDINRLTKHGQTTLNGIFYQRPFMTSELINRMRGKCPLEKDQPRAPKASYSFELFRLAEDLSHLQYTLDFVETGTDWQVRKERKHQAQFLTADQIKACVDKCLKTQTVKYSAIREALGFKGNNSFQFTYIRGKSPDEKTLAKDPLAKEKNTFTQLRFYHGVKSVLKDLPNDWQDVSSDQDLFDKIGEVLTCNKDDYSIREGLIKINKDRSAQGKAELSDEAINAIVNSKLSFAGFGHLSLVALRKITPYLLKGNGMTYDKAVEEAGYQFNAKLSGHKNLLPPLSEDESHQITNPVVKRAVSQTIKVVNAIIHKYGAPYRIGIECAGELAKSFKEREDIKKRQDKNAENNQEAVKELRSGKLVSDGEQFEAQIAPTGTSITKLNFYKQQDCKCPYCGEPININRIFSDDNYAEIDHIIPFSICGNDTKANKVLVHTTCNQIKGNQTPYQTWGNDPERWKIIEATAQANHKLGAAKRRRLLTQTLPDEDWSLHAINDTRYISKFISRYIKSNLKFRPMDDTDDDGHTQRQRVIMPAGAITSYLRRMWHIGHKDREEDCLHHSVDAVIVALITQAIIQDCSVYSAYIDDRTKMQFGDNASQAGSAKLVRALQRITDPATGEVKEADYKKLMQDMLPWPRFDEELRKREEQPDPVNDNLAIWRNKFSDLYKDQDSDFINRIHPIFVSRMPKRQGTGAVNKETVRSNKTKDDDGKTRSAKVKLRDLTLKQLSNSAISSNEGVYEQIKQYIVDRDKWKDEVKAWRKAKKASKQTSNTSEANDGRDEPSVPAEPREPKVYKSNRRFDRNGDPISPIKSIKVYDPHPMTSGFLVNNDTAYVNNGSMVRLDVYKRPNKRGKIEHFFVPVYAHMIKKGHPEIKPTKILPEPKKGTPKEIDSSFSFVCSLFPNDYVKVTLGSEVKEGYYVAYDITNCKIKLLPHAGTSKDLPTKGKDKSNSDQSDQSADETNDNDKKKTGVKHPNRYPAFRIAPRSATKIERLDINVLGDNYKWD

SEQ ID NO: 16061 - protein, 1094 aa, unidentified
  REGION 1..1094: note = Cas Enzyme sequence
MLKYKILDAETIRNYDKSPKVKECPKSKKKHLFYIKTAEYLFYKKSNNNDVLNLRVKALKQKISDLELARILYSMNNHRGVTYDEIREIPEGSSKTLSDDQKNLKDGFQRYNDEYKSKENSYLTVGEYLYENYNTKFRNTDKWQNGKKIGRDYLFSIPRDDLKSELEIIFDKQREFQNNLTTKEFQDEYLEHFLWEKDSPKYDTLVSPCIYNPYEKSANKHHFSSQLYVSLEKLYNIRFREIGTKEYFEFSKEQKEIILKNSFEKIKGLSYKDIKKILFLPNIEFKGVLEEEKNIVTNFDTFIQIKKILNLEFNPLVDFQKDDGFIQNNLVNIINILAYETKDSFKKYELAKLDITDENIEKLLKIAIRGHLSFSLGVIQKICKYMLDGVIPYQAKEKIKNEYGVKSIEKKAYLPPIMDSDFPLKNNHTVVRALSQVRAVVNDILKYYRKESGNSNWTFDMVTIELAREMNSKKQISNINKAINQNTKSNQEAKEFCEKYNITNPTQEQILKAKLWIVQKGIDPYVWIQNDENKLIDSYTLGRIDAEKLFDEGYCEIEHTLPYSRSLDDSQSNKTLVLSSTNQNKGDKTPFEWLSKVDFEKFEKYLREKDNWLAYGDARIRKLLNKDFQGVDGFKQRDIIDTQIISKYAGLYIDNHLHFWNNPNFDGKRRIYANNGKITSILRKAWAIGKKNRDTHLHHAEDAILIACSTPSLIKNISTFVGIQTQLTSGKLTLKKFEYILRKHKSLKEYILSELQKENIDISSLDTKNSKDSKEFISKIFKILANKNYSYDTFREDLKATIENAPVTRYVKHKINGSIHDETISKKKGDNEKGVLIRNGISRNGAYVRYDVFKIVNAKGKITYDFVVLTAKENGVNVENLPLPILKEGEKATFMFSIFKNELLRYSLKDKSIIEGNFLKVDSSIIVREPKNKETELFKKQIKGLYSSWLKTDDVEELKEIMSDKGIQKELNLKLEKVTKLTSQIEKVTALCQRVSTIIKTKYNVNTIFTMEKMNSIQTKELRDILIQQNIVKENVELTSGLTRTIFITLSESGYIPSSRVDGQKKLIDLVKLKIDCLGNVIDEITSEIRRPLK

SEQ ID NO: 16062 - protein, 1165 aa, unidentified
  REGION 1..1165: note = Cas Enzyme sequence
MTRIQNNSIITLGLDIGKASIGFALIDRANNYKIITDGIRIFDAPENPKDSTSLNLKRGEYRRGRNSQKNEFYRTKQVVKTLLKYKLLDAKVIQAYNKSKKVKNCPKSKKKRLFYIKTAEYLFYKKSNANDVLRLRVKALEQKLSHIEFARLLYSMNKHRGVTYDDIVEVKNAKAKGNKLSDDQKKLRDGFEKYNKEFGIHKEAYKTVGEYLYKNYKNKFRNTKKDYLFSIPRDDLKEEIEIVFEKQRELGNFFATKEFEREYLEWFLWEEQSPDYDILVAPCFYNKDEKSAHKNHFVSQLYISLEKLYNLRFRNIKNKEYQELSLEQKRQILDKSFSKKSGISYTDIKKILNFKDIEFKGVVDETAIVVKFDTFYSINKILKLDFNPLEEIKQDNNFFDTKYKKVIEILAYKPRDKDKRKELEALSLSSEEIDELLKIKIRGHLSYSYDVVKKLCSYMLEGLTPHKAKEEIENEYGTTYIEKSSYLPPILDTDFPLTNNHTVIRALSQVRYVVNDILKYYRKQMGNSNWTFDEVIIELSREMNTKKQQSAIQKEINNNEKTNKEAKEFCEKYNIYNPTSDQILKAKLWLLQEGIDPYIWIKNDENLNVEQYTLGRIEASRLFDEDYCQIEHTLPIKRSLDNSQSNKTLVLTRTNQNKGNQTPYEYLNEEEFKRFEAYLKEKKVYEKYGSARVRKLLTKDFKGVDGFVQKDINNTQIISKYAGLYIDKYLRFWNNPNFKGKRRVYANNGKITSILRNAWAIGKKNRDNHLHHGEDAILIACSTPSLVKNVSTFIGLQTELTSSTITKERFEKILKEHNSLKTYIIKELDKQNISFDDKNITSYIFKIITKKNYPYDGFIDDFKKAIQNAPVTHFVKRKTNGAIHDETIRSKTKDKRGIEIRDGSARNGEYVRYDVFEIKNSKGKITYNFVTVTAQYYGKSAEELPAPNESATFMFSVYKNDLLSYNLKDGSKIVGNFVKVDSSIILKEPKNLENNLFKKQLKGFNINILSSDDISNFEQLRNEILELTIQKTSKQKKTSNWKLTKLCNFTKLTTLEAQKNRIVEIIEAIKKLLPDINFIFYMGKATSNQTKSLKSILIDNKLIENNMKENINLYNTISITFSEIGYLEALRTDGKTDIKDLTKIKVNCMGEIIEKITYERREPLL

SEQ ID NO: 16063 - protein, 985 aa, unidentified
  REGION 1..985: note = Cas Enzyme sequence
MEPKKFTLGLDLGTNSIGWALVAHDTDGEPSGLEACGARIFQEAVDAKTRVPKNQARRTARGIRKQVARRRQRRDNLLNILERASLLPASPNEREKILASNAQYDPYALRARALDHKIERFDLGRVLYHLCKRRGFQSNRKAQSTDDGVVKSSITKLGEDIILSGKRTLGEYLAVCKKKRGIYTSRAMYQHEFEEIWKAQQNHHPELLTPALKTAVHNAIFFQRPLKLQKNLIGKCEFEPNKKRAPRALIEYQRFRLLQDVTHLKVKDPISREYRALLAEEREKLIHLLEKQKTLGWSSARRALGLHEGEIFNLEEGKKKVLIGDRTTCSLRSAIGERWDEMAGAEREALLTDMLTIDNDAGFLRRIKNHWGFSDEIAEKLATTELEPGYARLSKKALNKILPHLQNGLSYAEACIAAGYGPASLTDNSHIGMLAEPPSLRNPVVQKALYETRKVVNAIIRRYGKPTTVRIEMARDMKLTKKQRDEMQKTQKKREEANDRAKEIIRNEFGIQNPTREDVQKYNMWVECKEVCPYTGRTISREMLFSPEVEVEHVLPYSRTLDDSFMNKTLCIAEENRNVKHTRTPYEAYHASEKKYLEILQRVKSLPWPKRKKFEQKELDTDSFIERQLNDTRYICREVRKYLQTIGVTAEVTKGEATAALRRRWNLNKVLSDGDAEKNRSDHRHHAVDAIVVALTSRALFQKLSRLSAQSGVALSQRGFSLEQPWPVFFNDVCDRIDAVIVSHAPARKISDALHEETAYGYDKHDESFVYRKPLKDLKETEIEKIRDNNVKRLVRERLTQFDGNIKKAFGDEGNPLLHSDGKTLIKSVRLSVNFNRATLYGVRGTNGEPYKFFKYGKNHHIEIIEHTATGKRTGIVVTAMEAARRARIDKKPLIQKTPPWFSGGKQFDAEWQFVMSLSINDMFLMEEGGVKKHFRIQKLSSNTQIYYLTHISATLESSTSKTAGTFDGIKIAVDPLGNAYKSND

SEQ ID NO: 16064 - protein, 1193 aa, unidentified
  REGION 1..1193: note = Cas Enzyme sequence
MLMINTKKVLGLDIGSNSIGFSLLNLSEKDSQIVFEEIASNSIIFSSSVSAEDRRVARGARRLHRRKSRRNKIAREIFVKYSLATDDFIKDTTTYLGSFSIKDKDVYGIRERAVLGGKLDKDEFTLATYSILTDRGYNNMFATIQNDDSDDEDGAINEAVNHNKKLYNKKDYLLPSMVLTAQRKALQDNHQNIAIRNKKGDYSNSLDRGMHKEEFKVFVLSQANNTDLFDTTETCQAFMDEILDETITNRPFFQRPLKSFEGMVEYCSFYDEFNPKGAEKRMPLANIVNVELTLRQSIDNYEAVDKNGEVKQFTKDEKDQVVDFWLNSPNADKINNKNIYKNAGFKNIKIYIKDDKELLLLNIQAYRAMLEVLTQHNIDFKNTQNKFYNEVLLELYYYKNHSSRVEHINKIIQKYNVAVDDSFVEDVARLTHMDGFGRFSLKFANEVLEIMNKKGKIHSEALDSLCYNSKYLAMPSYDYLPPLEPSKADIEWLQKNISYFKTEHLFYQPMMSPKVKRVVGILRKLINTLIEKYGKIDEIRIETARELNSKKEEEKITKNQTEYNRKNKEAEKYLKANDINNSHKNIERAKLFKEQECECLYCDKNLTKDEAFNETITEIEHFIPRSVIWINSQKNKILVHKKCNQNKGSQSPITYLKSIGEWENFKGRIKLHVKSSKYKWLTDEATIENAMAKENWQDSYLNDTRSATRSIAKYLNHYLYPNTTAYNKGGEEHIFSVSGKAISELKYMWGIHTVMPKNEEDKKDRNTNYHHTLDAFTIALCSPSATQSLHNHFKKNENRFKTKALKEKLSNTIPISSSEVNVVEHLKELVHKYETNALHVCPYNKRKTNMKGFKDGNLKLYVTKDPKDEKREILAEMEKVAIDTSLLIKSIGGFPKPRSDKEVFDEIKSIQSRLNPIKQKKIIEAIEVYANKLLEIRSKIDTTTKEIEKYKNKIKTAKQHKELNDSIREEMKPMQEESKSLSTQLQALKCSFTVKNGKKQIVKSLRLHKVKISKTSADSILFSQRDERSIERLSVENFKQAINYKEPFVIKENESTFCVELYSHPKQSQVVGLKYFSSIANPHIKTKINEKYNDIFDDIVPSLTLYKNDIIKVKNTKENSEKYFIFNGGGLIAGSNNKLSIKNINHNSFRKINKNDEIKESKDGAVTPNKITIISKVKIDFFGNITEDKQNEK

SEQ ID NO: 16065 - protein, 1104 aa, unidentified
  REGION 1..1104: note = Cas Enzyme sequence
MRYTIGLDLGITSVGWAIIDEDKRRIIDLGVRYFDKPETPDSGKSLAEPRRLARSQRRRLARRHGRLDAVKEAFMRAGLSKDEIRKAHSQPNNPYGIRTCALDELISPQELFIAIYHIVKRRGYKSNRKEKSDAKVDKERGAVLFGIQNMKISLVKEGVRTVGELFHKKIVENEDNISFEGVRNKAGSYKNSVTRGMLEDELGQIFSVQQKLGNKFVTDELVKTIVDHDTEDNATGAFNRQKHYAQGGFEKMVGLCTFEGKTKELRAAKATYAFQYSSVLQKINHVVIKKGQYDRGRPLSEEERKIAKKYIFSVKTPHYDGLRKKLNLGASDRFNMVNYFIKVKPGEEINKEKLIKEAETKTKLPSMMNWMKLRDLLEETDPNFVQKADDDKTIYDRIGTVLSLYKTNKEVKDNLINGKYAVEKIPETVIEAITSSDLTYDSFGSLSLKALYNIIPYLEAGEDYDTAISKADYKEFANIKRHKLLSLKQDDYRITNPVVKRTISQTIKVVNAIIDRYGSPHQINIELARDLSKNFRERKNIEKLQGDNRLVNEKAKERMVELGIPEPKGQDILKFRLWSEQNCKCAYSGKAIYENRLNEDGYVEIDHVIPFSRSLDDSFNNKVLVLKQENQEKGNRIPYEWFGGNENKWAQFEALVKSFVNIAPRKRANLLVKKYVGDDLVARALNDTRYISKFVKNYIEKGLEFSDPDHKKPVNTVNGMATAYARKRWTLYKNREENLKHHAQDAALVAVMNSKTVKDIAKDSKKGEIIRYLQLHKKLDELPEINAEEAHKLEKEIKEEEYRTKLNDPWEGFRYELAARMEDDPMYELEAHKDEILWFKNREETDDELNIKPIFVSHMPRRKVSGKVHDDKVRSAKRFEQEYSSVKVPLTNLTEKRLVEEGLFLDPKLMQTLLSRLREFNGDAKRAFAEPLYKTMKNGEKGPLVRSVKLTGGQKSGLLINDGEGIVKRQSMVRVDIFTKANKKGKDEFYFIPVYAYHKTKKELPTKVCTRGKSEKDWDVLNDNYSFKFSVYPGDLLSMTKGQNITKGYYVKARVSVASLVVETHNRTEQKNTGIKSLDKLDKYMVDILGNYNKVHHEKRMPLS

SEQ ID NO: 16066 - protein, 1118 aa, unidentified
  REGION 1..1118: note = Cas Enzyme sequence
MAQKSSYSPKKYSLGLDIGTSSVGWAVLDLDKERIHDLGVRIFERPEVPKTGKSLAEPRRIARSARHRLRRRRQRLNYLKRFFIDNNLISESRISDILSPTHPKKWRPIYDPYTLRIKGLNEKLSPEELFVALYHIAKRRGYKSNRISIEEQDVEGSQVLSAISENKLLLEKYKTKSVAKVLTLDEKFKNNKRNKTSTYKNSFVRKNFEDEVMLLLESQKKFGLKLPYEKIQTLLYGNVKNGNYNGIFSQRPFMTRELIEKMRGNCEFEPEKPRAPKASYSFELFRLAQNLSHLRIVVDQETRQLSEDEIAKIIEKAKNVKVLKYEHIRDILGYKGDQSFSFAQGMIRGKIKKDDKKNGEGNKFDSMIFYHTVKKNLEQYPKDWNILAANNFELLDNAGLILTVNKDDSSLRAELSKLDISTDAIEALLPINVSGFVHLSFNSLHRITPWLLRGLNYSEAVEKAGYSFSQSLSGDKKKLPPLSKKQANQITNPVVKRAVSQTIKVVNAVIGKYGLPCSVKIEAASELAKNAQERDKIKKIQDENATYNEKIKQKLIDEFNIPTPTGLQITKFKLREQQNGVSLYSGKEIKLENLFADEHYGEIDHIIPFSRCGNDGLNNKVLVFADENQEKGNLTPYETWGGDNQKWIQFEARVRATAGLPAAKRDRLLSKSNPVEDWNVRALNDTRYISRFLRQYIRDNLDFPKIEGKTGTQRVFSPSGPITSYLRRVWRVGNKNRDDNNLHHATDACIIAATDPGIIQKVSSLNKYYELFKYSDKNEVIDKLTGEVLNRNQFEQHIADLEPWDDFGKEVRKRSELYNTPSELHNELTGLKNYDEEFRLSTLPIFVSRMPKRSGKGSTNSETFRSPKIVEGYLDEKGRPAIARKQRVPLRSVDLKKLYDSPIRETDPKLYKILEQRLKDFNDNPVKAFAENIYKPTKDSKCGNIVRSIKIYNTRDSKSGFLVNEQRAFVNNGKTIRLDVYKRKNYKGIYEYYFTPVYTHLINTQKIEVLPTPTGRSKKEKADFDTIRTDDGEIYATLKNGFIKQFSIYPNDYVRIYFGNEIVEGYYVKYNTNDGSLKLIKHSETSKNDNDLISKSAKTATLIERYDISVLGDNYRWL

SEQ ID NO: 16067 - protein, 940 aa, unidentified
  REGION 1..940: note = Cas Enzyme sequence
MTQKSSYSPKKYSLGLDIGTSSIGWAVLDLDKERIHDLGVRIFERPEDPQNGDSLAKPRRDARSARRRLKRRRQRLNHLKQFFIDQNILTKDQVEEVLDCKSDFNKLDVYDLRARALTEELSPEELLKVLYQIAKRRGFKSNRKVVEESDKEGGRVTSALKANEKFLADNNYATVGDALSRDEKFAPHKRNKRDDYTNSFARDNFLRELEAIIKTQQNYTLKNVPERTINELIYGINDEQVINVSAIMYQRPFMTKELIEKMVGDCTFEKNEKRAPKASYSFEVFRLASDLSHLVFIPRDTSKRQAKRENLEIRLSSEQIGKVIDVAKNQKSLTYKKVRSTAGISEDYVPKDVRGKKKEGDEFGEDNTFGGLKAYSDIRLALKDLPEDWAKIDNESAINQIAYILTTQKADEGIRAELDSLPLSDKAKEAIIKIKPTNFKSFGHLSIKALQKITPHILEGMTYDKACEAAGYDFKKQSASLEQITNPVVKRAITQTLKVVRAIERKYGKPYFIKVETARDLAKNFKDRNAIKKENEENQGYNEDIKSIITDGYEASPKTKGGKQLLNHLKELNVRLNKNADFNGQQIIKVKLYREQNGVCLYSGKSIDFETMLRDDNAYQVDHIVPFSRSNNDGITNKVLVLTEENQKKANRTPFEYFGADEQRWEKFVALVETTYKTRDVKTSDKATNAINYKYNGYAMKKKQNLLLQDYKNDSWNVRALNDTRYITRFIQNYLRQNVDFAEGEEKQRVIAPNGTTTAYLRKRWGLAKDRAEDVLHHAKDAAVVAAINQKIVYQANLFSKEQEMKLYLNNAKTIDEKRQILLQSTDENTGEITDEATFTQAQKDLAQVEYFKLRSDEETKKRFPDPWTGFSKEVMKRTLNTDIATLQNELRGLDNYDEDFRLNVKPIFVSRMPRRKATAQAHKETIRSPKVKDGDQRTV

SEQ ID NO: 16068 - protein, 1118 aa, unidentified
  REGION 1..1118: note = Cas Enzyme sequence
MAQKSSYSPKKYSLGLDIGTSSIGWAVLDLDKERIHDLGVRIFERPEVPKTGKSLAEPRRIARSARHRLRRRRQRLNYFKRFFIDNSLIPESRISDMLSPTHPKKWRPAYDPYDLRIKGLREKLSLEELFVALYHIAKRRGYKSNRISVEKQDVEGSQVLSAISENKLLLEKYKTKSVAKVLTLDEKFKNNKRNKTSTYKNSFVRKNFEDEVILLLESQKKFGLKLPYEKMQTLLYGDVKNGNYNGIFSQRPFMTKELIEKMRGNCEFEPEKPRAPKASYSFELFRLAQNLSHLRIVVDQETRQLSEDEIAKIIEKAKNVKVLKYEHIRDILGYKGDQSFSFAQGMIRGKIKNDDKKNGEGNKFDSMIFYHTVKKNLEQYPKDWNILAADNFELLDNAGLILTVNKDDSSLRAELSKLDISTDAIEALLPINVSGFVHLSFNSLHRITPWLLRGLNYSEAVEKAGYSFFQSLSGNKKKLPPLSKKQANQITNPVVKRAVSQTIKVVNAVIGKYGLPCSVKVEAASELAKNAQERDKIKKIQDENAEYNEKIKQKLINEFNIPTPTGLQITKFKLREQQNGVSLYSGTEINLENLFTDEHYGEIDHIIPFSRCGNDGLNNKVLVFTDENQEKGNLTPYEAWGGDDKKWTQFEARVRATAGLPAAKRDRLLSKSKPVEDWNVRALNDTRYISRFLRQYIRDNLDFPKIEGKTGAQRVFSPSGPITSYLRRVWRVGNKNRDDNNLHHAADACIIAATDPGIIQKVSSLNKYYELFRYSDKNEVIDKLTGEVLNRNQFEQHIADLEPWHDFGKEVRKRSKLYDTPSELHNELTGLKNYDEEFRLSTLPIFVSRMPKRSGKGSTNSETFRSPKIVEGYLDEKGKPAIARKQRVPLHSVDLKKLYDSPIRETDPKLYKILEQRLKDFNGDPAKAFVESVYKPTKDSKRGNIVRSIKIYNTRDSRSGFLVNEQRAFVNNGKTVRLDVYKRKNYKDIYEYYFAPVYTHLINAQKIEVLPTPTGRSKNEKADFDTIRTEDDKIYATLENGFIKQFSIYPNDYVRIYFGNEIVEGYYVKYNTNDGSLKLIKHSETSKNDNNLISKSAKTATLIERYDISALGDNYRWL

SEQ ID NO: 16069 - protein, 1144 aa, unidentified
  REGION 1..1144: note = Cas Enzyme sequence
MAQKYSYSPKKYSLGLDIGTSSVGWAVLDLDKERIHDLGVRIFERPEDPQNGDSLAKPRRDARSARRRLKRRRQRLNHLKQFFIDQNILTKDQVEEVLNYKSDFNKLDIYALRSKALTEELSPEELLKVLYQIAKRRGFKSNRKVVEESDKEGGRVTSALKANEKFLADNNYTTVGDALSRDEKFALHKRNKRDDYTNSFARDDFLCELEAIIKTQRNYALKNVPEPAINELIYGIDDGQVTNVSAIMYQRPFMTKELIEKMVGKCTFEDGEKRAPKASYSFEIFRLASDLSHLVFIPRDASKRQAKRENLEIRLSPEQIKQVIDLAKSQKSLTYKKVRSTAGISEDYVPKDVRGKKKDGDEFGEENVFGGLKAYNDIRLALKDLPEDWAKIDNESALNQIAYILTTQKADEGIRAELDTLPLSDKAKEAIVKIKPTNFKAFGHLSVKALQKITPHILEGMTYDKACEAAGYDFKKQSASLEQITNPVVKRAITQTLKVVRAIERKDGKPYFIKVETARDLAKNFKDRNAIKKENDENQGYNEDIKSIITDGYEASPKTKGGKQLLSHLKELNVPLNKNADFNGQQIVKIKLYREQNGVCLYSGKSIDFETMLRDDNAYQVDHIVPFSRSNNDGITNKVLVLTEENQKKVDRTPFEYFGADEQRWEKFVALVETTYKTRDVKTSDKATNAINYKYNGYAMKKKQNLLLQDYKNDSWNVRALNDTRYITRFIQNYLRQNVDFAEGEEKQRVIAPNGTTTAYLRKRWGLAKDRAEDVLHHAKDAAVVAAIDQKIVMQANLYAKRHEIKALLAATKTMEEKTDKLTGEITDEDEFDKAQQRKAAILVLSSKHFPQPWDNFGKEVMKRTLNTDIATLQNELRGLENYDDEFCLSVKPIFVSRMPRRKATAQAHKETIRSPKVKDNDQRTVRMPLNKVKSRDVENSVLKESDKWLYNKLLERLDTHDNNPEKAFAEPIYKNDKKFDKNGKKLSPVSTIKVYSTQPSGFYINDGKAFVNNGSMVRLDVYQKPNKKGKIEHFFVPVYAHQIGKNKPAPTKILPAPKGFTDVDETFIKICSLYPNDYVRIYLKNKILEGYYSGYDISVGTMILYPHFTPSKDIKVANRVSARSATLIERYDIAILGDNYRWL

SEQ ID NO: 16070 - protein, 1158 aa, unidentified
  REGION 1..1158: note = Cas Enzyme sequence
MTEKSSYSPKKYSLGLDIGTSSIGWAVLDLDKERIHDLGVRIFEQPEDPQNGDSLAKPRRDARSARRRLKRRRQRLNHLKQFFIDQNILTKDQVEEVLDYKSDFNKLDVYELRARALTEELSPEELLKVLYQIAKRRGFKSNRKVVEESNKEGGRVTSALKVNEKFLADNNYTTVGDALSRDEKFAPHKRNKRDDYTNSFARDDFLRELEAIIKTQQNYTLKNVPERTINELIYGINDEQVINVSAIMYQRPFMTKELIEKMVGDCTFEKNEKRAPKASYSFEVFRLASDLSHLVFIPRDTSKRQAKRENLEIRLSSEQIGKVIDVAKNQKSLTYKKVCSTAGISEDYVPKDVRGKKKEGDEFGEDNTFGGLKAYSDIRLALKDLPEDWAKIDNESAINQIAYILTTQKADEGIRAELDSLPLSDKAKEAIIKIKPTNFKSFGHLSIKALQKITPHILEGMTYDKACEAAGYDFKKQSASLEQITNPVVKRAITQTLKVVRAIERKYGKPYFIKVETARDLAKNFKDRNAIKKENEENQGYNEDIKSIITDGYEASPKTKGGKQLLNHLKELNVRLNKNADFNGQQIIKVKLYREQNGVCLYSGKSIDFETMLRDDNAYQVDHIVPFSRSNNDGITNKVLVLTEENQKKANRTPFEYFGADEQRWEKFVALVETTYKTRDVKTSDKATNAINYKYNGYAMKKKQNLLLQDYKNDSWNVRALNDTRYITRFIQNYLRQNVDFAEGEEKQRVIAPNGTTTAYLRKRWGLAKDRAEDVLHHAKDAAVVAAINQKIVYQANLFSKEQEMKLYLNNAKTIDEKRQVLLQSTDENTGEITDEATFTQAQKDLAQVEYFKLRSDEETKKRFPDPWTGFSKEVMKRTLNTDIATLQNELRGLDNYDEDFRLNVKPIFVSRMPRRKATAQAHKETIRSPKVKDGDQRTVRMPLNKIKRKDVENSVLKESDKWLYDKLLERLDAHGDNPEKAFAEPIYKNDKKFDKNGKQLSPVSTVKVYSTQPSGFYINNGKAFVNNGSMVRLDVYQKPNKKGKIEHFFVPVYAHQVGKNKPAPTKILPAPKGFTDVDETFNKVCSLYPNDYVRIYLKNKILEGYYSGYDISVGTVILYPHFTPSKDIKVANRVSARSATLIERYDIAILGDNYRWL

SEQ ID NO: 16071 - protein, 1190 aa, unidentified
  REGION 1..1190: note = Cas Enzyme sequence
VNLKQSSNPLTRWADYLLSMLILLTLLITVIWLYNHTQLSTKGILHMAQKYSYSPKKYSLGLDIGTSSVGWAVLDLDKERIHDLGVRIFERPEDPQNGDSLAKPRRDARSARRRLKRRRQRLNHLKQFFIDQNILTKDQVEEVLNYKSDFNKLDIYALRSKALTEELSPEELLKVLYQIAKRRGFKSNRKVVEESDKEGGRVTSALKANEKFLADNNYTTVGDALSRDEKFALHKRNKRDDYTNSFARDDFLCELEAIIKTQRNYALKNVPEPAINELIYGIDDGQVTNVSAIMYQRPFMTKELIEKMVGKCTFEDGEKRAPKASYSFEIFRLASDLSHLVFIPRDASKRQAKRENLEIRLSPEQIKQVIDLAKSQKSLTYKKVRSTAGISEDYVPKDVRGKKKDDDEFGEENVFGGLKAYNDIRLALKDLPEDWAKIDNESALNQIAYILTTQKADEGIRAELDTLPLSDKAKEAIVKIKPTNFKAFGHLSVKALQKITPHILEGMTYDKACEAAGYDFKKQSASLEQITNPVVKRAITQTLKVVRAIERKYGKPYFIKVETARDLAKNFKDRNAIKKENDENQGYNEDIKSIITDGYEASPKTKGGKQLLSHLKELNVPLNKNADFNGQQIVKIKLYREQNGVCLYSGKSIDFETMLRDDNAYQVDHIVPFSRSNNDGITNKVLVLTEENQKKVDRTPFEYFGADEQRWEKFVALVETTYKTRDVKTSDKATNAINYKYNGYAMKKKQNLLLQDYKNDSWNVRALNDTRYITRFIQNYLRQNVDFAEGEEKQRVIAPNGTTTAYLRKRWGLAKDRAEDVLHHAKDAAVVAAIDQKIVMQANLYAKRHEIKALLAATKTMEEKTDKLTGEITDEDEFDKAQQRKAAILVLSSKHFPQPWDNFGKEVMKRTLNTDIATLQNELRGLENYDDEFCLSVKPIFVSRMPRRKATAQAHKETIRSPKVKDNDQRTVRMPLNKVKSRDVENSVLKESDKWLYNKLLERLDTHDNNPEKAFAEPIYKNDKKFDKNGKKLSPVSTIKVYSTQPSGFYINDGKAFVNNGSMVRLDVYQKPNKKGKIEHFFVPVYAHQIGKNKPAPTKILPAPKGFTDVDETFIKICSLYPNDYVRIYLKNKILEGYYSGYDISVGTMILYPHFTPSKDIKVANRVSARSATLIERYDIAILGDNYRWL

SEQ ID NO: 16072 - protein, 1118 aa, unidentified
  REGION 1..1118: note = Cas Enzyme sequence
MAQKSSYSPKKYSLGLDIGTSSIGWAVLDLDKERIHDLGVRIFERPEVPKTGKSLAEPRRIARSARHRLRRRRQRLNYFKRFFIDNSLIPESRISDMLSPTHPKKWRPAYDPYDLRIKGLREKLSLEELFVALYHIAKRRGYKSNRISVEKQDVEGSQVLSAISENKLLLEKYKTKSVAKVLTLDEKFKNNKRNKTSTYKNSFVRKNFEDEVILLLESQKKFGLKLPYEKMQTLLYGDVKNGNYNGIFSQRPFMTKGLIEKMRGNCEFEPEKPRAPKASYSFELFRLAQNLSHLRIVVDQETRQLSEDEIAKIIEKAKNVKVLKYEHIRDILGYKGDQSFSFAQGMIRGKIKNDDKKNGEGNKFDSMIFYHTVKKNLEQYTKDWNILAADNFELLDNAGLILTVNKDDSSLRAELSKLDISTDAIEALLPINVSGFVHLSFNSLHRITPWLLRGLNYSEAVEKAGYSFFQSLSGNKKKLPPLSKKQANQITNPVVKRAVSQTIKVVNAVIGKYGLPCSVKVEAASELAKNAQERDKIKKIQDENAEYNEKIKQKLINEFNIPTPTGLQITKFKLREQQNGVSLYSGTEINLENLFTDEHYGEIDHIIPFSRCGNDGLNNKVLVFTDENQEKGNLTPYEAWGGDDKKWTQFEARVRATAGLPAAKRDRLLSKSKPVEDWNVRALNDTRYISRFLRQYIRDNLDFPKIEGKTGAQRVFSPSGPITSYLRRVWRVGNKNRDDNNLHHAADACIIAATDPGIIQKVSSLNKYYELFRYSDKNEVIDKLTGEVLNRNQFEQHIADLEPWHDFGKEVRKRSKLYDTPSELHNELTGLKNYDEEFRLSTLPIFVSRMPKRSGKGSTNSETFRSPKIVEGYLDEKGKPAIARKQRVPLHSVDLKKLYDSPIRETDPKLYKILEQRLKDFNGDPAKAFVESVYKPTKDSKRGNIVRSIKIYNTRDSRSGFLVNEQRAFVNNGKTVRLDVYKRKNYKDIYEYYFAPVYTHLINAQKIEVLPTPTGRSKNEKADFDTIRTEDDKIYATLENGFIKQFSIYPNDYVRIYFGNEIVEGYYVKYNTNDGSLKLIKHSETSKNDNNLISKSAKTATLIERYDISALGDNYRWL

SEQ ID NO: 16073 - protein, 1118 aa, unidentified
  REGION 1..1118: note = Cas Enzyme sequence
MAEKSSYSPKKYSLGLDIGTSSIGWAVLDLDKERIHDLGVRIFERPEVPKTGKSLAEPRRIARSTRHRLRRRRQRLNHLKQFFIDNNLITESCIGDILSPTRPKKWRPIYDPYTLRIKGLNEKLSPEELFVALYHIAKRRGYKSNRVSVEKQDTEGSQVLSAISENKLLLKKYNTKSVAKVLTLDEKFKNNKRNKASKYENSFVRKNFEDEVILLLESQKNFGLDLPYEKIQTLLYGDIKNGNYNGIFSQRPFVTKELIERMRGNCEFEPEKPRAPKASYSFELFRIAQNLSHLRIVIDKETRQLSENEIAKIIEKAKNVKELKYEHIRDILGYKGNQSFSFAQGMIRGKIKNDDKKNGEGNKFDSMIFYYTVKKTLEQYPKDWNILTANNFELLDTTGLILTVNKDDSSLRTELSKLNISTDAIEALLPINVSGFVHLSFNSLHRITPWLLRGLNYSEAVEKAGYSFSQGISGDKKKLPPLSKKQANQITNPVVKRAVSQTIKVVNAVIRKYGLPYSVKVEAASELAKNAQERNKIKKIQDENAEYNEKIKQKLINEFNIPTPTGLQITKFKLREQQNGVSLYSGKEIKLENLFTDEHYGEIDHIIPFSRCGNDGLNNKVLVFADENQEKGNLTPYEAWGGDNQKWAQFEAQVRATAGLPAAKRDRLLSKSKPVEDWNIRALNDTRYISRFLRQYIRDNLDFPKIEGKTGTQRVFSPSGPITSYLRRVWRVGNKNRDDNNLHHAADACIIAATSPSIIQKISSLNKYYELFKYTDKNEIVDKLTGEVLDRNQFEQHIADLEPWDDFGKEVRKRSKLYNTPSELHNELTGLKNYDEEFRLSTLPIFVSRMPERSGKGLTNSETFRSPKIVKGYLDEKGRPAIARKQRVPLHSVDLKKLYDSPIRETDPKLYNILEQRLKDSNNDPAKAFTENVYKPTKDSKRGNIVRSIKIYNTRDSRSGFLVNEQRAFVNNGKTVRLDVYKRKNYKDIYEYYFAPVYTHLINAQKIEVLPTPTGRSKNEKADFDTIRTEDDKIYATPENGFIKQFSIYPNDYVRIYFDNEIVEGYYVKYNTNNGSLKLIKHSDTSKNDNDLISKAAKTATLIERYDISVLGDNYRWL

SEQ ID NO: 16074 - protein, 1190 aa, unidentified
  REGION 1..1190: note = Cas Enzyme sequence
VNLKQSSNPLTRWADYLLSMLILLTLLITVIWLYNHTQLSTKGILHMAQKYSYSPKKYSLGLDIGTSSVGWAVLDLDKERIHDLGVRIFERPEDPQNGDSLAKPRRDARSARRRLKRRRQRLNHLKQFFIDQNILTKDQVEEVLNYKSDFNKLDIYALRSKALTEELSPEELLKVLYQIAKRRGFKSNRKVVEESDKEGGRVTSALKANEKFLADNNYTTVGDALSRDEKFALHKRNKRDDYTNSFARDDFLCELEAIIKTQRNYALKNVPEPAINELIYGIDDGQVTNVSAIMYQRPFMTKELIEKMVGKCTFEDGEKRAPKASYSFEVFRLASDLSHLVFIPRDASKRQAKRENLEIRLSPEQISKVIDLAKNQKSLTYKKVRSTAGISEDYVPKDVRGKRKEGDEFGEDNTFGGLKAYSDIRLALKDLPEDWAKIDNESAINQIAYILTTQKADEGIRAELNTLPLSDKAKEAIVKIKPTNFKAFGHLSIKALQKITPHILEGMTYDKACEAAGYDFKKQSASLEQITNPVVKRAITQTLKVVRAIERKYGKPYFIKVETARDLAKNFKDRNAIKKENDENQGYNEDIKSIITDGYEASPKTKGGKQLLSHLKELNVPLNKNADFNGQQIVKIKLYREQNGVCLYSGKSIDFETMLRDDNAYQVDHIVPFSRSNNDGITNKVLVLTEENQKKVDRTPFEYFGADEQRWEKFVALVETTYKTRDVKTSDKATNAINYKYNGYAMKKKQNLLLQDYKNDSWNVRALNDTRYITRFIQNYLRQNVDFAEGEEKQRVIAPNGTTTAYLRKRWGLAKDRAEDVLHHAKDAAVVAAIDQKIVMQANLYAKRHEIKALLAATKTMEEKTDKLTGEITDEDEFDKAQQRKAAILVLSSKHFPQPWDNFGKEVMKRTLNTDIATLQNELRGLENYDDEFCLSVKPIFVSRMPRRKATAQAHKETIRSPKVKDNDQRTVRMPLNKVKSRDVENSVLKESDKWLYNKLLERLDTHDNNPEKAFAEPIYKNDKKFDKNGKKLSPVSTIKVYSTQPSGFYINDGKAFVNNGSMVRLDVYQKPNKKGKIEHFFVPVYAHQIGKNKPAPTKILPAPKGFTDVDETFIKICSLYPNDYVRIYLKNKILEGYYSGYDISVGTMILYPHFTPSKDIKVANRVSARSATLIERYDIAILGDNYRWL

SEQ ID NO: 16075 - protein, 1144 aa, unidentified
  REGION 1..1144: note = Cas Enzyme sequence
MAQKSSYSPKKYSLGLDIGTSSVGWAILDLDKERIHDLGVRIFERPEDPQNGDSLAKPRRDARSARRRLKRRRQRLNHLKQFFVDQNILTKDQVEEVLNYKSDFNKLDVYDLRAKALTEELSPEELLKVLYQITKRRGFKSNRKVVEESDKEGGRVTSALKTNEKFLADNNYTTVGEALSRDEKFAPHKRNKRDDYTNSFARDDFLHELEAIIKTQRNYALKNVPEPAINELIYGIDDGQVTNVSAIMYQRPFMTKELIEKMVGKCTFEDGEKRAPKASYSFEVFRLASDLSHLVFIPRDASKRQAKRENLEVRLSPDTIKHVLELAKSQKSLTYKKVRSTAGISEDYVPKDVRGKKKDGDEFGEENVFGGLKAYNDIRLALKDLPEDWAKIDNESAINQIAYTLTTQKADEGIRAELDTLPLSNKAKEAIVKIKPTNFRAFGHLSIKALQKITPHILEGMTYDKACEAAGYDFKKQSASLEQITNPVVKRAIAQTLKVVRAIERKYDKPYFIKVETARDLARNFKDRNAIKKENDENQGYNEDIKSIITDGYKASPKTKGGKQLLSHLKELNVPLNKNADFNSQQIVKIKLYREQNGVCLYSGKSIDFETMLRDDNAYQVDHIVPFSRSNNDGITNKVLVLTEENQKKADRTPFEYFGTDEQRWEKFVALVETTYKTRDVKTSDKATNAINYKYNGYAMKKKQNLLLQDYKNDSWNVRALNDTRYITRFIQNYLRQNVDFAEGEEKQRVIAPNGTTTAYLRKRWGLAKDRAEDVLHHAKDAAVVAAIDQKIVMQANLYAKRHEIKALLAATKTMEEKTDKLTGEITDEDEFDKAQRRKAAILVLSSKHFPQPWDNFGKEVMKRTLNTDIATLQNELRGLDNYDEDFRLNVKPIFVSRMPRRKATAKAHKETIRSPKVKDSDQRTVRTPLNKIKRKDVENSVLKESDKWLYNKLLERLDTHDNNPEKAFAEPIYKNDKKFDKNGKKLSPVSTIKVYSTQPSGFYINDGKAFVNNGSMVRLDVYQKPNKKGKIEHFFVPVYAHQVGKNRPTPTKILPTPKGFTDVDETFTKVCSLYPNDYVRCYFGNKIKEGYYVKYGINNGAIQVIAHGTTSKDKDHLIQISPRSANLIERYDISVLGDNYRWL

SEQ ID NO: 16076 - protein, 1118 aa, unidentified
  REGION 1..1118: note = Cas Enzyme sequence
MTQKSSYSPKKYSLGLDIGTSSVGWAVLDLDKERIHDLGVRIFERPEVPKTGKSLAEPRRAARSTRHRLRRRRQRLNYLKRFFIDNNLISESRISDILSPTHPKKWRPAYDPYDLRIKGLEEKLSLEELFVALYHIAKRRGYKSNRISVEKQDIEGSQVLSAISENKLLLEKYKTKSVAKVLTLDEKFKNNKRNKTSTYKNSFVRKNFEDEAALLLESQKKIGLKLPYEKIQTLLYGDVKNGNYNGIFSQRPFMTEELIEEMRGYCEFEPEKHRAPKASYSFELFRLAQNLSHLRIVVDKETRQLSEDEIAKIIEKAKNVKELKYEHIRDILGYKGDQSFSFAQGMIRGKIKKDDKKNGEGNKFDSMIFYHAVKKNLEQYPKDWNILAANNFKLLDTTGLILTVNKDDSSLRRELSKLNISTNAIESLLPINVSSFVHLSFESLHKITPWLLKGLNYNESVERAGYSFSQNLSGNKKELPPLSEKQAAQITNPVVKRAVSQTIKVVNAIIRKYGIPYSVKIEAASELAKNAQERDKIKKIQDENAAYNEKIKQKLINEFNIPTPTGLQITKFKLREQQNGVSIYSGKEIRLENLFADEHYGDIDHIIPFSRCGNDGLNNKVLVFADENQEKGNLTPYEAWGGDNQNWTQFEARVRATAGLPAAKRDRLLSKSKPVEDWNVRALNDTRYISRFLRQYIRDNLDFPKIEGKTGAQRVFSPSGPITSYLRRVWRVGNKNRDDNNLHHAADACIIAATDPGIIQKVSSLNKYYELFRYSDKNEVIDKLTGEVLNRNQFEQHIADLEPWHDFGKEVRKRSKLYDTPSELHNELTGLKNYDEEFRLSTLPIFVSRMPKRSGKGSTNSETFRSPKIVEGYLDEKGKPAIARKQRVPLHSVDLKKLYDSPIRETDPKLYKILEQRLKDFNGDPAKAFVESVYKPTKDSKRGNIVRSIKIYNTRDSRSGFLVNEQRAFVNNGKTVRLDVYKRKNYKDIYEYYFAPVYTHLINAQKIEVLPTPTGRSKNEKADFDTIRTEDDKIYATLENGFIKQFSIYPNDYVRIYFGNEIVEGYYVKYNTNDGSLKLIKHSETSKNDNNLISKSAKTATLIERYDISALGDNYRWL

SEQ ID NO: 16077 - protein, 1129 aa, unidentified
  REGION 1..1129: note = Cas Enzyme sequence
MAQKSSYSPKKYSLGLDIGTSSVGWAVLDLDKERIHDLGVRIFERPEDPQNGDSLAKPRRDARSARRRLKRRRQRLNHLKQFFVDQNILTKDRVEEVLDYKSDFNKLDVYALRAKALTEELSPEELLKVLYQIAKRRGFKSNRKVVEESDKEGGRVTSALKANEKFLANNNYTTVGDALSRDEKFAPHKRNKRDDYTNSFARDDFLCELEAIIKTQRNYALKNVPEPAINELIYGIDDGQVTNVSAIMYQRPFMTKELIEKMVGKCTFEDGEKRAPKASYSFEVFRLASDLSHLVFIPRDASKRQAKRENLEIRLSPEQISKVIDVAKSQKSLTYKKVRSTAGISEDYVPKDVRGKKKDGDEFGEENAFGGLKAYNDIRSALKDLPEDWAKIDNESALNQIAYILTTQKADEGIRAELDVLPLSDKAKEAIVKIKPTNFKAFGHLSIKALQKITPHILEGMTYDKACEAAGYDFKKQSASLEQITNPVVKRAITQTLKVVRAIERKYGKPYFIKVETARDLAKNFKDRKAIENENKENQARNQSIIQTLNENGIVTPTGQQIIKVKLYREQQGKCLYSGNPIDFETMLRDDNAYQVDHIVPFSRSNNDGITNKVLVFTEENQKKADRTPFEYFGTDEQRWEKFVALVETTYKTRDVKTSDNATNSINYKYNGYAMKKKQNLLLQDYKNDSWNVRALNDTRYITRFIQNYLRQNVDFAEGEEKQRVIAPNGTTTAYLRKRWGLAKDRAEDVLHHAKDAAVVAAIDQKIVMQANLYAKRHEIKALLAATKTMEEKTDKLTGEITDEDEFDKAQRRKAAILVLSSKHFPQPWDNFGKEVMKRTLNTDIATLQNELRGLENYDDEFRLSIKPIFVSRMPRRKATAQAHKETIRSPKVKDGDQRTVRIPLNKLTLDTLEKSVLVESDRVLFNQLKDLLDKTATYDKKGKRTDHPDKAFAESVYKNDKKFDKNGKKLSPVSTIKVYSTQPSGFYINNGKAFVNNGSMVRLDVYQKPNKKGKIEHFFVPVYAHQVGKNKPTPTKILPAPKGFTDVDETFTKVCSLYPNDYVMCKFSENRVEEGYYVMYGIAVGQMVLLPHEVSGKDQKTMRSISPRSAASIERYDISVLGDNYRWL

SEQ ID NO: 16078 - protein, 1119 aa, unidentified
  REGION 1..1119: note = Cas Enzyme sequence
MTEKSSYSPKKYSLGLDIGTSSIGWAVLDLDKERIHDLGVRIFERPEDPQNGDSLAKPRRDARSARRRLKRRRQRLNHLKQFFIDQNILTKDQVEEVLDYRSDFNKLDVYELRAKALTEELSPEELFKVLYQIAKRRGFKSNRKVIEESDKEGGRVTSALKANEKFLADNNYTTVGDALSRDEKFAPHKRNKRDDYTNSFARDDFLRELEFIIKNQRKYALKNIPEQAINELIYGIDDGQATNVSAIMYQRPFMTRELIEKMVGNCTFEKDEKRAPKASYSFEMFRLASDLSHLVFIHRDASKRQAKRENLEVRLSPEQISKVIDAAKSQKSLTYKKVRSTAGISEDYVPKDVRGKKKEGDEFGEDNTFGGLKAYSDIRLALKDLPEDWAKIDNESAINQIAYVLTTQKADEGIRAELDSLPLSDKAKEAIIKIKPTNFKAFGHLSIKALQNITPYILEGMTYDKACEAAGYDFKKQSASLEQITNPVVKRAITQTLKVVRAIERKYGKPYFIKVETARDLAKNFKDRKAIENENKENQARNQSIIQTLNENGVVTPTGQQIIKVKLYREQNGVCLYSGKSIDFETMLRDDNAYQVDHIVPFSRSNNDGMTNKVLVLTEENQKKSNQTPFEYFGADEKRWKEFAARVESTYKTRDTKTADKATNAINYKYNGYAIKKKQNLLLQEYKNDSWNVRALNDTRYITRFIQNYLRQDVDFAEGEEKQRVIAPNGTTTAYLRKRWGLAKDRNEDVLHHAKDAAVVAAVDQNIVRQANLFAKRSEIATLLAAAKTMEEKTDKLTGEIIDEDEFDKAQRRKDAAIVLSSKYFPQPWNNFGKEVMKRTLNTDIATLQNELRGLDNYDEDFRLSVKPIFVSRMPRRKAVAQAHKETVRSPKVKDNDKRTVRMPLNKVKRKDIENSVLKESDKWLYDKLLERLNAHDNNPEKAFAEPVYKNDKKFDKNGKQLSPVSNIKVYSTQPSGFYINNGKAFVNNGSMIRLDVYQKPNKKGKIEHFFVPVYVHQVGKNKPTPTKILPAPKGFTDVDETFTKVCSLYPNDYVRCYFGNEIKEGYYVKYGINNGAMQVIAHSTASKDKDHLIQISPRSANLIERYDIAILGDNYRWL

SEQ ID NO: 16079 - protein, 1144 aa, unidentified
  REGION 1..1144: note = Cas Enzyme sequence
MTQNSSYSPKKYSLGLDIGTSSIGWAVLDLDKERIHDLGVRIFERPEDPQNGDSLAKPRRDARSARRRLKRRRQRLNHLKQFFVDQNILTKNQVEEVLNYKSDFNKLDVYGLRARALTEELLPEELLKVLYQIAKRRGFKSNRKVVEESDKEGGRVTSALKANEKFLADNNYTTVGDALSRDEKFAPHKRNKRDDYTNSFARNDFLRELEAIIKTQQNYTLKNVPERTINELIYGINDEQVINVSAIMYQRPFMTKELIEKMVGDCTFEKNEKRAPKASYSFEVFRLASDLSHLVFIPRDASKRQAKRDNLEVRLSPEQISKVIDVAKSQKSLTYKKVRSTAGISEDYVPKDARGKKKDGDKFGEENVFGGLKAYNDIRLALKDLPEDWAKIDNESAINQIAYILTTQKADEGIQAELDSLPLSDKAKEAIVKIKPTNFKAFGHLSIKALQKITPHILEGMTYDKACEAAGYDFKKQSASLEQITNPVVKRAITQTLKVVRAIERKYGKPYFIKVETARDLAKNFKDRNAIKKENEENQGYNEDVKSIITDGYEASPKTKGGKQLLNHLKELNVRLNKNADFNGQQIIKVKLYREQNGVCLYSGKSIDFETMLRDDNAYQVDHIVPFSRSNNDGITNKVLVLTEENQKKGNQTPFEYFGADEKRWKEFAARVESIYKTRDIKIADKAANAINYKYNGYAMKKKQNLLLQDYKNDSWNVRALNDTRYITRFIQNYLRQMVDFAEGEEKQRVIAPNGTTTAYLRKRWGLAKDRAEDVLHHAKDAAVVAAIDNSIVRQANLFAKRGEIAALLSAVKTMEEKTDKLTGEIVDEDEFDRAQRRKDAAIVLSSKYFPQPWDNFGKEVMKRTLNTDIATLQNELRGLDNYDEDFRLNVKPIFVSRMPRRKATAQAHKETIRSPKVKDGDQRTVRMPLNKIKRKDVENSVLKESDKWLYDKFLERLDAHGDNPEKAFAEPIYKNDKKIDKNGKQLSPVSTIKVYSTQPSGFYINDGKAFVNNGSMVRLDVYQKLNKKGKIEHFFVPVYAHQVGKNKPTPTKILPAPKGFTDVDETFTKVCSLYPNDYVRIYLKNKILEGYYSGYDISVGTLILYPHFTPSKDIKVANRVSARSATLIERYDIAILGDNYRWL

SEQ ID NO: 16080 - protein, 1156 aa, unidentified
  REGION 1..1156: note = Cas Enzyme sequence
MAQNSSYLPKKYSLGLDIGTSSVGWAVLDLDKERIHDLGVRIFERPEDPQNGDSLAKPRRDARSARRRLKRRRQRLNHLKQFFVDQNILTKDRVEEVLDYKSDFNKLDVYGLRAKALTEELSPEELLKVLYQIAKRRGFKSNRKVVEESDKEGGRVTSALNTNKKFLADNNYTTVGEALSCDEKFALHKRNKRDDYTNSFARDDFLRELEAIIKTQQNYTLKNVTEQAINELIYGIDDGQVTNVSAIMYQRPFMTKELIEKMVGKCTFEDGEKRAPKASYSFEVFRLASDLSHLVFIPRAASKRQPKRENLEVRLSPEQIKQVIELAKSQKSLTYKKVRSTAGISEDYVPKDVRGKKKDGDEFGEENVFGGLKAYNDIRLALKDLPEDWVKIDNESALNQIAYILTTQKADEGIRAELDTLPLSDKAKEAIVKIKPTNFKAFGHLSIKALQKITPHILEGMTYDKACEAAGYDFKKQSASLEQITNPVVKRAITQTLKVVHAIERKYGKPYFIKVETARDLAKNFKDRNAIKKENEENQGYNEDIKSIITDGYEASPKTKGGKQLLSHLRELNVPLNKNADFNGQQIVKIKLYREQNGVCLYSGNPIDFETMLRDDNAYQVDHIVPFSRSNNDGIANKVLVFTEENQKKADRTPFEYFGTDEQRWEKFVALIETTYKTRDVKTSDKATNAINYKYNGYAMKKKQNLLLQDYKNDSWNVRALNDTRYITRFIQNYLRQNVDFAEGEEKQRVIAPNGTTTAYLRKRWGLAKDRAEDVLHHAKDAAVVAAIDQKIVMQANLYAKHHEIKALLAATKTMEEKTDKLTGEITDEDEFDKAQRRKAAILVLSSKHFPQPWDNFGKEVMKRTLNTDIATLQNELRGLDNYDEDFRLSVKPIFVSREIRHKIRGEAHESKLRSNRNRNGQNIIRIPLTELTLQRLENSLVKEEFDSQKNSNGSSLYEKLLARLNECNGDSKKAFNPPFKLYKGPKQDKNGNPISPVAAVKVYDKKGVVSVGRKANAPVALAEMVRIRVYKKDNQIYMIPDYRINILENKETMELLKPLKKVSKIDNSFNFIGYLYKGDLITIQKDSQTFVGYFVQFEGDNRITIKNHLAVDSSRDSKSTVKRESLSGINYLKIHKVDVLGDVNFSEGIVWPGAS

SEQ ID NO: 16081 - protein, 1098 aa, unidentified
  REGION 1..1098: note = Cas Enzyme sequence
LEYTLGLDIGITSIGWAVLSNDARGEPYHIQDLGVRIFEAAEQPKTGSSLAAPRREARSARRRLRRRRHRKERIKALLVKGGVISQERLDTLFLNSGFPEDVYTLRAEGLDRCLSSEEWVRVLLHLAQRRGYRSNSTAEAAKDKDDGILKQALAGNQSLMKDKGYRTVGEMFCLDEKFQVTGADGRQWRKTRNAPGDYSFTVTRDMIYDEVRALFHAQRSYGNPYAGETLEASYTEILFSQRNFDEGPGGNSPYQKGDLRGSCTFEPDQRRAFKACYTFEYFKLLQDLNHIRILSPALPPRGLSQEERQTLIALALKSPSLDYSKVRKSLGLPQENSFNVVRYGKEDPLEAEKKSKFPQMQSYHKLRKALDAVEKGFILRLTHDQLDDIGTILSLYKADDKRKNALETLGLRPEVIEALLPLSFSKAGNLSLTAMKNLIPYLEQGVNYDAACRAVYGDHRGHFGKQKYKTLTLNQEMRESGALDAITNPVVLRALSQTTKVLNAIIRKYGSPQRISIELAREMRNNFDERRKIEKRNEENRKKNEETMAQIEELKGRRPTGQDLVKFKLYQEQDGICLYSGTQLDIAKLFEPGYVDVDHIIPYSISFDDSYRNKVLVRAAENRQKGNRLPLEYLGSDPTRMEQFITLVERNVRDYRKRQKLLKAKLTEEDLSGFKERNLVDTQYITRAIYNLLNDYLEFSPTAPKKPVRAVNGAVTDYMRKRLGLKKNRDDGDLHHATDAVIVAITTDGMIQRISNYSKRREWGKRFAGQYVDPETGELLSKDTFDEKYAPVFPEPWPGFRQELQARLSPDPDTEIRALHLPHYDMQEIVQPVFVSQMPRRKVTGAAHKGTVRSGKIPGYSISKTPLSALKLGKDGEIAGYYNPNDDRLLYEALRSQLRAFGGNGEKAFVQPFHKPKKDGTPGPVVNKVKTMEKTSLNVETCGGIADNGSMVRIDVYHVPEDGYYLIPIYTSDVVKGVLPQKAAVAGKPYEKWTQMDEKNFIFSLYPGDLIYIKAKKLINLKVKNKNATGEPELLRKEWMVYYTGADISTGSITITTHDRKYRKSGLGIKTLLSMEKYEVDPLGSYHKVQLPEKRQHF

SEQ ID NO: 16082 - protein, 1088 aa, unidentified
  REGION 1..1088: note = Cas Enzyme sequence
MGGENNMKYKIGLDIGITSIGWAVINLDIPRIEDLGVRIFDRAENPKTGESLALPRRLARSARRRLRRRKHRLERIRRLFIREGILTKEELNKLFEKKHEIDVWQLRVEALDRKLNNDELARILLHLAKRRGFRSNRKSERTNKENSTMLKHIEENQSILSSYRTVAEMVVKDPKFSLHKRNKEDNYTNTVARDDLEREIKLIFAKQREYGNIVCTEAFEHEYISIWASQRPFASKDDIEKKVGFCTFEPKEKRAPKATYTFQSFTVWEHINKLRLVSPGGIRALTDDERRLIYKQAFHKNKITFHDVRTLLNLPDDTRFKGLLYDRNTTLKENEKVRFLELGAYHKIRKAIDSVYGKGAAKSFRPIDFDTFGYALTMFKDDTDIRSYLRNEYEQNGKRMENLADKVYDEELIEELLNLSFSKFGHLSLKALRNILPYMEQGEVYSTACERAGYTFTGPKKKQKTVLLPNIPPIANPVVMRALTQARKVVNAIIKKYGSPVSIHIELARELSQSFDERRKMQKEQEGNRKKNETAIRQLVEYGLTLNPTGLDIVKFKLWSEQNGKCAYSLQPIEIERLLEPGYTEVDHVIPYSRSLDDSYTNKVLVLTKENREKGNRTPAEYLGLGSERWQQFETFVLTNKQFSKKKRDRLLRLHYDENEENEFKNRNLNDTRYISRFLANFIREHLKFADSDDKQKVYTVNGRITAHLRSRWNFNKNREESNLHHAVDAAIVACTTPSDIARVTAFYQRREQNKELSKKTDPQFPQPWPHFADELQARLSKNPKESIKALNLGNYDNEKLESLQPVFVSRMPKRSITGAAHQETLRRYIGIDERSGKIQTVVKKKLSEIQLDKTGHFPMYGKESDPRTYEAIRQRLLEHNNDPKKAFQEPLYKPKKNGELGPIIRTIKIIDTTNQVIPLNDGKTVAYNSNIVRVDVFEKDGKYYCVPIYTIDMMKGILPNKAIEPNKPYSEWKEMTEDYTFRFSLYPNDLIRIEFPREKTIKTAVGEEIKIKDLFAYYQTIDSSNGGLSLVSHDNSFSLRSIGSRTLKRFEKYQVDVLGNIYKVRGEKRVGVASSSHSKAGETIRPL

SEQ ID NO: 16083 - protein, 1016 aa, unidentified
  REGION 1..1016: note = Cas Enzyme sequence
MTNQSPNTNYRLALDLGTNSIGWAVLSLDSQNQPTSIIDGNSFIFNNSRDPQSKESLAKARRDARQARPQRDRRLKRKKQIIRFLSENNLFPKEKADQKNLEKLDPYKLRFEALSRPLDPFELGRVLFALGQRRGYKSSRKDGQKTDDGKLLKTLNAFETTFEESGYQTLGEYLWKEKQTQLDGDLSNNIQRVYGVRSRAEADPFPYRDLYEQEFDCIRTHQEPHHALSTDDWEKIRDIIYFQRPLKPVERGYCSIYFNDKKPRADRYLPAAETFIAWQTVHNLRIITPNFEKKTLTLDQKSIIISKLSEQKTLAFKKIKSLLNLDDACHFNLESTTKQLTGMPTHIEFKKLIDAWDSFSESKKNEIVSGVFTSENQSEIIQKATTNWGLSEATAQALANLDVSKFATGTLHFCTDALEQLNTLMKKNMDAYEAKQELQKTIAQPTHTTMATLPYYGYVIPEALTNSGKHRTASAEKETGIIGNPTVHVGLNNIRAVVNAVIARMGHPPTAIHLEIARDLKLSATKKSALEKYQKENKKTNERIAAALAELNQANTYTNRLKYKLWEELGEPKLCVYTGKPISAAQLYGDDVDIEHILPLTRTHDDSPANKTLSFRSANKEKGNKSPFEAFGHTLEFESILHRAQSLPKHKHWRFSEAAMDRFNDQFAFLDRQLHDTQYLSKVAKQYLHAICDTVSVVTGQLTAKLRHDWGLKKDRDNHHHHFIDAVVIGLTDASTVQKANVYSKYDRLEAIQFPCPLDKSALHKQLEAITSTRIVYHKKTIRNNGQLHEATNYGYIPEDKRNPSDKKFNLVYRKAFVDLTKKEIAQIRDISIRNTLMERTQGLADNSKEWKSVLDRYSQETGIKQIRLLKTDNPIIPIRHNGHTKWVVPGSSNHHMKVWQLPNGKVAGVIVRLLDINNPNYGTQSFRPKDKAGREIPTAKYLGKLHKGDMISLIHKGTRCTGVIKGLRQNGQIVFKPHNDGGDKSNETISISKWITAEITILQLTVLGDARHTHS

SEQ ID NO: 16084 - protein, 1102 aa, unidentified
  REGION 1..1102: note = Cas Enzyme sequence
MRYTIGLDVGTASVGWAIINNDLNRIEDLGVRVFESAENSKDGESLAKPRREARSLRRRLDRRGYRLNRIKSLFQQYDLLTENEIIQAHSIANNPYEIRTKALDKIVSDKELFISIYHIAKRRGYKSNRKKADEGDDEARVVLSSAKRNKELLSEKYRTAGEMLFKDELFIDSKRNKGGSYKKCILRESLINEVETILIKQKELGNKKITNEFYNDIVDAVSHQKPFASGDDIKNKVGNCIFEKEEMRAAKATPSFQLFNFLQKINHIKIKNKETGEERSLSDRERQLIIEKAYNQKKINFNSLRKSLNLSDKEKFNINSYFIKKKEAEDKTEEEIIKTIETKEKIPSLETIYIFKDKFSDYWNEFKDKRDVLDKTAEILTIYKTDSDITKHLEEIKLPSEVIDNLLSLSFNKFGHLSLKALNKIIPFLEEGFTYDESCKKAGYDFKASGKNQNYKLPPIDKEEVLITNPVVKRSVSQTIKVVNAIIDRFGSPESVNIELARDLNKDLIERRNIQKIQKENRENNEKAKESIEENFKLEQVRGQDIIRMRLYKEQNGKCIYSGKTIDENRLFEDGYTEIDHIIPFSRSFNDSFNNKVLVFSSSNQDKLNRSPYEWLGGDENIWKDFEARVLSMKGISYRKRQNLLTKKVAKDDLITRSLNDTRYASKFLKNYIQRNLKFSESDKKNKVLTINGQATAYIRKRLGLNKDRQENDRHHAQDAVIAATVNPALINKINRFAKYKELSKYLECGKKLDRIKDEEEKEFFDREIIDEAKNFVSTHNRRFSFKDEQPWDNFSHEVRARMSDDPINEIKTIKNRLGGYKDCLDLSFIRPIFVSRMPKRKVTGPAHAETLKSPKGFNKGKLYSSVKTPLNKIKLKDIDNIAGGEKLLKEALRKRLEKYDNDPQKAFSEDNPFYKPNNDGTNGPLVRSIRLIDKKQKSGLLINDKKALVDQQSMIRIDIFSKADNKGKKKYYIIPVYAYHFAGNKLPNKVVVSGKPESEWLEIDESYDFMFSLYPNDLVKLVKGSNEKFGYYISCNRAIAAIDIKSHDSSEYWQSNGIKTLDKIEKYVVDILGRCHPVRKEKRQGINIKGRHRNSDVLENS

SEQ ID NO: 16085 - protein, 1102 aa, unidentified; identical to SEQ ID NO: 16084
  REGION 1..1102: note = Cas Enzyme sequence

SEQ ID NO: 16086 - protein, 1100 aa, unidentified
  REGION 1..1100: note = Cas Enzyme sequence
MSEFHYALGLDIGIGSVGWAVLRNQPNGEPDRIQDLGVRIFDKAEQPKTGASLAAPRRDARSARRRLRRHRHRLERIRYLMEQRGIMSVSDIQAMYAAGGFQKSPYQLRAEALDRPLTKEEAVRVLIHLAQRRGYKSNSIAEAAKDEKETGKVKTAIEENRRCMAEHGYRTVGEMMYRDERFWQKHPDGTRYHQTRNKTDDYRFTVERSAIVDEAKQIFAAQRKLGADWSSEDLEAAYLSILEGQRSFDEGPGGESPFRGGIGDKVGFCTFEPDQQRAAKATYTFEYFKLLQDLNRMRLTGMGMPPEPLDDEQREVLKSAALRSASLSYGQIRKKLNLDDDVFFNDLYYGEKTKEEAEKRKWPQMQSYHKMRTALDKVGKDTIGTLTEEQLNAIATILTECKSDAKRIAALRMAGIPVQFDEALLPLSFSKYGSLSVQAMQKLIPLLEQGMRYDEACTQIYGDHRGLHSEQRKNRLSLTDMDEITNPVVRRAVSQTIKVINAIVRTYGPPDVVRIELAREMSRNFDERRKAEKRQDENRAANERAKEQIAEYKGDHATGLDIVKFKLYQEQDGVCLYSGKNLDPSRLFEPGYADVDHIVPYSRCFDDSYQNKVLVLTSENRQKGNRLPYEYFGYDEVRWHEYEVRVENLIRNYRKRQKLLKRQLSEEESAGFIDRNLKDTQYITRSIYNLIRNNLVFAESNYKKRPVQTVNGAVTSMLRNRWGVQKIREDGDLHHCLDAAVIAATTPGLVQRLTEHSKRRETLEKAPAGYVDPATGELLELPQEARRDLFPKPWERFRQELEARLDPIDPRHQIDLLKLSTYESDEEIKPVFVSRMPNHKVTGAAHAETIRSSKGGDGFTVTKTPLTNLKLNKFGEIEGYYNPASDMLLYDALLLRLKDFGGDGAKAFAQPFYKPKKDGTPGPRVDKVKICEKATIGLPVRNGIAANGSMIRIDVFYVEDDGYYFVPIYVADTKKENLPNKAVVAYKAYSDWKEMRDEDFVFSLYPGDLVCIQSRKGIKLNLAKGGTGEKEVVRQKGMYYYRAAGITVGAIQIETHDRRYLQPSLGIKTLQSIEKYQVDVLGNYHKVDLPEKRMTFSKEG

SEQ ID NO: 16087 - protein, 1100 aa, unidentified
  REGION 1..1100: note = Cas Enzyme sequence
MSEFHYALGLDIGIGSVGWAVLRNQPNGETDRIQDLGVRIFDKAEQPKTGASLAAPRRDARSARRRLRRHRHRLERIRYLMEQRGMMSVSDIQAMYAAGGFQKSPYQLRAEALDRPLSKEEAVRVLIHLAQRRGYKSNSTAEAAKDEKEAGKVKTAIEENRRCMAEHGYRTVGEMMYRDERFWQSNPDGTRYQQTRNKTDDYRFTVERSAIVDEAKQIFAAQRKMGADWSSEDLEAAYLSILEGQRSFDEGPGGESPFRGGIGDKVGFCTFEPDEKRAAKTTYTFEYFKLLQDLNRMRLTGMGMPPEPLDDEQREVLKSAALRSASLSYGQIRKKLNLDDDVFFNDLYYGEKTKEEAEKRKWPQMQSYHKMRTALDKVGKDTIGTLTEEQLNAIATILTECKSDAKRIAALRMAGIPVQFDEALLPLSFSKYGSLSVQAMQKLIPLLEQGMRYDEACTQIYGDHRWLHSEQRKNRLSLTDMDEITNPVVRRAVSQTIKVINAIVSTYGPPDVVRIELAREMSRNFDERRKAEKRQDENRAANERAKEQIAEYKGDHATGLDIVKFKLYQEQDGVCLYSGKNLDPSRLFEPGYADVDHIVPYSRCFDDSYQNKVLVLASENRQKGNRLPYEYFGYDEVRWHEYEVRVENLIRNYRKRQKLLKRQLSEEESAGFIDRNLKDTQYITRSIYNLIRNNLVFAESNYKKRPVQTVNGAVTSMLRNRWGVQKIREDGDLHHCLDAAVIAATTPGLVQRLTEHSKRRETLEKAPAGYVDPATGELLELPQEARRDLFPKPWERFRQELEARLDPIDPRHQIDLLKLETYESDEEIKPVFVSRMPNHKVTGAAHAETIRSSKGGDGFTVTKTPLTNLKLNKFGEIEGYYNPASDTLLYDALLARLKDFGGDGAKAFAQPFYKPKKDGTPGPRVDKVKICEKATIGLPVRNGIAANGSMIRIDVFYVEDDGYYFVPIYVADTKKENLPNKAVVAYKAYSDWKEMRDEDFVFSLYPGDLVCIQSRKGIKLNLAKGGTGEKEIVRQKGMYYYRAAGITVGAIQIETHDRRYLQPSLGIKTLQSIEKYQVDVLGNYHKVDLPEKRMTFSKEG

SEQ ID NO: 16088 - protein, 1100 aa, unidentified
  REGION 1..1100: note = Cas Enzyme sequence
MSEFHYALGLDIGIGSVGWAVLRNQPNGEPDRIQDLGVRIFDKAEQPKTGASLAAPRRDARSARRRLRRHRHRLERIRYMMEQRGMMSVSDIQAMYAAGGFQKSPYQLRAEALDRPLSKEEAVRVLIHLAQRRGYKSNSTAEAAKDEKETGKVKTAIEENRRCMAEHGYRTVGEMMYRDERFWQSNPDGTRYQQTRNKTDDYRFTVERSAIVDEAKQIFAAQRKLGADWSSEDLEAAYLSILEGQRSFDEGPGGESPFRGGIGDKVGFCTFEPDQQRAAKATYTFEYFKLLQDLNRMRLTGMGMPPEPLDDEQREVLKSAALRSASLSYGQIRKKLNLDDDVFFNDLYYGEKTKEEAEKRKWPQMQSYHKMRTALDKVGKDTIGTLSEEQLNAIATILTECKSDAKRIAALRMAGIPVQFDEALLPLSFSKYGSLSVQAMQKLIPLLEQGMRYDEACTQIYGDHRGLHSEQRKNRLSLTDMDEITNPVVRRAVSQTIKVINAIVRTYGPPDVVRIELAREMSRNFDERRKAEKRQDENRAANERAKEQIAEYKGDHATGLDIVKFKLYQEQDGVCLYSGKNLDPSRLFEPGYADVDHIVPYSRCFDDSYQNKVLVLASENRQKGNRLPYEYFGYDEVRWHEYEVRVENLIRNYRKRQKLLKRQLSEEESAGFIDRNLKDTQYITRSIYNLIRNNLVFAESNYKKRPVQTVNGAVTSMLRNRWGVQKIREDGDLHHCLDAAVIAATTPGLVQRLTEHSKRRETLEKAPAGYVDPATGELLELPQEARRDLFPKPWERFRQELEARLDPIDPRHQIDLLKLSTYESDEEIKPVFASRMPNHKVTGAAHAETIRSSKGGDGFTVTKTPLTNLKLNKFGEIEGYYNPASDTLLYNALLSRLKDFGGDGAKAFAQPFYKPKKDGTPGPRVDKVKICEKATIGLPVRNGIAANGSMIRIDVFYVEDDGYYFVPIYVADTKREKLPNKAAVAMKPYNLWKEMKDENFVFSLYPGDLVRIQSRKGIKLNLAKGGTGEKEIVRQDGMYYYRSAGIAVAQIFVETHDRRYLQPSLGIKTLQSIEKYQVDVLGNYQKVDLPEKRMTFSKEG

SEQ ID NO: 16089 - protein, 1100 aa, unidentified
  REGION 1..1100: note = Cas Enzyme sequence
MSEFHYALGLDIGIGSVGWAVLRNQPNGEPDRIQNLGVRIFDKAEQPKTGASLAAPRRDARSARRRLRRHRHRLERIRYMMEQRGMMSVSDIQAMYAAGGFQKSPYQLRAEALDRPLSKEEAVRVLIHLAQRRGYKSNSTAEAAKDEKETGKVKTAIEENRRCMAEHGYRTVGEMMYRDERFWQSNPDGTRYQQTRNKTDDYRFTVERSAIVDEAKQIFAAQRKLGTDWSSKDLEAAYLSILEGQRSFDEGPGGESPFRGGIGDKVGFCTFEPDQQRAAKATYTFEYFKLLQDLNRMRLTGMGMPPEPLDDEQREVLKSAALRSASLSYGQIRKKLNLDDDVFFNDLYYGEKTKEEAEKRKWPQMQSYHKMRTALDKVGKDTIGTLTEEQLNAIATILTECKSDAKRIAALRMAGIPVQFDEALLPLSFSKYGSLSVQAMQKLIPLLEHGMRYDEACTQIYGDHRGLHSEQRKNRLSLTDMDEITNPVVRRAVSQTIKVINAIVRTYGPPDVVRIELAREMSRNFDERRKAEKRQDENRAANERAKEQIAEYKGDHATGLDIVKFKLYQEQDGVCLYSGKNLDPSRLFEPGYADVDHIVPYSRCFDDSYQNKVLVLASENRQKGNRLPYEYFGYDEVRWHEYEVRVENLIRNYRKRQKLLKRQLSEEESAGFIDRNLKDTQYITRSIYNLIRNNLVFAESNYKKRPVQTVNGAVTSMLRNRWGVQKIREDGDLHHCLDAAVIAATTPGLVQRLTEHSKRRETLEKAPAGYVDPATGELLELPQEARCDLFPKPWERFRQELEARLNPIDPRHQIDLLKLSTYESDEEIKPVFVSRMPNHKVTGAAHAETIRSRKGGDGFTVTKTPLTNLKLNKFGEIEGYYNPASDTLLYNALLSRLKDFGGDGAKAFAKPFYKPKKDGTPGPRVDKVKICEKATIGLPVRNGIAVNGSMIRIDVFYVEDDGYYFVPIYVADTKREKLPNKAAVAMKPYNLWKEMKDENFVFSLYPGDLVRIQSRKGIKLNLAKGGTGEKEIVRQDGMYYYRSAGIAVAQIFVETHDRRYLQPSLGIKTLQSIEKYQVDVLGNYQKVDLPEKRMTFSKEG

SEQ ID NO: 16090 - protein, 1100 aa, unidentified
  REGION 1..1100: note = Cas Enzyme sequence
MSEFHYALGLDIGIGSVGWAVLRNQPNGEPDRLQDLGVRIFDKAEQPKTGASLAAPRRDARSARRRLRRHRHRLERIRYLMEQRGIMPVLDIQAMYAAGGFQKSPYQLRAEALDRPLTKEEAVRVLIHLAQRRGYKSNSTAEAAKDEKETGKVKTAIEENRRCMAGHGYRTVGEMMYRDERFWQKHPDGTRYHQTRNKAEDYRFTVERAAIVDEVRQIFAAQRRLGTAWMDEDMETAYLSILESQRSFDEGPGGDSPFSGGIGERVGACTFEPDEKRAAKATYTFEYFKLLQDLNRMRLTGMGMPPEPLDAAQREVLKSAALRSASLSYGQIRKKLNLDDDVFFHGLYYGEKTKEEAEKRKWPQMQSYHKMRTALDKVGKGAIGTLTEEQLNAVATILTECKSDAKRIAALREAGIPPQFDEALLPLSFSKYGSLSVRAMQKLIPLLEEGLRYDEACTRVYGDHRGLRPEQRKNRLSLTDMEEITNPVVRRAVSQTIKVINAVVRTYGPPDVVRIELAREMSRTFDERRKMEKRQDDNRAANERAKDQIAEYKGDHATGLDIVKFKLYREQDGVCLYSGQNLDIARLFEPGYADVDHIIPYSRCFDDSYQNKVLVLVSENRQKGNRLPYEYFGQDEARWHGYEVRVENLIHNYRKRQKLLKRRLTEEESTGFIDRNLKDTQYITRAVYNLIRDHLAFAESAYRKKPVQAVNGAVTAMLRGRWGVQKIREDGDLHHCLDAAVIAATTPGLVQRLTAYNKHRETWERPPAGYVDPATGELIELPQEARRDPFPKPWERFRQELEARLDPIDPRHQIDLLKLETYESDEEIKPVFVSRMPNHKVTGAAHAETIRSSKGGDGFTVTKTPLTNLKLNKFGEIEGYYNPASDTLLYDALLARLKDFGGDGAKAFAQPFYKPKKDGSPGPRVDKVKICEKATVGLPVRDGIAANGSMVRIDVFYVEDDGYYFVPIYVADTKKERLPSKAPVAHKAYSAWKEMQDENFIFSLYPGDLVRIQSCAGIKLSLAKDGTGEKEIVQQNGLYYYRSADIEGGKIDIEVHDRRYSKHGLGLKTLQSIEKYQVDVLGNYYKVDLPEKRMTFSKEG

SEQ ID NO: 16091 - protein, 1100 aa, unidentified
  REGION 1..1100: note = Cas Enzyme sequence
MSEFHYALGLDIGIGSVGWAVLRNQPNGEPDRIQDLGVRIFDKAEQPKTGASLAAPRRDARSARRRLRRHRHRLERIRYLMEQRGIMPVADIQAMYAAGGFQKSPYQLRAEALDRPLTKEEAVRVLIHLAQRRGYKSNSTAEAAKDEKETGKVKTAIEENRRCMAEHGYRTVGEMMYRDERFWQKHPDGTRYHQTRNKAEDYRFTVERAAIVDEVRQIFAAQRRLGTVWMDEDMETAYLSILESQRSFDEGPGGDSPFSGGIGERVGACTFEPDEKRAAKATYTFEYFKLLQDLSRMRLTGMGIPPEPLDAAQREVLKSAALRSASLSYGQIRKKLNLDDDVFFHGLYYGEKTKEEAEKRKWPQMQSYHKMRTALDKVGKGAIGTLTEEQLNAVATILTECKSDAKRIAALREAGIPPQFDEALLPLSFSKYGSLSVQAMQKLIPLLEKGLRYDEACTRVYGDHRGLRPEQRTNRLSLKDMEEITNPVVRRAVSQTIKVINAVVRTYGLPDVVRIELAREMSRTFDERRKMEKRQDDNRAANERAKDQIAEYKGDHATGLDIVKFKLYREQDGVCLYSGQNLDIARLFEPGYADVDHIIPYSRCFDDSYQNKVLVLASENRQKGNRLPYEYFGQDEARWHGYEVRVENLIHNYRKRQKLLKRQLTEEESTGFIDRNLKDTQYITRAVYNLIRDHLAFAESNYRKKPVQAVNGAVTAMLRGRWGVQKIREDGDLHHCLDAAVIAATTPGLVQRLTAYNKHRETWERSPAGYVDPATGELIELLQEARRDPFPKPWERFRQELEARLDPIDPRHQIDLLKIETYESDEEIKPVFVSRMPNHKVTGAAHAETIRSSKGGDGFTVTKTPLTNLKLNKFGEIEGYYNPASDTLLYDALLARLKDFGGDGAKAFAQPFYKPKKDGTPGPRVDKVKICEKATVGLPVRDGIAANGSMVRIDVFYVEDDGYYFVPIYVADTKKESLPNKAVVAYKAYSEWKEMKDENFIFSLYPGDLVRIQSRKGIKLTLTKGGTGEPEIVRQQGMYYYQTANISSGAVTISTHDRRYSQSSLGIKTLQSIEKYQVDVLGNYYKVDLPEKRMTFSKEG

SEQ ID NO: 16092 - protein, 1100 aa, unidentified
  REGION 1..1100: note = Cas Enzyme sequence
MSEFHYALGLDIGIGSVGWAVLRNQPNGEPDRIQDLGVRIFDKAEQPKTGASLAAPRRDARSARRRLRRHRHRLERIRYLMEQRGIMPVADIQAMYAAGGFQKSPYQLRAEALDRPLTKEEAVRVLIHLAQRRGYKSNSTAEAAKDEKETGKVKTAIEENRRCMAEHGYRTVGEMMYWDERFWQKHPDGTRYHQTRNKAEDYRFTVERAAIVDEVRQIFAAQRRLGTVWMDEDMETDYLSILESQRSFDEGPGGDSPFFGGIGERVGACTFEPDEKRAAKATYTFEYFKLLQDLSRMRLTGMGMPPEPLDAAQREVLKSAALRSASLSYGQIRKKLNLDDDVFFHGLYYGEKTKEEAEKRKWPQMQSYHKLRTALDKVGKGAIGTLTEEQLNAVATILTECKSDAKRIAALREAGIPPQFDEALLPLSFSKYGSLSVRAMQKLIPLLEEGLRYDEACTRVYGDHRGLRPEQRKNRLSLTDMEEITNPVVRRAVSQTIKVINAVVRTYGPPDVVRIELAREMSRTFDERRKMEKRQDDNRAANERAKDQIAEYKGDHATGLDIVKFKLYREQDGVCLYSGQNLDIARLFEPGYADVDHIIPYSRCFDDSYQNKVLVLASENRQKGNRLPYEYFGQDEARWHGYEVRVENLIHNYRKRQKLLKRRLTEEESTGFIDRNLKDTQYITRAVYNLIRDHLAFAESNYRKKPVQAVNGAVTAMLRGRWGVQKIREDGDLHHCLDAAVIAATTPGLVQRLTAYNKHRETWERSPAGYVDPATGELIELPQEARRDPFPKPWERFRQELEARLDPIDPRHQIDLLKLETYESDEEIKPVFVSRMPNHKVTGAAHAETIRSSKGGDGFTVTKTPLTNLKLNKFGEIEGYYNPASDTLLYDALLARLKDFGGDGAKAFVQPFYKPKKDGSPGPRVDKVKICEKATVGLPVRDGIAANGSMVRIDVFYVEDDGYYFVPIYVADTKKESLPNKAVVAYKAYSEWKEMKDENFIFSLYPGDLVRIQSRKGIKLNLAKGGTGEKEIVRQEGMYYYRASGITVGAIQIETHDRRYLQPSLGIKTLQSIEKYQVDVLGNYYKVDLPEKRMTFSKEG

SEQ ID NO: 16093 - protein, 1100 aa, unidentified
  REGION 1..1100: note = Cas Enzyme sequence
MSEFHYALGLDIGIGSVGWAVLRNQPNGEPDRIQDLGVRIFDKAEQPKTGASLAAPRRDARSARRRLRRHRHRLERIRYLMEQRGIMPVADIQAMYAAGGFQKSPYQLRAEALDRPLIKEEAVRVLIHLAQRRGYKSNSTAEAAKDEKETGKVKTVIEENRRCMAEYGYRTVGEMMYRDERFWQKHPDGTRYHQTRNKAEDYRFTVERAAIVDEVRQIFAAQRKLGVVWMDEDMETAYLSVLESQRSFDEGPGGDSPFSGGIGERVGACTFEPDEKRAAKATYTFEYFKLLQDLNRMRLTGMGMPPEPLDDEQREVLKSAALRSASLSYGQIRKKLNLDDDVFFNDLYYGEKTKEEAEKRKWPQMQSYHKLRMALDKVGKGAIGTLTEEQLNAIATILTECKSDAKRIAALREAGIPPQFDEALLPLSFSKYGSLSVRAMQKLIPLLEEGLRYDEACTRVYGDHRGLRSEQRTNRLSLNDMEEITNPVVRRAVSQTIKVINAVVRTYGPPDVVRIELAREMSRTFDERRKMEKRQDDNRAANEQAKDQIAEYKGDHATGLDIVKFKLYREQDGVCLYSGQNLDIARLFEPGYADVDHIIPYSRCFDDSYQNKVLVLASENRQKGNRLPYEYFGQDEARWHGYEVRVENLIHNYRKRQKLLKRRLTEEESSGFIDRNLKDTQYITRAVYNLIRDHLAFAESNYRKKPVQAVNGAVTSMLRGRWGVQKIREDGDLHHCLDAAVIATTTPGLVQRLTAYNKHRETWERPPAGYVDPATGELIELPQEARRDPFPKPWERFRQELEARLDPIDPRHQIDLLKLETYESDEEIKPVFVSRMPNHKVTGAAHAETIRSSKGGDGFTVTKTPLTNLKLNKFGEIEGYYNPASDTLLYDALLARLKDFGGDGAKAFAQPFYKPKKDGSPGPRVDKVKICEKATVGLPVRDGIAANGSMIRIDVFYVEDDGYYFVPIYVADTKKESLPNKAVVAYKAYSEWKEMKDENFIFSLYPGDLVRIQSRKGIKLNLAKGGTGEKEIVRQEGMYYYRAAGITVGAIQIETHDRRYLQPSLGIKTLQSIEKYQVDVLGNYYKVDLPEKRMTFSKEG

SEQ ID NO: 16094 - protein, 1100 aa, unidentified
  REGION 1..1100: note = Cas Enzyme sequence
MSEFHYALGLDIGIGSVGWAVLRNQPNGEPDRIQDLGVRIFDKAEQPKTGASLAAPRRDARSARRRLRRHRHRLERIRYLMEQRGIMPVADIQAMYAAGGFPKSPYQLRAEALDRPLTKEEAVRVLIHLAQRRGYKSNSTAEAAKDEKETGKVKTAIEENRRCMAEHGYRTVGEMMYRDERFWQKHPDGTHYHQTRNKAEDYRFTVERAAIVDEVRQIFAAQRRLGTVWMDEDMETAYLSILESQRSFDEGPGGDSPFSGGIGERVGACTFEPDEKRAAKATYTFEYFKLLQDLSRMRLTGMGMPPEPLDAAQREALKSAALRSASLSYGQIRKKLNLDDDVFFHGLYYGEKTKEEAEKRKWPQMQSYHKMRTALDKVGKGAIGTLTEEQLNAVATILTECKSDAKRIAALREAGIPPQFDEALLPLSFSKYGSLSVQAMQKLIPLLEEGLRYDEACTRVYGDHRGLHPEQRKNRLSLTDMDEITNPVVRRAVSQTIKVINAVVRTYGPPDVVRIELAREMSRTFDERRKMEKRQDDNRAANERAKDQIAEYKGDHATGLDIVKFKLYREQDGVCLYSGQNLDIARLFEPGYADVDHIIPYSRCFDDSYQNKVLVLASENRQKGNRLPYEYFGQDEARWHGYEVRVENLIHNYRKRQKLLKRRLTEEESSGFIDRNLKDTQYITRAVYNLIRDHLAFAESNYRKKPVQAVNGAVTAMLRGRWGVQKIREDGDLHHCLDAAVIAATTPGLVQRLTAYNKHRETWERSPAGYVDPATGEMLELPQEARRDPFPKPWERFRQELEARLDPIDPRHQIDLLKLETYESDEEIKPVFVSRMPNHKVTGAAHAETIRSSKGGYGFTVTKTPLTNLKLNKFGEIEGYYNPASDTLLYDALLARLKDFGGDGAKAFAQPFYKPKKDGSPGPRVDKVKICEKATVGLPVRDGIAANGSMVRIDVFYVEGDGYYFVPIYVADTKKESLPNKAAVAMKPYNLWKKMKDENFVFSLYPGDLVRIQSRKGIKLNLAKGGTGEKEIVRQEGMYYYRSAGIAVAQISVETHDRRYLQPSLGIKTLQSIEKYQVDVLGNYYKVDLPEKRMTFSKEG

SEQ ID NO: 16095 - protein, 1100 aa, unidentified
  REGION 1..1100: note = Cas Enzyme sequence
MSEFHYALGLDIGIGSVGWAVLRNQPNGEPDRIQDLGVRIFDKAEQPKTGASLAAPRRDARSARRRPRRHRHRLERIRYLMEQRGIMPVADIQAMYAAGGFQKSPYQLRAEALDRPLTKEEAVRVLIHLAQRRGYKSNSTAEAAKDEKETGKVKTAIEENRRCMAEHGYRTVGEMMYRDERFWQKHPDGTRYHQTRNKAEDYRFTVERAAIVDEVRQIFAAQRRLGTAWMDEYMETAYLSILESQRSFDEGPGGDSSFSGGIGERVGACTFEPDEKRAAKATYTFEYFKLLQDLSRMRLTGMGMPPEPLDAAQREVLKSAALRSASLSYGQIRKKLNLDDDVFFHGLYYGEKTKEEAEKRKWPQMQSYHKMRTALDKVGKGAIGTLTEEQLNAVATILTECKSDAKRIAALREAGIPPQFDEALLPLSFSKYGSLSVQAMQKLIPLLEEGLRYDEACTRVYGDHRGLHPEQRKNRLSLTDMDEITNPVVRRAVSQTIKVINAVVRTYGPPDVVRIELAREMSRTFDERRKMEKRQDDNRAANERAKDQIAEYKGDHATGLDIVKFKLYREQDGVCLYSGQNLDIARLFEPGYADVDHIIPYSRCFDDSYQNKVLVLASENRQKGNRLPYEYFGQDEARWHGYEVRVENLIHNYRKRQKLLKRRLTEEESSGFIDRNLKDTQYITRAVYNLIRDHLAFAESNYRKKPVQAVNGAVTAMLRGRWGVQKIREDGDLHHCLDAAVIAATTPGLVQRLTAYNKHRETWERSPAGYVDPATGEMIELPQEARRDPFPKPWERFRQELEARLDPIDPRHQIDLLKLETYESDEEIKPVFVSRMPNHKVTGAAHAETIRSSKGGDGFTVTKTPLTNLKLNKFGEIEGYYNPASDTLLYDALLARLKDFGGDGAKAFAQPFYKPKKDGSPGPRVDKVKICEKATVGLPVRDGIAANGSMVRIDVFYVEGDGYYFVPIYVADTKKESLPNKAAVAMKPYNLWKKMKDENFVFSLYPGDLVRIQSRKGIKLNLAKGGTGEKEIVRQEGMYYYRSAGIAVAQISVETHDRRYLQPSLGIKTLQSIEKYQVDVLGNYYKVDLPEKRMTFSKEG

SEQ ID NO: 16096 - protein, 1100 aa, unidentified
  REGION 1..1100: note = Cas Enzyme sequence
MSEFHYALGLDIGIGSVGWAVLRNQPNGEPDRIQDLGVRIFDKAEQPKTGASLAAPRRDARSARRRLRRHRHRLERIRYLMEQRGIMPVADIQAMYAAGGFPKSPYQLRAEALDRPLTKEEAVRVLIHLAQRRGYKSNSTAEAAKDEKETGKVKTAIEENRRCMAEYGYRTVGEMMYRDERFWQKHPDGTHYHQTRNKAEDYRFTVERAAIVDEVRQIFAAQRRLGTVWMDEDMETAYLSILESQRSFDEGPGGDSPFSGGIGERVGACTFEPDEKRAAKATYTFEYFKLLQDLSRMRLTGMGMPPEPLDAAQREALKSAALRSASLSYGQIRKKLNLDDDVFFHGLYYGEKTKEEAEKRKWPQMQSYHKMRTALDKVGKGAIGTLTEEQLNAVATILTECKSDAKRIAALREAGIPPQFDEALLPLSFSKYGSLSVQAMQKLIPLLEEGLRYDEACTRVYGDHRGLRSEQRTNRLSLNDMEEITNPVVRRAVSQTIKVINAVVRTYGPPDVVRIELVREMSRTFDERRKMEKRQDDNRAANERAMDQIAEYKGDHATGLDIVKFKLYREQDGVCLYSGQNLDIARLFEPGYADVDHIIPYSRCFDDSYQNKVLVLASENRQKGNRLPYEYFGQDEARWHGYEVRVENLIHNYRKRQKLLKRRLTEEESSGFIDRNLKDTQYITRAVYNLIRDHLAFAESAYRKKPVQAVNGAVTAMLRGRWGVQKIREDGDLHHCLDAAVIAATTPGLVQRLTAYNKHRETWERSPAGYVDPATGEMLELPQEARRDPFPKPWERFRQELEARLDPIDPRHQIDLLKLETYESDEEIKPVFVSRMPNHKVTGAAHAETIRSSKGGYGFTVTKTPLTNLKLNKFGEIEGYYNPASDTLLYDALMARLKDFGGDGAKAFAQPFYKPKKDGSPGPRVDKVKICEKATVGLPVRDGIAANGSMVRIDVFYVEGDGYYFVPIYVADTKKESLPNKAAVAMKPYNLWKKMKDENFVFSLYPGDLVRIQSRKGIKLNLAKGGTGGKEIVRQEGMYYYRSAGIAVAQISVETHDRRYLQPSLGIKTLQSIEKYQVDVLGNYYKVDLPEKRMTFSKEG

SEQ ID NO: 16097 - protein, 1100 aa, unidentified
  REGION 1..1100: note = Cas Enzyme sequence
MSEFHYALGLDIGIGSVGWAVLRNQPNGEPDRIQDLGVRIFDKAEQPKTGASLAAPRRDARSARRRLRRHRHRLERIRYLMEQRGIMPVADIQAMYAAGGFPKSPYQLRAEALDRPLTKEEAVRVLIHLAQRRGYKSNSTAEAAKDEKETGKVKTAIEENRRCMAEYGYRTVGEMMYRDERFWQKHPDGTHYHQTRNKAEDYRFTVERAAIVDEVRQIFAAQRRLGTVWMDEDMETAYLSILESQRSFDEGPGGDSPFSGGIGERVGACTFEPDEKRAAKATYTFEYFKLLQDLSRMRLTGMGMPPEPLDAAQREALKSAALRSASLSYGQIRKKLNLDDDVFFHGLYYGEKTKEEAEKRKWPQMQSYHKMRTALDKVGKGAIGTLTEEQLNAVATILTECKSDAKRIAALREAGIPPQFDEALLPLSFSKYGSLSVRAMQKLIPLLEEGLRYDEACTRVYGDHRGLRPEQRTNRLSLNDMEEITNPVVRRAVSQTIKVINAVVRTYGPPDVVRIELAREMSRTFDERRKMEKRQDDNRAANERAKDQIAEYKGDHATGLDIVKFKLYREQDGVCLYSGQNLDIARLFEPGYADVDHIIPYSRCFDDSYQNKVLVLASENRQKGNRLPYEYFGQDEARWHGYEVRVENLIHNYRKRQKLLKRRLTEEESSGFIDRNLKDTQYITRAVYNLIRDHLAFAESNYRKKPVQAVNGAVTAMLRGRWGVQKIREDGDLHHCLDAAVIAATTPGLVQRLTAYNKHRETWERSPAGYVDPATGEMIELPQEARRDPFPKPWERFRQELEARLDPIDPRHQIDLLKLETYESDEEIKPVFVSRMPNHKVTGAAHAETIRSSKGGYGFTVTKTPLTNLKLNKFGEIEGYYNPASDTLLYDALLARLKDFGGDGAKAFAQPFYKPKKDGSPGPRVDKVKICEKATVGLPVRDGIAANGSMVRIDVFYVEGDGYYFVPIYVADTKKESLPNKAAVAMKPYNLWKKMKDENFVFSLYPGDLVRIQSRKGIKLNLAKGGTGEKEIVRQEGMYYYRSAGIAVAQISVETHDRRYLQPSLGIKTLQSIEKYQVDVLGNYYKVDLPEKRMTFSKEG

SEQ ID NO: 16098 - protein, 998 aa, unidentified
  REGION 1..998: note = Cas Enzyme sequence
KSPYQLRAEALDRPLTKEEAVRVLIHLAQRRGYKSNSTAEAAKDEKETGKVKTAIEENRRCMAEHGYRTVGEMMYRDERFWQKHPDGTRYHQTRNKAEDYRFTVERAAIVDEVRQIFAAQRRLGTAWMDEYMETAYLSILESQRSFDEGPGGDSPFSGGIGERVGACTFEPDEKRAAKATYTFEYFKLLQDLSRMRLTGMGMPPEPLDAAQREVLKSAALRSASLSYGQIRKKLNLDDDVFFHGLYYGEKTKEEAEKRKWPQMQSYHKMRTALDKVGKGAIGTLTEEQLNAVATILTECKSDAKRIAALREAGIPPQFDEALLPLSFSKYGSLSVQAMQKLIPLLEEGLRYDEACTRVYGDHRGLHPEQRKNRLSLTDMDEITNPVVRRAVSQTIKVINAVVRTYGPPDVVRIELAREMSRTFDERRKMEKRQDDNRAANERAKDQIAEYKGDHATGLDIVKFKLYREQDGVCLYSGQNLDIARLFEPGYADVDHIIPYSRCFDDSYQNKVLVLASENRQKGNRLPYEYFGQDEARWHGYEVRVENLIHNYRKRQKLLKRRLTEEESSGFIDRNLKDTQYITRAVYNLIRDHLAFAESNYRKKPVQAVNGAVTAMLRGRWGVQKIREDGDLHHCLDAAVIAATTPGLVQRLTAYNKHRETWERSPAGYVDPATGEMIELPQEARRDPFPKPWERFRQELEARLDPIDPRHQIDLLKLETYESDEEIKPVFVSRMPNHKVTGAAHAETIRSSKGGDGFTVTKTPLTNLKLNKFGEIEGYYNPASDTLLYDALLARLKDFGGDGAKAFAQPFYKPKKDGSPGPRVDKVKICEKATVGLPVRDGIAANGSMVRIDVFYVEGDGYYFVPIYVADTKKESLPNKAAVAMKPYNLWKKMKDENFVFSLYPGDLVRIQSRKGIKLNLAKGGTGEKEIVRQEGMYYYRSAGIAVAQISVETHDRRYLQPSLGIKTLQSIEKYQVDVLGNYYKVDLPEKRMTFSKEG

SEQ ID NO: 16099 - protein, 1032 aa, unidentified
  REGION 1..1032: note = Cas Enzyme sequence
RHRHRLERIRYLMEQRGIMPVADIQAMYAAGGFQKSPYQLRAEALDRPLTKEEAVRVLIHLAQRRGYKSNSTAEAAKDEKETGKVKTAIEENRRCMAEHGYRTVGEMMYRDERFWQKHPDGTRYHQTRNKAEDYRFTVERAAIVDEVRQIFAAQRRLGTAWMDEYMETAYLSILESQRSFDEGPGGDSPFSGGIGERVGACTFEPDEKRAAKATYTFEYFKLLQDLSRMRLTGMGMPPEPLDAAQREVLKSAALRSASLSYGQIRKKLNLDDDVFFHGLYYGEKTKEEAEKRKWPQMQSYHKMRTALDKVGKGAIGTLTEEQLNAVATILTECKSDAKRIAALREAGIPPQFDEALLPLSFSKYGSLSVQAMQKLIPLLEEGLRYDEACTRVYGDHRGLHPEQRKNRLSLTDMDEITNPVVRRAVSQTIKVINAVVRTYGPPDVVRIELAREMSRTFDERRKMEKRQDDNRAANERAKDQIAEYKGDHATGLDIVKFKLYREQDGVCLYSGQNLDIARLFEPGYADVDHIIPYSRCFDDSYQNKVLVLASENRQKGNRLPYEYFGQDEARWHGYEVRVENLIHNYRKRQKLLKRRLTEEESSGFIDRNLKDTQYITRAVYNLIRDHLAFAESNYRKKPVQAVNGAVTAMLRGRWGVQKIREDGDLHHCLDAAVIAATTPGLVQRLTAYNKHRETWERSPAGYVDPATGEMIELPQEARRDPFPKPWERFRQELEARLDPIDPRHQIDLLKLETYESDEEIKPVFVSRMPNHKVTGAAHAETIRSSKGGDGFTVTKTPLTNLKLNKFGEIEGYYNPASDTLLYDALLARLKDFGGDGAKAFAQPFYKPKKDGSPGPRVDKVKICEKATVGLPVRDGIAANGSMVRIDVFYVEGDGYYFVPIYVADTKKESLPNKAAVAMKPYNLWKKMKDENFVFSLYPGDLVRIQSRKGIKLNLAKGGTGEKEIVRQEGMYYYRSAGIAVAQISVETHDRRYLQPSLGIKTLQSIEKYQVDVLGNYYKVDLPEKRMTFSKEG

SEQ ID NO: 16100 - protein, 1100 aa, unidentified
  REGION 1..1100: note = Cas Enzyme sequence
MSEFHYALGLDIGIGSVGWAVLRNQPNGEPDRIQDLGVRIFDKAEQPKTGASLAAPRRDARSARRRLRRHRHRLERIRYLMEQRGIMPVADIQAMYAAGGFPKSPYQLRAEALDRPLTKEEAVRVLIHLAQRRGYKSNSTAEAAKDEKETGKVKTAIEENRRCMAEYGYRTVGEMMYRDERFWQKHPDGTHYHQTRNKAEDYRFTVERAAIVDEVRQIFAAQRRLGTVWMDEDMETAYLSILESQRSFDEGPGGDSPFSGGIGERVGACTFEPDEKRAAKATYTFEYFKLLQDLSRMRLTGMGMPPEPLDAAQREALKSAALRSASLSYGQIRKKLNLDDDVFFHGLYYGEKTKEEAEKRKWPQMQSYHKMRTALDKVGKGAIGTLTEEQLNAVATILTECKSDAKRIAALREAGIPPQFDEALLPLSFSKYGSLSVQAMQKLIPLLEEGLRYDEACTRVYGDHRGLHPEQRKNRLSLTDMDEITNPVVRRAVSQTIKVINAVVRTYGPPDVVRIELAREMSRTFDERRKMEKRQDDNRAANERAKDQIAEYKGDHATGLDIVKFKLYQEQDGVCLYSGQNLDIARLFEPGYADVDHIIPYSRCFDDSYQNKVLVLASENRQKGNRLPYEYFGQDEARWHGYEVRVENLIHNYRKRQKVLKRRLTEEESSGFIDRNLKDTQYITRAVYNLIRDHLAFAESNYRKKPVQAVNGAVTAMLRGRWGVQKIREDGDLHHCLDAAVIAATTPGLVQRLTAYNKHRETWERSPAGYVDPATGEMLELPQEARRDPFPKPWERFRQELEARLDPIDPRHQIDLLKLETYESDEEIKPVFVSRMPNHKVTGAAHAETIRSSKGGYGFTVTKTPLTNLKLNKFGEIEGYYNPASDTLLYDALLARLKDFGGDGAKAFAQPFYKPKKDGSPGPRVDKVKICEKATVGLPVRDGIAANGSMVRIDVFYVEGDGYYFVPIYVADTKKESLPNKAAVAMKPYNLWKKMKDENFVFSLYPGDLVRIQSRKGIKLNLAKGGTGEKEIVRQEGMYYYRSAGIAVAQISVETHDRRYLQPSLGIKTLQSIEKYQVDVLGNYYKVDLPEKRMTFSKEG

SEQ ID NO: 16101 - protein, 1100 aa, unidentified
  REGION 1..1100: note = Cas Enzyme sequence
MSEFHYALGLDIGIGSVGWAVLRNQPNGEPDRIQDLGVRIFDKAEQPKTGASLAAPRRDARSARRRLRRHRHRLERIRYLMEQRGIMPVADIQAMYAAGGFPKSPYQLRAEALDRPLTKEEAVRVLIHLAQRRGYKSNSTAEAAKDEKETGKVKTAIEENRRCMAEYGYRTVGEMMYRDERFWQKHPDGTHYHQTRNKAEEYRFTVERAAIVDEVRQIFAAQRRLGTVWMDEDMETAYLSILESQRSFDEGPGGDSPFSGGIGERVGACTFEPDEKRAAKATYTFEYFKLLQDLSRMRLTGMGMPPEPLDAAQREALKSAALRSASLSYGQIRKKLNLDDDVFFHGLYYGEKTKEEAEKRKWPQMQSYHKMRTALDKVGKGAIGTLTEEQLNAVATILTECKSDAKRIAALREAGIPPQFDEALLPLSFSKYGSLSVQAMQKLIPLLEEGLRYDEACTRVYGDHRGLHPEQRKNRLSLTDMDEITNPVVRRAVSQTIKVINAVVRTYGPPDVVRIELAREMSRTFDERRKMEKRQDDNRAANERAKDQIAEYKGDHATGLDIVKFKLYQEQDGVCLYSGQNLDIARLFEPGYADVDHIIPYSRCFDDSYQNKVLVLASENRQKGNRLPYEYFGQDEARWHGYEVRVENLIHNYRKRQKLLKRRLTEEESSGFIDRNLKDTQYITRAVYNLIRDHLAFAESNYRKKPVQAVNGAVTAMLRGRWGVQKIREDGDLHHCLDAAVIAATTPGLVQRLTAYNKHRETWERSPAGYVDPATGEMLELPQEARRDPFPKPWERFRQELEARLDPIDPRHQIDLLKLETYESDEEIKPVFVSRMPNHKVTGAAHAETIRSSKGGYGFTVTKTPLTNLKLNKFGEIEGYYNPASDTLLYDALLARLKDFGGDGAKAFAQPFYKPKKDGSPGPRVDKVKICEKATVGLPVRDGIAANGSMVRIDVFYVEGDGYYFVPIYVADTKKESLPNKAAVAMKPYNLWKKMKDENFVFSLYPGDLVRIQSRKGIKLNLAKGGTGEKEIVRQEGMYYYRSAGIAVAQISVETHDRRYLQPSLGIKTLQSIEKYQVDVLGNYYKVDLPEKRMTFSKEG

SEQ ID NO: 16102 - protein, 1100 aa, unidentified
  REGION 1..1100: note = Cas Enzyme sequence
MSEFHYALGLDIGIGSVGWAVLRNQPNGEPDRIQDLGVRIFDKAEQPKTGASLAAPRRDARSARRRLRRHRHRLERIRYLMEQRGIMPVADIQAMYAAGGFPKSPYQLRAEALDRPLTKEEAVRVLIHLAQRRGYKSNSTAEAAKDEKETGKVKTAIEENRRCMAEYGYRTVGEMMYRDERFWQKHPDGTHYHQTRNKAEDYRFTVERAAIVDEVRQIFAAQRRLGTVWMDEDMETAYLSILESQRSFDEGPGGDSPFSGGIGERVGACTFEPDEKRAAKATYTFEYFKLLQDLSRMRLTGMGMPPEPLDAAQREALKSAALRSASLSYGQIRKKLNLDDDVFFHGLYYGEKTKEEAEKRKWPQMQSYHKMRTALDKVGKGAIGTLTEEQLNAVATILTECKSDAKRIAALREAGIPPQFDEALLPLSFSKYGSLSVQAMQKLIPLLEEGLRYDEACTRVYGDHRGLHPEQRKNRLSLTDMDEITNPVVRRAVSQTIKVINAVVRTYGPPDVVRIELAREMSRTFDERRKMEKRQDDNRAANERAKDQIAEYKGDHATGLDIVKFKLYQEQDGVCLYSGQNLDIARLFEPGYADVDHIIPYSRCFDDSYQNKVLVLASENRQKGNRLPYEYFGQDEARWHGYEVRVENLIHNYRKRQKLLKRRLTEEESSGFIDRNLKDTQYITRAVYNLIRDHLAFAESNYRKKPVQAVNGAVTAMLRGRWGVQKIREDGDLHHCLDAAVIAATTPGLVQRLTAYNKHRETWERSPAGYVDPATGEMLELPQEARRDPFPKPWERFRQELEARLDPIDPRHQIDLLKLETYESDEEIKPVFVSRMPNHKVTGAAHAETIRSSKGGYGFTVTKTPLTNLKLNKFGEIEGYYNPASDTLLYDALLARLKDFGGDGAKAFAQPFYKPKKDGSPGPRVDKVKICEKATVGLPVRDGIAANGSMVRIDVFYVEGDGYYFVPIYVADTKKESLPNKAAVAMKPYNLWKKMKDENFVFSLYPGDLVRIQSRKGIKLNLAKGGTGEKEIVRQEGMYYYRSAGIAVAQISVETHDRRYLQPSLGIKTLQSIEKYQVDVLGNYYKVDLPEKRMRFSKEG

SEQ ID NO: 16103 - protein, 1100 aa, unidentified
  REGION 1..1100: note = Cas Enzyme sequence
MSDFHYALGLDIGIGSVGWAVLRNRPDGEPDRIQDLGVRIFDKAEQPKTGASLAAPRRDARSARRRLRRHRHRLERIRYLMEQHGIMPVSDIQAMYAAGGFEKSPYQLRAEALDRPLSREELVRVLIHLAQRRGYRSNSTAEAAKNEKETGKVKSAIEENRACMEQHGYRTVGEMMFRDERFWQKHPDGTRCHQTRNKAEDYRFTVERTAIVDEAKQIFTAQRRFGADWMDDGLEAAYLAVLESQRSFDEGPGGDSPFHGGIGERVGFCTFEPDEQRAAKATYTFEYFKLLQDLNHMRLAGNGTAPQPLNAQQREILKAAALQSASLSYGQIRKKLALDEDVFFHHLYYGDKPKEEAEKRKWPQMQSYHKMRTALDKVGKGTINTLTETQLNAIATILTQYKSDARRIEALREAGIPAQFDDALLPLSFSKYGNLSVTAMQKLIPLLEQGMRYDEACTQIYGDHRGLHPEQRKNRLSLRDMREITNPVVRRAVSQTIKVVNAVVRTYGPPDVVRIELAREMSQNFEERRKTEKRQDENRTANEKAKEQIAEYKGDRATGLDIVKFKLYREQDGVCLYSGRNLDLSRLFEPGYVDVDHIIPYSRCFDDSYQNKVLVLASENRQKGNRLPYEYFGQDETRWHEYEVRVENLIRNYRKRQKLLKKRLTEEESAGFIDRNLKDTQYITRSIYNLLRDNLAFAESDYRKKPVQTVNGAVTSMLRGRWGVQKIREDGDLHHCMDAAVIAAASPGLVQRLTEYSKRREAFEEASRGYVDPATGELVELPKQLRRDPFPKPWERFRQELEARLDPIDPQHQIDLLKLATYESDEEIRPVFVSRMPNHKVTGAAHAETIRSSKMGDGYTVTKTPLANLKLNKFGEIEGYYNPASDTLLYNALLARLKDFGGDGAKAFAQPFYKPKKDGTPGPRVDKVKICEKATVGLPVRDGIAANGSMIRIDVFYVEDDGYYFVPIYVADTKKAELPNKAVVAYKAYSDWKEMIDENFLFSLYPGDLVRIQSRKGIKLNIAKGGTGEKEIVRQDGMYYYQGANIATGAIALATHDRRYLQSGLGLKTLQSIEKYQVDVLGNYYKVDLPEKRMKFSEEG

SEQ ID NO: 16104 - protein, 1103 aa, unidentified
  REGION 1..1103: note = Cas Enzyme sequence
PSQMSEFHYALGLDIGIGSVGWAVLRNQPNGEPDRIQDLGVRIFDKAEQPKTGASLAAPRRDARSARRRLRRHRHRLERIRYLMEQRGIMPVADIQAMYAAGGFPKSPYQLRAEALDRPLTKEEAVRVLIHLAQRRGYKSNSTAEAAKDEKETGKVKTAIEENRRCMAEYGYRTVGEMMYRDERFWQKHPDGTHYHQTRNKAEEYRFTVERAAIVDEVRQIFAAQRRLGTVWMDEDMETAYLSILESQRSFDEGPGGDSPFSGGIGERVGACTFEPDEKRAAKATYTFEYFKLLQDLSRMRLTGMGMPPEPLDAAQREALKSAALRSASLSYGQIRKKLNLDDDVFFHGLYYGEKTKEEAEKRKWPQMQSYHKMRTALDKVGKGAIGTLTEEQLNAVATILTECKSDAKRIAALREAGIPPQFDEALLPLSFSKYGSLSVQAMQKLIPLLEEGLRYDEACTRVYGDHRGLHPEQRKNRLSLTDMDEITNPVVRRAVSQTIKVINAVVRTYGPPDVVRIELAREMSRTFDERRKMEKRQDDNRAANERAKDQIAEYKGDHATGLDIVKFKLYQEQDGVCLYSGQNLDIARLFEPGYADVDHIIPYSRCFDDSYQNKVLVLASENRQKGNRLPYEYFGQDEARWHGYEVRVENLIHNYRKRQKLLKRRLTEEESSGFIDRNLKDTQYITRAVYNLIRDHLAFAESNYRKKPVQAVNGAVTAMLRGRWGVQKIREDGDLHHCLDAAVIAATTPGLVQRLTAYNKHRETWERSPAGYVDPATGEMLELPQEARRDPFPKPWERFRQELEARLDPIDPRHQIDLLKLETYESDEEIKPVFVSRMPNHKVTGAAHAETIRSSKGGYGFTVTKTPLTNLKLNKFGEIEGYYNPASDTLLYDALLARLKDFGGDGAKAFAQPFYKPKKDGSPGPRVDKVKICEKATVGLPVRDGIAANGSMVRIDVFYVEGDGYYFVPIYVADTKKESLPNKAAVAMKPYNLWKKMKDENFVFSLYPGDLVRIQSRKGIKLNLAKGGTGEKEIVRQEGMYYYRSAGIAVAQISVETHDRRYLQPSLGIKTLQSIEKYQVDVLGNYYKVDLPEKRMTFSKEG

SEQ ID NO: 16105 - protein, 1100 aa, unidentified
  REGION 1..1100: note = Cas Enzyme sequence
MSEFHYALGLDIGIGSVGWAVLRNQPNGEPDRIQDLGVRIFDKAEQPKTGASLAAPRRDARSARRRLRRHRHRLERIRYLMEQRGIMPVADIQAMYAAGGFQKSPYQLRAEALDRPLTKEEAVRVLIHLAQRRGYKSNSTAEAAKDEKETGKVKIAIEENRRCMAEHGYRTVGEMMYRDERFWQKHPDGTRYHQTRNKAEDYRFTVERAAIVDEVRQIFAAQRRLGTAWMDEDMETAYLSILESQRSFDEGPGGDSPFSGGIGERVGACTFEPDEKRAAKATYTFEYFKLLQDLSRMRLTGMGMPPEPLDAAQREVLKSAALRSASLSYGQIRKKLNLDDDVFFHGLYYGEKTKEEAEKRKWPQMQSYHKMRTALDKVSKGAIGTLTEEQLNAVATILTECKSDAKRIAALREAGIPPQFDEALLPLSFSKYGSLSVRAMQKLIPLLEEGLRYDEACTRVYGDHRGLRPEQRTNRLSLNDMEEITNPVVRRAVSQTIKVINAVVRTYGPPDVVRIELAREMSRTFDERRKMEKRQDDNRAANERAKDQIAEYKGDHATGLDIVKFKLYREQDGVCLYSGQNLDIARLFEPGYADVDHIIPYSRCFDDSYQNKVLVLASENRQKGNRLPYEYFGQDEARWHGYEVRVENLIHNYRKRQKLLKRRLTEEESTGFIDRNLKDTQYITRAVYNLIRDHLTFAESNYRKKPVQAVNGAVTAMLRGRWGVQKIREDGDLHHCLDAAVIAATTPGLVQRLTAYNKHRETWERPPAGYVDPATGELIELPQEARRDPFPKPWERFRQELEARLDPIDPRHQIDLLKLETYESDEEIKPVFVSRMPNHKVTGAAHAETIRSSKGGDGFTVTKTPLTNLKLNKFGEIEGYYNPASDTLLYDALLARLKDFGGDGAKAFAQPFYKPKKDGSPGPRVDKVKICEKATVGLPVRDGIAANGSMVRIDVFYVEGDGYYFVPIYVADTKKESLPNKAAVAMKPYNLWKKMKDENFVFSLYPGDLVRIQSRKGIKLNLAKGGTGEKEIVRQEGMYYYRSAGIAVAQISVETHDRRYLQPSLGIKTLQSIEKYQVDVLGNYYKVDLPEKRMTFSKEG

SEQ ID NO: 16106 - protein, 1100 aa, unidentified
  REGION 1..1100: note = Cas Enzyme sequence
MSEFHYALGLDIGIGSVGWAVLRNQPNGEPDRIQDLGVRIFDKAEQPKTGASLAAPRRDARSARRRLRRHRHRLERIHYLMEQRGIMPVADIQAMYAAGGFQKSPYQLRAEALDRPLIKEEAVRVLIHLAQRRGYKSNSTAEAAKDEKETGKVKTAIEENRRCMAEHGYRTVGEMMYRDERFWQKHPDGTRYHQTRNKAEDYRFTVERAAIVDEVRQIFAAQRRLGVVWMDEDMETAYLSVLESQRSFDEGPGGDSPFSGGIGERVGACTFEPDEKRAAKATYTFEYFKLLQDLNRMRLTGMGMPPEPLDDEQREVLKSAALRSASLSYGQIRKKLNLDDDVFFNDLYYGEKTKEEAEKRKWPQMQSYHKLRMALDKVGKGAIGTLTEEQLNAIATILTECKSDAKRIAALREAGIPPQFDEALLPLSFSKYGSLSVRAMQKLIPLLEEGLRYDEACTRVYGDHRGLRSEQRTNRLSLNDMEEITNPVVRRAVSQTIKVINAVVRTYGPPDVVRIELAREMSRTFDERRKMEKRQDDNRAANEQAKDQIAEYKGDHATGLDIVKFKLYREQDGVCLYSGQNLDIARLFEPGYADVDHIIPYSRCFDDSYQNKVLVLASENRQKGNRLPYEYFGQDEARWHGYEVRVENLIHNYRKRQKLLKRRLTEEESSGFIDRNLKDTQYITRAVYNLIRDHLAFAESNYRKKPVQAVNGAVTSMLRGRWGVQKIREDGDLHHCLDAAVIATTTPGLVQRLTAYNKHRETWERPPAGYVDPATGELIELPQEARHDPFPKPWERFRQELEARLDPIDPRHQIDLLKLETYESDEEIKPVFVSRMPNHKVTGAAHAETIRSSKGGDGFTVTKTPLTNLKLNKFGEIEGYYNPASDTLLYDALLARLKDFGGDGAKAFAQPFYKPKKDGSPGPRVDKVKIREKATVGLPVRDGIAANGSMVRIDIFYVEDDGYYFVPIYVADTKKDRLPSKAPVAHKAYSAWKEMRNENFIFSLYPGDLVRIQSRAGIKLSLAKDGTGEKEIVRQNGLYYYRSADIEGGKIDIEVHDRRYSKHGLGLKTLQSIEKYQVDVLGNYYKVDLPEKRMTFSKEG

SEQ ID NO: 16107 - protein, 1165 aa, unidentified
  REGION 1..1165: note = Cas Enzyme sequence
MTLQFDLEAKKVTTLGLDVGVSSVGFALLEYPLLNENEYAEAQALGMQLEGRVIKTGVVWFDAAEEPKTGASLAVKRRTRRGMRRLTNRRKQRLNALERLLTQELGITEAVMKDIRNPEKAPPKSPWELRAEGLERKLEAEELARVLYHMARHRGFQSNRKGDNSDEDGKVLQATKLLKEKLQDKTFGQMMSERLNLGDSVVLKPEELYKRRLRNKQNDKGEGTYHNTPMRDWLRDEAARLLATQETFGWHACGEQFQEKFKKCAFDQRPLKSVANMIGNCALIEGEKRACKHTYTAERFIAWQKINHLRIQGRKPEWLLPEERQAVWQKLHETKEVTYKQLRELLALEENQSFKGLLYSNPEKKPIQKLSNKATPEDVNKAWEACKAKIEKLAFRSLETGDVRVLQMELTPETWSELEVNFRTFKKMEYWALRKTLEIPITYQAGEYSERKGFSRLPDTTEDKAFFKLTVYPVLKQYMPTVPTWVPYNPEDASIRHAWDEVATALSLETDEKKLKALLTCHGVKAEKQDQLMTDTAKFTGTIGVSLKACYTLEPQWVSVYDDDAAQPVDYYEASKRTGLGIRKKGNGGLLPPFDEAMTNPVVKRSLSQVRKVVNTIVRRYGVPHFTNIEFAREMSKTFDERKKLQRDNTEREEERLGQNQEIQKTFGQEAWLVDGLKYRLWKEQGGFCMYSGEYISNSQLQDPLYTQIDHILPYSQSWDNSFNNKVLVLSSENQRKSNRCAYTYIATEKSGAELERYKVRVQSLGNSTKKANLLRTEVPEDMKARHLHNTAYVARLVRQHCDDYLYDEGMYKNNKPNMPVYPELPNGMTAKRRVRCTSGSITTYLRKIWGLNHKSREESLRHHAEDACIIAATTEALVQRLTDAEKDYQYALKKKLVDLQKNKLTMDESWFSKEKAHQIKLLKENHQRYHQPWLTFRNDVIEACKTRGENCPEGTLFVYRKPIKKMRGEIHRETIYTEAEALKQKWLCPTTKRVQKANVIPHKIHYGYSTKGDIVRCDIFKKQNKRGKWEFYMSPVYAWDALVGHTPNYVLVQGEPYQLPIDNTYDFCFSLQTNDYVKLYGAEKKIIAEGYYRGLSVAVAQLNLVAHDYPTLTGGVKNYGIKTLFDIQKFVVTPLGELHRVVKETRQDVVANRNGHSSQPCKPQ

SEQ ID NO: 16108 - protein, 1044 aa, unidentified
  REGION 1..1044: note = Cas Enzyme sequence
MAYFLGLDIGVQSIGWAVIPKNAADFEKLAMGVHLFEGGTDGDIEKGKDESRNLVRRSARALRRMYRRRSQRMIRLSNELKRLGLLPQCRMHIPEDRNAMLEELDRRFAYFWQGGELRCAHLLPYILRKEGLDQKLPEHAVGRALYHLAIRRGFLSNRKAVGDEKEDGVVKKGISELEKEIETSGSRTLGEYFSMLDPEKIRIRTHWTSRKMHETEFELFWEAQAQYHPAMTPTAKKRIHRAIFFQRPLKSQRFLLGKCRLEPTRRRAPMACLEIQRFRYWQKIMDLKYTVGKDFTEIPLSHDQQDILADALENREKMTFAEIKKLLGMKKTEKFNLENGGEKQIRGNTTSCRLASVLPDRWPKMTEKEKSILLNEILQYQSSSGLEKRLRKLCRFTLEEAKAVAYLQLEPGYSDLSRKAAGKLLEKMKEERIHFKEAEKAIYGSPLKKEDECEFLPPLCADRGAVLTNPVVTRALTELRKVVNSIVRKYDGKPERIVVELARDMKRSKKEREQISDKMRNQEKERNKAKERIIKELGILEPTRNDIQKWLLAEECGWHCPFTGKQITPASLLGKEPQFDIEHILPFSRSLDDSFMNKTLCDVYENRHVKKNKTPFEAYGHNEEKYREILTRVQNSEMPKAKKERFTMESIPEEFKSRMLNDTRHASKLAVSYLGKLYGGVIELPDEDGKTGRRRVFSCTGQATAWLRQEWGLNSILNDGGDEKNRTDHRHHAIDALVIAFCNSTIVQQFAHAAEVAEQFGITRRFARGKVDQPRANFLEIVRKAVENINISFRPNRKISGALHEETNYSKPQRDPNSKSSTVRHKRILLQNLTEKDLPNIVDGAIRRLIEAKLSEIGKLKNFADEKNLPYREITTKTGETFRIPIRKVRVRASVTTQTIGRGANRRHVKTGSNHHMEVYAVLDENGNEVKWQAKVVTMFEAYQRRKEGKPIVVRDHGEGTRFKFSLFKNDFLLKTEEDGSQTLYRVFKMAQSGQIGWGKHTDARPAKEVTDRTPGNAPSINALRGKVIKVRVDHLGEIYPAND

SEQ ID NO: 16109 - protein, 1070 aa, unidentified
  REGION 1..1070: note = Cas Enzyme sequence
VYRLGLDIGTTSVGAAILNIDHYGEPNRIIDMHVRTFEAAENTKDGSSLAAPRREARGARRRNRRHKHRLDRIKALIQSEGIYTKEKLDSLYHAKGNILMDIYQIRYESLERKLNNEELTRLLIHFAQRRGFKSNRKNEKKGSDEGKLLAATADNEKYLKEKGYRTVGEMLWKDERFAENKRNKGGDYSNTFLRSQLREEIGIIFEKQKAFGSLYVTDAFSEKYLKILFSQRAFEEGPGEESPYAGNQIEKMVGKCTFEKEEKRASKATYTFELFNLWQKINSIGILQDGMKRRLTDDERNKLFALCHKAEKVDYKRIRKELELGQDALFSNLTYGRKEVEEVEAAKFQYLPVYHEMRRAFDKISKNHVLQISNTQRDLIGTAITYYKTDDKIQQALLEGNFSKEEINAILGMKNFSKFGNLSVKAMQKVIPYLEKGLTYDKACEQAGYDFRAHNVAEKKKYLPKLPQNTYDITSPVVKRAINQTIKVVNEIIKRHGSPAAVNIELAREMSKSFKDRKRIEKEQKDNAAQNQRIYDEIKDTFHVAQPSGQDIVKYKLWQEQDCKCVYTGQPIKAENLFVPGYYEVDHIIPYSISFDDSYTNKVLVLTKANRDKGNRIPMQYVADKEEYEIRVNTLIKNRAKREKLLKPILTEEDMGEMKQRSLQDTQFITRFMMNYIKDYLLFDEAYDRKQRVTAVNGRVTAYMRKRWGINKVREDGDLHHSVDAVVVACITPGIVQTVTEYAKREENRYLNKDDVAMRERFPMPWPEFSTELDIRTCKEPKEMLRKVSLANYQDVDIDSIKPIFVSRMTKKKVTGQAHKETIRAYREVDGKMRTVTKTSIQELKLDKDGEIEGYYNPSSDILLYELLRSRLKEAGGNGKKAFPEGFVYKPTPNGGVAPKVKKVKICAVSNLNIPVNHGVAANGDMVRIDLYYVEGEGYYFIPIYISDLMKEELPKKACVSNKEYHDWKNMKDEDFLYSIYPNDLLHIKSSTPKKFTKNIQKGKENDSFEAEEAFVYYIKAGIGTGSITVVTHDNNYTIQSLGIKTLNCIEKYHVDVLGNKYKAAVEERK

SEQ ID NO: 16110 - protein, 1140 aa, unidentified
  REGION 1..1140: note = Cas Enzyme sequence
MSKLYRIGFDIGIGSVGWAVLENDPITEEPSRILKLGVRTFSPNEIAKTGESTAKSRREKRGLHRRTRRRAFRIERLKNLIKSTFNIDVDEEIKNLSVKERESYDVYKLRSVALDEKVTNLELARIILNIAKRRGFQSNRKSGVGAEGLLLNAVKDNAKFLEEKGYRTIGEAFYKDDRFKIIENGKPVLNKHNIPIYDIRNHSGDYRNCFLREDLKKELELILKSQQMFENTQISDEFIEKTIKIFEKQRNFDEGPGEPSPYSAKFEIGKCTFLGSEGELRAPKATFTFEYFNALSKINSLKINDKDLSIEQKKVLIEYILNNKELKFERVRTLLNIPKTETFNLCRYGAKKKNKDEEIDETKIISDSEKSVFVSLKHSHEICKEFGFEDLMENKDIINEIAVLFTLCKSDKKIEEFVSGSKILSNLSKEQNETIFNTKLNFEKVGSLSIKAMEMIIPFLENGDRYDIACQKAGFHHSSFNHEKMRYLTGERIKERLEDVTSNVVKRAVNQTLRILNEIIKEYGSPQFVTIELARELSKDFGERNKIKKLQEKNFNDNENAKDELSDKFGLQKVSQFDLIKYRLYEEQNGKCMYSGKEIDINRLYEPNYVQVDHILPYSRSMNDSYNNKVLVLSSENQNKRNQTPFEWFGNDEKKWNDFVARTNLLKNREKKRFLLKENFGEEQSKDFIERNLNDTKYMAKFMHDLMRDFLEMTPSKHHKKVVRSVNGAITSYLRRCWGINKIREDGDTHHAIDAAIIATATAGQIQKITKYNQLKEKFIRHDDDKYISKLTGEVMTVEQKKEYENEGIDLLSKYLPKPYDEFIDELKIRSRTNYKELDFTNDEKLELAKLGYEPDEIDLAKPIFVSRMKTVKTTGAIHEETLMSTREYEETKNLIKTIPVTKLKLKDSQEEIELKGDKYPEKSIENYYRPESDRLLYLKLKEYLVENNGSISESVKFYKPKKDGSDGPIVKTVKVYEKTSNCVITPNGAAANDKMFRVDVFEKDNKFYLCPIYMADVYAKRLPNKVIQIGKDWLEIDDSYNFKFSLYQNDLIKITNNKDIIVKKNFNNEKSKKPDSIENKEMLLYYSGTGIATASIKVISHDNCYKIDNLGVKTLLNIEKYYVDIMGKIYKAPKEERKG

SEQ ID NO: 16111 - protein, 1143 aa, unidentified
  REGION 1..1143: note = Cas Enzyme sequence
MYRLGLDVGIKSVGWCVLECDENGEPIQINALNSRIFDAAEQPKTGASLAEPRRNARGLRRRIRRKSFRLERIRKLFSENGIELFETQDDLICLKDEYKNLDVVKLRSDALDKKLTEAEFARVLYSLARHRGFKSNKREGAKDSDEGKLLGSIRKSEEEMRESGMRTRGEQLYKKYLMEGKPVHNKGGDYSMCVSRDILVKEIELLFEKQKEFGNNFATDENKEKYLDIFLSQRNFDEGPGKGSQYTGSHDVKKCEIYRDEDVAAKGTYTSEWATIYQKINNLSIICGGDRRRLSNEERQIAVELAKKVDKVTYKAFRKAIKLDDDYRFSALNYSEKKKSDKKKNEGESKSDVVEINDVVDSLACEDKGDFITAKNSNKIVKALNDNLKSDIELIDEIAEICTKYKSENLFRSAIAESKIIDGRLDEETIEKLSKIDMKGYGHLSLHVLREILPYLEEGMVYSDAMQKAGHNHSEHNFEKQKYLGTKEVYDAIGGVTSPVAKRALSQTVKVIDAVIRQYGSPYAINIELARDMSMSKDERDKLKKENDARAAKNEAIRENIAKLNAMPNSTNVLKYKLYEEQDHKCAYSMETLDINHLFEDGYYEIDHIIPYSRSFDDSFNNKVLVLKRENQNKRNSTPVEYFERIGRDYDEVLAFWKAVYQKRNRKKLEFLQKKEINESEWKNRALNDTRYASRMLANLIKDYLLFDEKSKEKYGRVETVKGAITSYLRRFWGVQKIREDGDKHHAVDAAIIACVTPKTKNKIERYNQIKESRKMRNGQYVLEDGEICDSDYYDKNSHLVLPYPYKEFINELDARVMDEPVLMQNKLRLLGFNENYLMNAKPFVVSRMTSRKAKGCISEATVFSSKYADNKYPTVCDGNNVIVKRTALANLKLDKNGEINGYFQPEGDVALYNALKQRLVEFDGDAKKAFATPIRKPCNSGQGNIVRTVKTYETYTGGGMILEKNKGIVKNDGMIRVDLYSKDGKYFGVPVYVADLYRGELPKRAATNGKQQNEWRVIDDTYTFEMSIYQDDLLRIESKKGIELKKNKDVENSAKATTKTITDDFAYFIGFDRSTASIKIEDTTGCYFAKSIGIQNIGKITKCEIDVLGNVQEIKKRPKQPQPLKMLNDKEKAEKRKNNQNK

SEQ ID NO: 16112 - protein, 1157 aa, unidentified
  REGION 1..1157: note = Cas Enzyme sequence
MYRLGLDVGIKSVGWCVLECDENGEPIQINALNSRIFDAAEQPKTGASLAEPRRNARGLRRRIRRKSFRLERIRKLFSENGIELFETQDDLICLKDEYKNLDVVKLRSDALDKNLTEAEFARVLYSLARHRGFKSNKRVVETDDGDEEKKGKGKNKDEGKLLSSIRESEEEMRESGMRTRGEQLYKKYLLEGKPVHNKGGDYSMCVSRDILVKEIELLFEKQKEFGNNFATDENKEKYLDIFLSQRNFDEGPGKGSQYTGSHDVKKCEIYRDEDVAAKGTYTSEWATIYQKINNLSIICGGDRRRLSNEERQIAVELAKKVDKVTYKAFRKAIKLDDDYRFSALNYSEKKKSDKKKNEGESKSDVVEINDVVDSLACEDKGDFITAKNSNKIVKALNDNLKSDIELIDEIAEICTKYKSENLFRSAIAESKIIDGRLDEETIEKLSKIDMKGYGHLSLHVLREILPYLEEGMVYSDAMQKAGHNHSEHNFEKQKYLGTKEVYDAIGGVTSPVVKRALSQTVKVIDAVIRQYGSPYAINIELARDMSMSKDERDKLKKENDARAAKNEAIRENIAKLNAMPNSTNVLKYKLYEEQDHKCAYSMETLDINHLFEDGYYEIDHIIPYSRSFDDSFNNKVLVLKRENQNKRNSTPVEYFERIGRDYDEVLAFWKAVYQKRNRKKLEFLQKKEINESEWKNRALNDTRYASRMLANLIKDYLLFDEKSKEKYGRVETVKGAITSYLRRFWGVQKIREDGDKHHAVDAAIIACVTPKTKNKIERYNQIKESRKMRNGQYVLEDGEICDSDYYDKNSHLVLPYPYKEFINELDARVMDEPVLMQNKLRLLGFNENYLMNAKPFVVSRMTSRKAKGCINEATVFSSKYADNKYPTVCDGNNVIVKRTALANLKLDKNGEINGYFQPEGDVALYNALKQRLLEFGGDAKKAFAPTNPIRKPCNSGQGNIVRTVKTYETYTGGGMLLEKNKGIVKNDGMIRVDLYSKDGKYFGVPVYVADLYRGELPKRAATANKPQNEWREMDDTYTFEMSIYQDDLLRIESKKGIELKKKKDVENSAKATSKTITDDFVYFIGFNRSTASIEVEDTTGCYRRDGIGTQNIGKITKCEIDVLGNVQEIKKRPKQPQPLKMLTDKEKAEKRKNNQNK

SEQ ID NO: 16113 - protein, 1143 aa, unidentified
  REGION 1..1143: note = Cas Enzyme sequence
MYRLGLDVGIKSVGWCVLECDENGEPIQINALNSRIFDAAEQPKTGASLAEPRRNARGLRRRIRRKSFRLERIRKLFSENGIELFETQDDLICLKDEYKNLDVVKLRSDALDKKLTEAEFARVLYSLARHRGFKSNKREGAKDSDEGKLLGSIRKSEEEMRESGMRTRGEQLYKKYLMEGKPVHNKGGDYSMCVSRDILVKEIELLFEKQKEFGNNFATDENKEKYLDIFLSQRNFDEGPGKGSQYTGSHDVKKCEIYRDEDVAAKGTYTSEWATIYQKINNLSIICGGDRRHLSNEERQIAVELVKKVDKVSYKSFRKAIKLDDDYRFSALNYSEKKKSDKKKNEGESKSDVVEINDVVDSLACEDKGDFITAKNSNKIVKALNDNLKSDVELIDEIAEICTKYKSENLFRNAIAESKIIGGRLDEETIEKLSKIDMKGYGHLSLHVLREILPYLEEGMVYSDAMQKAGHNHSEHNFEKQKYLGTKEVYDAIGGVTSPVVKRALSQTIKVIDAVIRQYGSPYAINIELARDMSMSKDERDKLKKENDARAAKNEAIRENIAKLNAMPNSTNVLKYKLYEEQDHKCAYSMETLDINHLFEDGYYEIDHIIPYSRSFDDSFNNKVLVLKRENQNKRNSTPVEYFERIGRDYDEVLAFWKAVYQKRNRKKLEFLQKKEINESEWKNRALNDTRYASRMLANLIKDYLLFDEKSKDKYGRVETVKGAITSYLRRFWGVQKIREDGDKHHAVDAAIIACVTPKTKNKIERYNQIKESRKMRNGQYVLEDGEICDSDYYDKNSHLVLPYPYKEFINELDARVMDEPVLMQNKLRLLGFNENYLMNAKPFVVSRMTSRKAKGCINEATVFSSKYADNKYPTVCDGNNVIVKRTALANLKLDKNGEINGYFQPEGDVALYNALKQRLVEFDGDAKKAFATPIRKPCNSGQGNIVRTVKTYETYTGGGMILEKNKGIVKNDGMIRVDLYSKDGKYFGVPVYVADLYRGELPKRAATQNKPQNEWRVIDDTYTFEMSIYQDDLLHIENKKGIELKKKKDVENSAKAQTKTITDDLVYFIGFNRSTASIEVEDTTGCYRRDGIGTQNIGKITKCEIDVLGNVQEIKKRPKQPQPLKMLTDKEKAEKRKNNQNK

SEQ ID NO: 16114 - protein, 1158 aa, unidentified
  REGION 1..1158: note = Cas Enzyme sequence
MYRLGLDVGIKSVGWCVLECDENGEPIQINALNSRIFDAAEQPKTGSLAEPRRNARGLRRRIRRKSFRLERIRKLFIENGIELFETQDDLICLKDEYKNLDVVKLRSDALDKKLTEAEFARVLYSLARHRGFKSNKRVVVTDDDDEEKKGKGKGKDSDEGKLLSSIRESEEKMRESGMRTRGEQLYKKYLMEGKPVHNKGGDYSMCVSRDILVKEIELLFEKQKKFGNSFATDENKEKYLDIFLSQRNFDEGPGKGSQYTGSHDVKKCEIYRDEDVAAKGTYTSEWATIYQKINNLSIICGGDRRRLSNEERQIAVELAKKVDKVTYKAFRKAIKLDDDYRFSALNYSEKKKSDKKKNEGESKSDVVEINDVVDSLACEDKGDFITAKNSNKIVKALNDNLKSDIELIDEIAEICTKYKSENLFRNAIAESKIIGGRLDEETIEKLSKIDMKGYGHLSLHVLREILPYLEEGMVYSDAMQKAGHNHSEHNFEKQKFLGTKEVYDAIGGVTSPVVKRALSQTVKVIDAVIRQYGSPYAINIELARDMSMTKDERDKLKKENDARAAKNEAIRENIAKLNAMPNSTNVLKYKLYEEQDHKCAYSMETLDINHLFEDGYYEIDHIIPYSRSFDDSFNNKVLVLKRENQNKQNSTPVEYFERIGRDYDEVLAFWKAVYQKRNRKKLEFLQKKEINESEWKNRALNDTRYASRMLANLIKDYLLFDEKSKDKYGRVETVKGAITSYLRRFWGVQKIREDGDKHHAVDAAIIACVTPKTKNKIERYNQIKESRKMRNGQYVLEDGEICDSDYYDKNSHLVLPYPYKEFINELDARVMDEPVLMQNKLRLLGFNENYLMNAKPFVVSRMTSRKAKGCINEATVFSSKYADNKYPTVCDGNNVIVKRTALANLKLDKNGEINGYFQPEGDVALYNALKQRLVEFDGDAKKAFAPTNPIRKPCNSGQGNIVRTVKTYETYTGGGMILEKNKGIVKNDGMIRVDLYSKDGKYFGVPVYVADLYRGELPKRAATNGKPQNEWRVIDDTYTFEMSIYQDDLLHIESKKGIEFKKNKDVENSAKASTKIITDDFAYFISFDRSTASIKIEDTTGCYFAKSIGIQNIGKITKCEIDVLGNVQEIKKRPKQPQPLKMLTDKERAEKRKNNQNK

SEQ ID NO: 16115 - protein, 1143 aa, unidentified
  REGION 1..1143: note = Cas Enzyme sequence
MYRLGLDVGIKSVGWCVLECDENGEPIQINALNSRIFDAAEQPKTGASLAEPRRNARGLRRRIRRKSFRLERIRKLFSENGIELFETQDDLICLKDEYKNLDVVKLRSDALDKKLTEAEFARVLYSLARHRGFKSNKREGAKDSDEGKLLGSIRKSEEEMRESGMRTRGEQLYKKYLMEGKPVHNKGGDYSMCVSRDILVKEIELLFEKQKEFGNNFATDENKEKYLDIFLSQRNFDEGPGKGSQYTGSHDVKKCEIYRDEDVAAKGTYTSEWATIYQKINNLSIICGGDRRHLSNEERQIAVELVKKVDKVSYKSFRKAIKLDDDYRFSALNYSEKKKSDKKKNEGESKSDVVEINDVVDSLACEDKGDFITAKNSNKIVKALNDNLKSDVELIDEIAEICTKYKSENLFRNAIAESKIIGGRLDEETIEKLSKIDMKGYGHLSLHVLREILPYLEEGMVYSDAMQKAGHNHSEHNFEKQKYLGTKEVYDAIGGVTSPVVKRALSQTVKVIDAVIRQYGSPYAINIELARDMSMSKDERDKLKKENDARAAKNEAIRENIAKLNAMPNSTNVLKYKLYEEQDHKCAYSMETLDINHLFEDGYYEIDHIIPYSRSFDDSFNNKVLVLKRENQNKRNSTPVEYFERIGRDYDEVLAFWKAVYQKRNRKKLEFLQKKEINESEWKNRALNDTRYASRMLANLIKDYLLFDEKSKDKYGRVETVKGAITSYLRRFWGVQKIREDGDKHHAVDAAIIACVTPKTKNKIERYNQIKESRKMRNGQYVLEDGEICDSDYYDKNSHLVLPYPYKEFINELDARVMDEPVLMQNKLRLLGFNENYLMNAKPFVVSRMTSRKAKGCINEATVFSSKYADNKYPTVCDGNNVIVKRTALANLKLDKNGEINGYFQPEGDVALYNALKQRLVEFDGDAKKAFATPIRKPCNSGQGNIVRTVKTYETYTGGGMILEKNKGIVKNDGMIRVDLYSKDGKYFGVPVYVADLYRGELPKRAATANKPQNEWREMDDTYTFEMSIYQDDLLHIENKKGIELKKKKDVENSAKAQTKTITDDLVYFIGFNRSTASIEVEDTTGCYRRDGIGTQNIGKITKCEIDVLGNVQEIKKRPKQPQPLKMLTDKEKAEKRKNNQNK

SEQ ID NO: 16116 - protein, 1143 aa, unidentified
  REGION 1..1143: note = Cas Enzyme sequence
MYRLGLDVGIKSVGWCVLECDENGEPIQINALNSRIFDAAEQPKTGASLAEPRRNARGLRRRIRRKSFRLERIRKLFIENGIELFETQDDLICLKDEYKNLDVVKLRSDALDKKLTEAEFARVLYSLARHRGFKSNKREGAKDSDEGKLLGSIRKSEEEMRESGMRTRGEQLYKKYLMEGKPVHNKGGDYSMCVSRDILVKEIELLFEKQKEFGNNFATDKNKEKYLDIFLSQRNFDEGPGKGSQYTGSHDVKKCEIYRDEDVAAKGTYTSEWATIYQKINNLSIICGGDRRRLSNEERQIAVELAKKVDKVSYKAFRKAIKLDDDYRFSTLNYSEKKKQGKKKNEGESKSDVVEINDVVDSLACEDKGEFITAKNSNKIVKALNDNLKSDIELVDEIAEICTKYKSENLFRNAIAESKIIDGRLDEETIEKLSKIDMKGYGHLSLHVLREILPYLEEGMVYSDAMQKAGHNHSEHNFEKQKYLGTKEVYDAIGGVTSPVVKRALSQTVKVIDAVIRQYGSPYAINIELARDMLMTKDERDKLKKENDARAAKNEAIRENIAKLNAMPNSTNVLKYKLYEEQDHKCAYSMETLDINHLFEDGYYEIDHIIPYSRSFDDSFNNKVLVLKRENQNKRNSTPVEYFDRIGRDYDEVLAFWKAVYQKRNRKKLEFLQKKEINESEWKNRALNDTRYASRMLANLIKDYLLFDEKSKDKYGRVETVKGAITSYLRRFWGVQKIREDGDKHHAVDAAIIACVTPKTKNKIERYNQIKESRKMRNGQYVLEDGEICDSDYYDKNSHLVLPYPYKEFINELDARVMDEPVLMQNKLRLLGFNENYLMDAKPFVVSRMTSRKAKGCINEATVFSSKYADNKYPTVCDGNNVIVKRTALANLKLDKNGEINGYFQPEGDVALYNALKQRLVEFGGDAKKAFATPIRKPCNSGQGNIVRTVKTYETYTGGGMLLEKNKGIVKNDGMIRVDLYSKDGKYFGVPVYVADLYRGELPKRAATNGKSQNEWRVIDDTYTFEMSIYQDDLLRIESKKGIELKKNKDVENSAKATTKTITDDFAYFIGFDRSTASIKIEDTTGCYFAKSIGIQNIGKITKCEIDVLGNVQEIKKRPKQPQPLKMLTDKEKAEKRKNNQNK

SEQ ID NO: 16117 - protein, 1157 aa, unidentified
  REGION 1..1157: note = Cas Enzyme sequence
MYRLGLDVGIKSVGWCVLECDENGEPIQINALNSRIFDAAEQPKTGASLAEPRRNARGLRRRIRRKSFRLERIRKLFSENGIELFETQDDLICLKDEYKNLDVVKLRSDALDKNLTEAEFARVLYSLARHRGFKSNKRVVETDDGDEEKKGKGKNKDEGKLLSSIRESEEEMRESGMRTRGEQLYKKYLLEGKPVHNKGGDYSMCVSRDILVKEIELLFEKQKEFGNNFATDENKEKYLDIFLSQRNFDEGPGKGSQYTGSHDVKKCEIYRDEDVAAKGTYTSEWATIYQKINNLSIICGGDRRRLSNEERQIAVELAKKVDKVTYKAFRKAIKLDDDYRFSALNYSEKKKSDKKKNEGESKSDVVEINDVVDSLACEDKGDFITAKNSNKIVKALNDNLKSDIELIDEIAEICTKYKSENLFHSAIAESKIIDGRLDEETIEKLSKIDMKGYGHLSLHVLREILPYLEEGMVYSDAMQKAGHNHSEHNFEKQKYLGTKEVYDAIGGVTSPVVKRALSQTVKVIDAVIRQYGSPYAINIELARDMSMSKDERDKLKKENDARAAKNEAIRENIAKLNAMPNSTNVLKYKLYEEQDHKCAYSMETLDINHLFEDGYYEIDHIIPYSRSFDDSFNNKVLVLKRENQNKRNSTPVEYFERIGRDYDEVLAFWKAVYQKRNRKKLEFLQKKEINESEWKNRALNDTRYASRMLANLIKDYLLFDEKSKEKYGRVETVKGAITSYLRRFWGVQKIREDGDKHHAVDAAIIACVTPKTKNKIERYNQIKESRKMRNGQYVLEDGEICDSDYYDKNSHLVLPYPYKEFINELDARVMDEPVLMQNKLRLLGFNENYLMNAKPFVVSRMTSRKAKGCINEATVFSSKYADNKYPTVCDGNNVIVKRTALANLKLDKNGEINGYFQPEGDVALYNALKQRLLEFGGDAKKAFAPTNPIRKPCNSGQGNIVRTVKTYETYTGGGMLLEKNKGIVKNDGMIRVDLYSKDGKYFGVPVYVADLYRGELPKRAATANKPQNEWREMDDTYTFEMSIYQNDLLRIESKKGIELKKDRNNEFSAKENSILLNDGYVYFTSFCISTAAIKIEDTTGCYVAPSVGIQNLKKITKCEIDVLGNVQEIKKRPKQPQPLKMLTDKERAEKRKNNQNK

SEQ ID NO: 16118 - protein, 1083 aa, unidentified
  REGION 1..1083: note = Cas Enzyme sequence
MYYRIGLDIGITSVGWCAVETDASGEPKSILDLGARIFDAAEQPKTGASLAEPRRLARGLRRRLRRRALRIALAKELFAELGVVPDASPRDVNELRVAGLDNLLEEREFAAVLLLLLKRRGFKSNSKAQNSKEDGELLSATKRNAELMAEKGYRTVGEMLAAEYSEKRTRADGSTYTVYNVRNKGGSYAHTVRRADIRQEIEELFAAQAGFGSALASDEVKGRVLEIFDMQRNFDDGPGKGSKYSATYAVGKCEFLEDEERAPRASYSNERFVALQKINHLRIISGGKSRELTAEERGKLIVLAEKNKKTTYAAVRKTLGLGDDERFNALTYSTKKENGDEIKESEKATFVTFERSRAISDCLDEEHRTADIIDAAAYVLSHVKSDSRRLKMFADVPETAVLSDVEKEGLLAVNCDKFGHLSVKAIRAIIPYLEEGQRYDEACRSAGFHHSKKQNDGERSLLLKGSAVAEETENITSPVVRRAVAQTLKVLNAIIGRYGSPVAINIELAREMSKSRAERDKATRENEKRRKNNDTLRETIKEMGVVPTYTRLLMMKLYEEQKGQCPYTGETIAINRLFEDNYVQIDHIIPYSRCFNDSFNNKVLVKTRANQDKGNRTPFEWLFTTPEWNDFFDRVNGMYAGNFKKKQMLLKESFDEEEWKSRALNDTRYICRYMRGLLADRLLFEEAEMGTQRVFAVNGGITAELRRQWGIGKVREDGDIHHAVDAAIIACVTPGAVRKLSAGYKKKHEEKRYKEEGYGAEVTEPYAGFADELAARCMEDEELLRDRLRALGFDENTVLKAKPVFVSRMPKRKGTGPIHKETIQSAKYVEDGISVKKVALTELKLERDKNGEWYIKDYFHPEDDRKTYELLLDKLIAANGNAKVAFAEKVFKPAAEGKIPNEIKKVKLYYPVNSGVMLEDIKGFADNGSMVRVDVFSKNGKYYCVPVYTADIYAGRLPVRAATAGKKLSEWDVMDDTYKFEFALYPNDLIWIKSKKEISMSKQRDNNNSRMPATFNMREGYVYFRGLNISTGAATVISHNNCYAKEGLGLKTIGEIKKCAVNVLGNISFVKEEKRPPAKIKQK

SEQ ID NO: 16119 - protein, 1131 aa, unidentified
  REGION 1..1131: note = Cas Enzyme sequence
MYCIGLDVGIKSVGWCVMECDANGEPLHIKALNTRIFDAAEQPKTGESLALPRRTARGQRRRTRRKSSRLKSIRDLFSANGIAIFDETADGCVLPKKEYVNIDVLKKRAEALDKPVTKEEFARILYSLARHRGFKSNKKPGAKTAEDGKLLAAINENERKMQEKGLRTVGELLYREFEEKGLAVHNKGGDYSRCISRDSLIKEIKLLFEKQKEYGNGFATEENLEKYLGYFSKQRTFDEGPGPGSKYSGGHEVKKCQFYKNEYCAAKGTYSCELSTACQKLNNLTLVIGGDRRLLTDEERKTVLLLAEKKDALTYKDVRKALGYVGNEDMRFGSLNYASAAKKKKDGAITDDSDIFKCESAKFINLKNSNAIRKTLPDELKNDIELIDEIAEICTKYTNETLFRNAVKESGIINGRLKDDTVDELLSLDMKGYGHLSLKALREILPYLKAGDVYSVACEKAGHNHSVFEHERAKYLGKNPEVREILDDITSPVVRRAMSQTIKVIDALIREYGSPCAVNIELARDMSLNFSDRKKEERDNAERAKVNEEIRKSIAAAGAVPNATNVLKRKLYDEQDCKCAYSGKTLDINRLYEDGYYEIDHIIPYSRSFNDSFNNKVLVLKSENQNKRNNTPYEYFLRTGRDWEDFSARVKAIYQKRNNKKMELLLKTTVNEDEWKSRAINDTRYASRLLANVIKDYLLFDENAKGKKRVLTVKGGITSYLRKFWGIQKVRSDGDKHHAVDAAVIACYNDKIGHSIERYNQIKESNKIGNGAYMLKDGEIVSSEYYDKNNNLILPYPYNNFKDELIARTEDSPVIMENALRRIGMPEDYIHNAAPFIVSRMTHRKAKGAIHEATVWSSKYVVNENPKIHDGEKIIVKRTPVENLSLDEKGEIKGYFNPDGDRLLYEAIKTRLKEHGGKGKDAFAVPLRKPCYNGEGNIVRTVKTFERYFGGGVMLEKNRGIAANGSMIRMDLYSKDGKYYGVPVYTADLYKGELPKRAATTGKSKNEWRVMDDTYTFEASIYPSDLLHIENDKEIVMQKIRPDDKSVKADTKKFTDEYVYFIGYDISVGTIGLEDSTGCYKTRKGLQGIKKITKCEIDVLGNVTEIKKRPKAPEPLKLLTESERKEKKKFK

SEQ ID NO: 16120 - protein, 1161 aa, unidentified
  REGION 1..1161: note = Cas Enzyme sequence
MGEMSKTNMDRHRSYRIGLDIGIASVGWAVLENNSQDEPIRILDLGVRIFEAAEVPKTGAALAAERRDARTARRRIRRRRHRLERIKWLFEREGLIQIDSFMERYHSPNLPDVYELRYEGLERKLSNEEFAQVLLHIAKHRGFRSTRKAELKEGDNGKVLKATEENRKRMEEHGYRTVGEMIYKDAYFHTECAWADNGYLLTPRNKADDYSHTMLRALLEEEVHILFECQRKFGNEKATEKLEQEYLEIMLSQRSFDMGPGQQADGTPSPYAMEGFGNKVGYCTLERESGERRAAKATYTAELFVALQKITHMKLVHMDGTSRFFTEEERNILLEMLSSKKEIKYAAVRKKLNLPLEEKFNTLNYNMKRKGKDNKEEEVDEAAIIAATEKATFISMSNCYEYRKRIGEYLETLPEEEQQDLLDEIGTILTCYKNDDSRMNRLTEAGLSKELADSLLELTPAKFQHLSIKAMKKIMPYMKEGMVYDKACEAAGYDFKNDNHGKKMKLLKGENITETINEITNPVVKRSVSQTVKVINAIILKYGSPQAVSIELAREMSKNFEERRKAEKQMEENRKKNEMAKKEIQELGKLSPNGQDILKYRLWHDQQGICLYTGKKIPLEELFQPGYDIDHILPYSITFDDSYRNKVLVTSQANREKGNRTPYEYFGQDEVRWSAYEARVNHFIKDYKKRRNLLKQGFTKEDRREFKERNLNDTKYITRVIYNMIRQNLEMEPLNREDRKKQVFAVNGSITAYLRKRWGLMQKDRSTDTHHAMDAVVVACCTDGMIQKISRSTQYREVLYKGQSHPDYEIVDVETGEIISLEDLSREEWDERYGAQVPPPWEHFKEELEVRIGSDPKNDLDTHPDMYQLFRYPEDVYNNIRPIFVSRMPNHKVTGAAHADTIRSPRHYKDGGEIFADGGYVLSRTNIEDLKLDKDGEIKDYYNKDSDRLLYEALRARLAEYDGDGKKAFAEEFYKPKADGTQGPIVKKVKTYKKMSLGVEINKDEAGVGRGIAENANGGMIRVDVFRENGKYYFVPIYIADALKKRLPNKAAMQNKPYSEWKEMKDENFLFSLYSRDLIGFKNPKGKKVHCTDGTEIVLTNEIVYYIGANIRTASISCKAHDNQYEFGSFGIQSLQELKKYQVDVLGNVTEVRQEKRRGFQ

SEQ ID NO: 16121 - protein, 1169 aa, unidentified
  REGION 1..1169: note = Cas Enzyme sequence
VVLGGEKFMGEMSKTNMDRHRSYRIGLDIGIASVGWAVLENNSQDEPIRILDLGVRIFEAAEVPKTGAALAAERRDARTARRRIRRRRHRLERIKWLFEREGLIQIDSFMERYHSPNLPDVYELRYEGLERKLSNEEFAQVLLHIAKHRGFRSTRKAELKEGDNGKVLKATEENRKRMEEHGYRTVGEMIYKDAYFHTECAWADNGYLLTPRNKADDYSHTMLRALLEEEVHILFDSQRKFGNEKATEKLEQEYLEIMLSQRSFDMGPGQQADGTPSPYAMEGFGNKVGYCTLERESGERRAAKATYTAELFVALQKITHMKLVHMDGTSRFFTEEERNILLEMLSSKKEIKYAAVRKKLNLPLEEKFNTLNYNMKRKGKDNKEEEIDEAAIIAATEKATFISMSNCYEYRKRIGEYLETLPEEEQQDLLDEIGTILTCYKNDDSRMNRLTEAGLSKELADSLLELTPAKFQHLSIKAMKKIMPYMKEGMVYDKACEAAGYDFKNDNHGKKMKLLKGENITEIINEITNPVVKRSVSQTVKVINAIILKYGSPQAVSIELAREMSKNFEERKKAEKQIEENRKKNEMAKKEIQELGKLSPNGQDILKYRLWHDQQGICLYTGKKIPLEELFQPGYDIDHILPYSITFDDSYRNKVLVTSQANREKGNRTPYEYFGQDEVHWSAYEARVNHFIKDYKKRRNLLKQGFTKEDRREFKERNLNDTKYITRVIYNMIRQNLEMEPLNREDRKKQVFAVNGSITAYLRKRWGLMQKDRSTDTHHAMDAVVVACCTDGMIQKISRSTQYREVLYKGQSHPDYEIVDVETGEIISLEDLSREEWDERYGAQVPPPWEHFKEELEVRMGSDPKNDLDAHPDMYQLFRYPEDVYNNIRPIFVSRMPNHKVTGAAHADTIRSPRHYKDGGEIFADGGYVLSRTNIEDLKLDKDGEIKDYYNKDSDRLLYEALRARLAEYDGDGKKAFAEEFYKPKADGTQGPIVKKVKTYKKMSLGVEINKDEAGVGRGIAENANGGMIRVDVFRENGKYYFVPIYIADALKKRLPNKAAMQNKPYSEWKEMKDENFLFSLYSRDLIGFKNPKGKKVKCKDGKEIVLTKEIVYYVGANINTASISCKAHDNQYEFGSFGIQSLQELKKYQVDVLGNITEVRQEKRRGFH

SEQ ID NO: 16122 - protein, 1161 aa, unidentified
  REGION 1..1161: note = Cas Enzyme sequence
MGEMSKTNMDRHRSYRIGLDIGIASVGWAVLENDSQDEPIRILDLGVRIFEAAEVPKTGAALAAERRDARTARRRIRRRRHRLERIKWLFEREGLIQIDSFMERYHSPNLPDVYELRYEGLERKLSKEEFAQVLLHIAKHRGFRSTRKAELKEGDNGKVLKATEENRKRMEEHGYRTVGEMIYKDAYFHTECAWADNGYLLTPRNKADDYSHTMLRALLEEEVHILFDSQRKFGNEKATEKLEQEYLEIMLSQRSFDMGPGQQADGTPSPYAMEGFGNKVGYCTLERESGERRAAKATYTAELFVALQKITHMKLVHMDGTSRFFTEEERNILLEMLSSKKEIKYAAVRKKLNLPLEEKFNTLNYNMKRKGKDNKEEEIDEAAIIAATEKATFISMSNCYEYRKRIGEYLETLPEEEQQDLLDEIGTILTCYKNDDSRMNRLTEAGLSKELADSLLELTPAKFQHLSIKAMKKIMPYMKEGMVYDKACEAAGYDFKNDNHGKKMKLLKGENITETINEITNPVVKRSVSQTVKVINAIILKYGSPQAVSIELAREMSKNFEERRKAEKQMEENRKKNEMAKKEIQELGKLSPNGQDILKYRLWHDQQGICLYTGKKIPLEELFQPGYDIDHILPYSITFDDSYRNKVLVTSQANREKGNRTPYEYFGQDEVRWSAYEARVNHFIKDYKKRRNLLKQGFTKEDRREFKERNLNDTKYITRVIYNMIRQNLEMEHLNREDRKKQVFAVNGSITSYLRKRWGLPTKDRSTDTHHAMDAVVVACCTDGMIQKISRSTQYREVLYKGQSHPDYEIVDVETGEIISLEDLSREEWDERYGAQVPPPWEHFKEELEVRMGSDPKNDLDAHPDMYQLFRYPEDVYNNIRPIFVSRMPNHKVTGAAHADTIRSPRHYNDGGEIFDDSGYVLSRTNIEDLKLDKDGEIKDYYNKDSDRLLYEALKARLAEYEGDGKKAFAEKFYKPKADGTQGPVVKKVKTYKKMSLGVEINKNENGMGRGIAENANGGMIRVDVFRENGKYYFVPIYIADALKKRLPNKASVANKPYSEWKEMKDENFLFSLYSRDLIGFKNPKGKKVTCVSGETMTVTEDIVYYVGADIHTASFLGKSHDSGYEYRGLGIQSLQELKKYQVDVLGNVTEVRQEKRRGFQ

SEQ ID NO: 16123 - protein, 1161 aa, unidentified
  REGION 1..1161: note = Cas Enzyme sequence
MGEMSKTNMDRHRSYRIGLDIGIASVGWAVLENNSQDEPIRILDLGVRIFEAAEVPKTGAALAAERRDARTARRRIRRRRHRLERIKWLFEREGLIQIDSFMERYHSPNLPDVYELRYEGLERKLSNEEFAQVLLHIAKHRGFRSTRKAELKEGDNGKVLKATEENRERMEEHGYRTVGEMIYKDAYFHTECAWADNGYLLTPRNKADDYSHTMLRALLEEEVHILFDSQRKFGNEKATEKLEQEYLEIMLSQRSFDMGPGQQADGTPSPYAMEGFGNKVGYCTLERESGERRAAKATYTAELFVALQKITHMKLVHMDGTSRFFTEEERNILLEMLSSKKEIKYAAVRKKLNLPLEEKFNTLNYNMKRKGKDNEEEGMDEAAIIAATEKATFISMSNCYEYRKRIGDYLDTLPEEEQQDLLDEIGTILTCYKNDDSRMNRLTEAGLSKELADSLLELTPAKFQHLSIKAMKNIMPYMKEGMVYDKACEAAGYDFKNDNHGKKMKLLKGENITEIINEITNPVVKRSVSQTVKVINAIILKYGSPQAVSIELAREMSKNFEERKKAEKQIEENRKKNEMAKKEIQELGKLSPNGQDILKYRLWHDQQGICLYTGKKIPLEELFQPGYDIDHILPYSITFDDSYRNKVLVTSQANREKGNRTPYEYFGQDEVHWSAYEARVNHFIKDYKKRRNLLKQGFTKEDRREFKERNLNDTKYITRVIYNMIRQNLEMEPLNREDRKKQVFAVNGSITAYLRKRWGLMQKDRSTDTHHAMDAVVVACCTDGMIQKISRSTQYREVLYKGQSHPDYEIVDVETGEIISLEDLSREEWDERYGAQVPPPWEHFKEELEVRMGSDPKNDLDAHPDMYQLFRYPEDVYNNIRPIFVSRMPNHKVTGAAHADTIRSPRHYKDGGEIFADGGYVLSRTNIEDLKLDKDGEIKDYYNKDSDRLLYEALRARLAEYDGDGKKAFAEEFYKPKADGTQGPIVKKVKTYKKMSLGVEINKDEAGVGRGIAENANGGMIRVDVFRENGKYYFVPIYIADALKKRLPNKAAMQNKPYSEWKEMKDENFLFSLYSRDLIGFHHLKGKKVKCKDGTEVILTKELVYYIGANIHTASFACKAHNGKYEFDGLGIQSLKELKKYQVDVLGNVTEVRQEKRRGFQ

SEQ ID NO: 16124 - protein, 1161 aa, unidentified
  REGION 1..1161: note = Cas Enzyme sequence
MGEMSKTNMDRHRSYRIGLDIGIASVGWAVLENNSQDEPIRILDLGVRIFEAAEVPKTGAALAAERRDARTARRRIRRRRHRLERIKWLFEREGLIQIDSFMERYHSPNLPDVYELRYEGLERKLSNEEFAQVLLHIAKHRGFRSTRKAELKEGDNGKVLKATEENRERMEEHGYRTVGEMIYKDAYFHTECAWADNGYLLTPRNKADDYSHTMLRALLEEEVHILFDSQRKFGNEKATEKLEQEYLEIMLSQRSFDMGPGQQADGTPSPYAMEGFGNKVGYCTLERESGERRAAKATYTAELFVALQKITHMKLVHMDGTSRFFTEEERNILLEMLSSKKEIKYAAVRKKLNLPLEEKFNTLNYNMKRKGKDNEEEGMDEAAIIAATEKATFISMSNCYEYRKRIGEYLETLPEEEQQDLLDEIGTILTCYKNDDSRMNRLTEAGLSKELADSLLELTPAKFQHLSIKAMKKIMPYMKEGMVYDKACEAAGYDFKNDNHGKKMKLLKGENITEIINEITNPVVKRSVSQTVKVINAIILKYGSPQAVSIELAREMSKNFEERKKAEKQIEENRKKNEMAKKEIQELGKLSPNGQDILKYRLWHDQQGICLYTGKKIPLEELFQPGYDIDHILPYSITFDDSYRNKVLVTSQANREKGNRTPYEYFGQDEVHWSAYEARVNHFIKDYKKRRNLLKQGFTKEDRREFKERNLNDTKYITRVIYNMIRQNLEMEPLNREDRKKQVFAVNGSITAYLRKRWGLMQKDRSTDTHHAMDAVVVACCTDGMIQKISRSTQYREVLYKGQYHPDYEILDVDTGEIISLEDLSREEWDKRYGAQIPPPWNYFVEELKVRMGSDPKNDLDTHPDMYQLFRYPEDVYNNIRPIFVSRMPNHKVTGAAHADTIRSPRHYKDGGEIFADGGYVLSRTNIEDLKLDKDGEIKDYYNKDSDRLLYEALKARLAEYEGDGKKAFAEKFYKPKADGTQGPVVKKVKTYKKMSLGVEINKDENGMGRGIAENANGGMIRVDVFRENGKYYFVPIYIADALKKRLPNKAAMQNKPYSEWKEMKDENFLFSLYSRDLIGFKNPKGKKVKCKDGKEIVLTNEIVYYVGANINTASISCKAHDNQYEFGSFGIQSLQELKKYQVDVLGNITEVRQEKRRGFH

SEQ ID NO: 16125 - protein, 1084 aa, unidentified
  REGION 1..1084: note = Cas Enzyme sequence
MKYAIGLDIGIASVGYAVLALDHEENPWGIIRLGSRIFDVAENPKDGASLALPRREARSVRRRLRRHHHRLERIKNLLINTELITKDELLHLYDGNLSDVYELRVKALDYSVTNAELTRILLHLAQRRGFKSNRKSDANDKEAGQLLEAVSANTKRMQENHYRTVGEMFYKDDLFSKYKRNKGGTYLTTVHRDMIAAEARTILEKQFALGNDICTQDFIDKYLSILLSQRQFDEGPGEPSPYAGNQIANMIGKCTFDPNEYRAAKASYSFERFNLLQKVNHLRLLLEGKSIALDNEQRKKIIALAHDKADLRYSHIRKALGLDEKVLFNTITYNDDVSVIEKKTKFNFLQAYHQIKKVLAEDMQKLTTEQLDNIGQILSTYKSDNKRTEELSALGLEKKIIDALLGINGLSKFAHLSLKALRKINPYLEEGKIYNEACAAAGYDFKAHANTQKTELLPAYKEEMDDITSPVARRAIAQSIKVINAIIREQKCSPVYINIELAREMAKGFDERTQIDKANKENQAKNERIMERIRTEFHKSNPTGMDLIKLKLWEEQDGRSPYSQKAISINRLFEPGYVDIDHIVPYSISFDDSFKNKVLVFSDENRDKGNRLPIAYLQSKFGAKAAENFIIWVQSNIKDYKKRQKLLKREITEEDINKFKERNLQDTKTISRFLYNYINDYLLFAPSDTGKKKRVTAVNGTITAYLRKRWGINKIRANGDKHHAVDAVVIACTTDKMIKDLSSFSKYHELEYMHTDTESLLVNSLTGEILKRFPYPWEDFRPELMARLSDNPADALRKLNLIFYHGIDLSTIKPIFVSRMPRHKVTGAAHKATIKSARCLNNDIVICKTSLQNLKLDKEGEIANYYAPESDTILYNALKERLRAYDNKPAKAFAEPFYKPKADGTPGPLVKKVKVYEKSTLNVAVQQNTAVADNDSMVRVDVFHIKGHGYYLVPIYIADTLKKELPNKAIVAYKPYADWPVMDDSNFIFSLYPNDLIKFEHKNSVKFAKVNKESSLAETFSSKSEFVYYKTSNITTGAIGIITNDNTYVVKGLGVKRLSNLEKYQVDVLGNYTKVKKEIRRSFR

SEQ ID NO: 16126 - protein, 1084 aa, unidentified
  REGION 1..1084: note = Cas Enzyme sequence
MKYAIGLDIGIASVGYAVLALDHEENPWGIIRLGSRIFDVAENPKDGASLALPRREARSVRRRLRRHHHRLERIKNLLINTELITKDELLHLYDGNLSDVYELRVKALDYSVTNAELTRILLHLAQRRGFKSNRKSDANDKEAGQLLEAVSANTKRMQENHYRTVGEMFYKDDLFSKYKRNKGGTYLTTVHRDMIAAEARTILEKQFALGNDICTQDFIDKYLSILLSQRQFDEGPGEPSPYAGNQIANMIGKCTFDPNEYRAAKASYSFERFNLLQKVNHLRLLLEGKSIALDNEQRKKIIALAHDKADLRYSHIRKALGLDEKVLFNTITYNDDVSVIEKKTKFNFLQAYHQIKKVLAEDMQKLTTEQLDNIGQILSTYKSDNKRTEELSALGLEKKIIDALLGINGLSKFAHLSLKALRKINPYLEEGKIYNEACAAAGYDFKAHANTQKTELLPAYKEEMDDITSPVARRAIAQSIKVINAIIREQKCSPVYINIELAREMAKGFDERTQIDKANKENQAKNERIMERIRTEFHKSNPTGMDLIKLKLWEEQDGRSPYSQKAISINRLFEPGYVDIDHIVPYSISFDDSFKNKVLVFSDENRDKGNRLPIAYLQSKFGAKEAENFIIWVQSNIKDYKKRQKLLKREITEEDINKFKERNLQDTKTISRFLYNYINDYLLFAPSDTGKKKRVTAVNGTITAYLRKRWGINKIRANGDKHHAVDAVVIACTTDKMIKDLSSFSKYHELEYTHTDTESLLVNSLTGEILKRFPYPWEDFRPELMARLSDNPADALRKLNLIFYHGTDLSTIKPIFVSRMPRHKVTGAAHKATIKSARCLNNGIVICKTSLQNLKLDKEGEIANYYAPESDTILYNALKERLRAYDNKPAKAFAEPFYKPKADGTPGPLVKKVKVYEKSTLNVAVQQNTAVADNDSMVRVDVFHVKGDGYYLVPIYIADTLKKELPNKAIVAYKPYADWPVMDDSDFIFSLYPNDLIKFEHKNGVKFAKVNKESTLNDFYSTKSDIVYFKGCNINTGAITIINHENTYVVSSLGVKRLPSLEKYQADVLGNYTKVKKEVRKPFR

SEQ ID NO: 16127 - protein, 1084 aa, unidentified
  REGION 1..1084: note = Cas Enzyme sequence
MKYAIGLDIGIASVGYAVLALDHEENPWGIIRLGSRIFDVAENPKDGASLALPRREARSVRRRLRRHHHRLERIKNLLINTELITKDELLHLYDGNLSDVYELRVKALDYSVTNAELTRILLHLAQRRGFKSNRKSDANDKEAGQLLEAVSANTKRMQENHYRTVGEMFYKDDLFSKYKRNKGGTYLTTVHRDMIAAEARTILEKQFALGNDICTQDFIDKYLSILLSQRQFDEGPGEPSPYAGNQIANMIGKCTFDPNEYRAAKASYSFERFNLLQKVNHLRLLLEGKSIALDNEQRKKIIALAHDKADLRYSHIRKALGLDEKVLFNTITYNDDVSVIEKKTKFNFLQAYHQIKKVLAEDMQKLTTEQLDNIGQILSTYKSDNKRTEELSALGLEKKIIDALLGINGLSKFAHLSLKALRKINPYLEEGKIYNEACAAAGYDFKAHANTQKTELLPAYKEEMDDITSPVARRAIAQSIKVINAIIREQKCSPVYINIELAREMAKGFDERTQIDKANKENQAKNERIMERIRTEFHKSNPTGMDLIKLKLWEEQDGRSPYSQKAISINRLFEPGYVDIDHIVPYSISFDDSFKNKVLVFSDENRDKGNRLPIAYLQSKFGAKAAENFIIWVQSNIKDYKKRQKLLKREITEEDINKFKERNLQDTKTISRFLYNYINDYLLFAPSDTGKKKRVTAVNGTITAYLRKRWGINKIRANGDKHHAVDAVVIACTTDKMIKDLSSFSKYHELEYMHTDTESLLVNSLTGEILKRFPYPWEDFRPELMARLSDNPADALRKLNLIFYHGTDLSTIKPIFVSRMPRHKVTGAAHKATIKSARCLNNGIVICKTSLQNLKLDKEGEIANYYAPESDTILYNALKERLRAYDNKPAKAFAEPFYKPKADGTPGHLVKKVKVYEKSTLNVAVQQNTAVADNDSMVRVDVFHIKGEGYYLVPIYIADTLKKELPNKAIVAYKPYADWPVMDDSNFIFSLYPNDLIKFEHRNGVKFAKVNKKSSLAETYLTKSELVYYKGTNITVGSTSIITNDNSYTVKSLGVKTLSNLEKYQVDVLGNYTKVKKEIRRPFR

SEQ ID NO: 16128 - protein, 1084 aa, unidentified
  REGION 1..1084: note = Cas Enzyme sequence
MKYAIGLDIGIASVGYAVLALDHEENPWGIIRLGSRIFDVAENPKDGASLALPRREARSVRRRLRRHHHRLERIKNLLINTELITKDELLHLYDGKLSDVYELRVKALDYSVTNAELTRILLHLAQRRGFKSNRKSDAGDKEAGQLLEAVSANAKRMQENHYRTVGEMFYKDDLFSKYKRNKGGTYLTTMHRDMIAAEARTILEKQFALGNDICTQDFIDKYLSILLSQRQFDEGPGEPSPYAGNQIANMIGKCTFEPNEYRAAKASYSFERFNLLQKVNHLRLLLEGKSIGLDNEQRKKIIALAHEKADLRYSHIRKALGLDEKVLFNTITYNEDVTVIEKKTKFNFLPAYHQIKKALAEDMQKLTTEQLDNIGQILSTYKSDNKRTEELSALGLEKKIIDALLGINGLSKFAHLSLKALRKINPYLEEGKIYNEACAAAGYDFKAHANTQKTELLPAYKEEMDDITSPVARRAIAQSIKVINAIIREQKCSPVYINIELAREMDKGFDERTQIDKANKENQAKNERIMERIRTEFHKSNPTGMDLIKLKLWEEQDGRSPYSQKAISINRLFEPGYVDIDHIVPYSISFDDSFKNKVLVFSDENRDKGNRLPIAYLQSKFGAKEAENFIIWVQSNIKDYKKRQKLLKREITEEDINKFKERNLQDTKTISRFLYNYINDYLLFAPSDTGKKKRVTAVNGTITAYLRKRWGINKIRANGDKHHAVDAVVIACTTDKMIKDLSSFSKYHELEYTHTDTESLLVNSLTGEILKRFPYPWEDFRPELMARLSDNPADALRKLNLIFYHGTDLSTIKPIFVSRMPRHKVTGAAHKATIKSARCLNNGIVICKTSLQNLKLDKEGEIANYYAPESDTILYNALKERLRAYDNKPAKAFAEPFYKPKADGTPGSLVKKVKVYEKSTLNVAVQQNTAVADNDSMVRVDVFHIKGEGYYLVPIYIADTLKKELPNKAIVAYKPYADWPVMDDSNFIFSLYPNDLIKFEHRNGVKFAKVNKESSLAETYLTKSELVYYKGTNITVGSTSIITNDNSYTVKSLGVKKLSNLEKYQVDVLGNYTKVKKEIRRPFR

SEQ ID NO: 16129 - protein, 1084 aa, unidentified
  REGION 1..1084: note = Cas Enzyme sequence
MKYAIGLDIGIASVGYAVLALDHEENPWGIIRLGSRIFDVAENPKDGASLALPRREARSVRRRLRRHHHRLERIKNLLINTELITKDELLHLYDGNLSDVYELRVKALDYSVTNAELTRILLHLAQRRGFKSNRKSDANDKEAGQLLEAVSANTKRMQENHYRTVGEMFYKDDLFSKYKRNKGGTYLTTVHRDMIAAEARTILEKQFALGNDICTQDFIDKYLSILLSQRQFDEGPGEPSPYAGNQIANMIGKCTFDPNEYRAAKASYSFERFNLLQKVNHLRLLLEGKSIALDNEQRKKIIALAHDKADLRYSHIRKALGLDEKVLFNTITYNDDVSVIEKKTKFNFLQAYHQIKKVLAEDMQKLTTEQLDNIGQILSTYKSDNKRTEELSALGLEKKIIDALLGINGLSKFAHLSLKALRKINPYLEEGKIYNEACAAAGYDFKAHANTQKTELLPAYKEEMDDITSPVARRAIAQSIKVINAIIREQKCSPVYINIELAREMAKGFDERTQIDKANKENQAKNERIMERIRTEFHKSNPTGMDLIKLKLWEEQDGRSPYSQKAISINRLFEPGYVDIDHIVPYSISFDDSFKNKVLVFSDENRDKGNRLPIAYLQSKFGAKAAENFIIWVQSNIKDYKKRQKLLKREITEEDINKFKERNLQDTKTISRFLYNYINDYLLFAPSDTGKKKRVTAVNGTITAYLRKRWGINKIRANGDKHHAVDAVVIACTTDKMIKDLSSFSKYHELEYMHTDTESLLVNSLTGEILKRFPYPWEDFRPELMARLSDNPADALRKLNLIFYHGTDLSTIKPIFVSRMPRHKVTGAAHKATIKSARCLNNGIVICKTSLQNLKLDKEGEIANYYASESDTILYNALKERLRAYDNKPAKAFAEPFYKPKADGTPGHLVKKVKVYEKSTLNVAVQQNTAVADNDSMVRVDVFHIKGEGYYLVPIYIADTLKKELPNKAIVAYKPYADWPVMDDSNFIFSLYPNDLIKFEHRNGVKFAKVNKKSSLAETYLTKSELVYYKGTNITVGSTSIITNDNSYTVKSLGVKTLSNLEKYQVDVLGNYTKVKKEIRRPFR

SEQ ID NO: 16130 - protein, 1084 aa, unidentified
  REGION 1..1084: note = Cas Enzyme sequence
MKYAIGLDIGIASVGYAVLALDHEENPWGIIRLGSRIFDVAENPKDGASLALPRREARSVRRRLRRHHHRLDRIKNLLINTELITKDELLHLYDGNLSDVYELRVKALDYSVTNAELTRILLHLAQRRGFKSNRKSDANDKEAGQLLEAVSANAKRMQENHYRTVGEMFYKDDLFSKYKRNKGGTYLTTVHRDMIAAEARTILEKQFALGNNICTQDFIDKYLSILLSQRQFDEGPGEPSPYAGNQIANMIGKCTFEPNEYRAAKASYSFERFNLLQKVNHLRLLLEGKSIALDNEQRKKIIALAHDKADLRYSHIRKALGLDEKVLFNTITYNDDVSIIEKKTKFNFLQAYHQIKKVLAEDMQKLTTEQLDNIGQILSTYKSDNKRTEELSALGLEKKIIDALLGINGLSKFAHLSLKALRKINPYLEEGKIYNEACAAAGYDFKAHANTQKTELLPAYKEEMDDITSPVARRAIAQSIKVINAIIREQKGSPLYVNIELAREMAKGFDERTQIDKANKENQAKNERIMERIRTEFHKANPTGMDLIKLKLWEEQDGRSPYSQKAISINRLFEPGYVDIDHIVPYSISFDDSFKNKVLVFSDENRDKGNRLPIAYLQSKFGAKAAENFMIWVQSNIKDYKKRQKLLKREITEEDINKFKERNLQDTKTISRFLYNYINDYLLFAPSDTGKKKRVTAVNGTITAYLRKRWGINKIRANGDKHHAVDAVVIACTTDKMIKDLSSFSRYHELEYTHTDTESFLVNSLTGEILKRFPYPWEDFRPELMARLSDNPADALRKLNLIFYHGIDLSTIKPIFVSRMPRHKVTGAAHKATIKSARCLDNGIVICKTSLQNLKLDKEGEIANYYAPESDTILYNALKERLRSYDNKPAKAFAEPFYKPKADGTPGPLVKKVKVYEKSTLNVAVQQNTAVADNDSMVRVDVFHVKGNGYYLVPIYIADTLKKELPNKAIVAYKPYADWPVMDDSNFIFSLYPNDLIKFEHKNSVKFAKVNKESTLNDFYSTKSEIVYFKGCNINTGAITIINHENTYVVSSLGVKTLPSLEKYQADVLGNYTKVKKEVRKPFR

SEQ ID NO: 16131 - protein, 1084 aa, unidentified
  REGION 1..1084: note = Cas Enzyme sequence
MKYAIGLDIVIASVGYAVLALDHEENPWGIIRLGSRIFDVAENPKDGASLALPRREARSVRRRLRRHHHRLERIKNLLINTELITKDELLHLYDGNLSDVYELRVKALDYSVTNAELTRILLHLAQRRGFKSNRKSDANDKEAGQLLEAVSANTKRMQENHYRTVGEMFYKDDLFSKYKRNKGGTYLTTVHRDMIAAEARTILEKQFALGNDICTQDFIDKYLSILLSQRQFDEGPGEPSPYAGNQIANMIGKCTFEPNEYRAAKASYSFERFNLLQKVNHLRLLLEGKSIALDNEQRKKIIALAHDKADLRYSHIRKALGLDEKVLFNTITYNDDVSVIKKKTKFNFLPAYHQIKKALAEDMQKLTTEQLDNIGQILSTYKSDNKRTEELSALGLEKKIIDALLGINGLSKFAHLSLKALRKINPYLEEGKIYNEACAAAGYDFKGHANTQKTELLPAYKEEMDDITSPVARRAIAQSIKVINAIIREQKCSPVYINIELAREMAKGFDERTQIDKANKENQAKNERIMERIRTEFHKSNPSGMDLIKLKLWEEQDGRSPYSQKAISINRLFEPGYVDIDHIVPYSISFDDSFKNKVLVFSEENRDKGNRLPIAYLQSKFGAKEAENFIIWVQSNIKDYKKRQKLLKREITEEDINKFKERNLQDTKTISRFLYNYINDYLLFAPSDTGKKKRVTAVNGTITAYLRKRWGINKIRANGDKHHAVDAVVIACTTDKMIKDLSSFSKYHELEYTHTDTESLLVNSLTGEILKRFPYPWEDFRPELMARLSDNPADALRKLNLIFYHGTDLSTIKPIFVSRMPRHKVTGAAHKATIKSARCLNNGIVICKTSLQNLKLDKEGEIANYYAPESDTILYNALKERLRAYDNKPAKAFAEPFYKPKADGTPGPLVKKVKVYEKSTLNVAVQQNTAVADNDSMVRVDVFHLKGKGYYLVPIYIADTLKKELPNKAIVAYKPYADWPVMDDSDFIFSLYPNDLIKFEHKNGVKFAKVNKESTLNDFYSTKSEIVYFKGCNINTGAITIINHENTYVVSSLGAKKLPSLEKYQVDVLGNYTKVKKEIRRPFR

SEQ ID NO: 16132 - protein, 1094 aa, unidentified
  REGION 1..1094: note = Cas Enzyme sequence
MSEYAIGLDIGVTSVGWAIVALDDCDKPCGIIGLGSRIFDAAEHPKTGESLATPRREARGSRRRLRRHRHRNERIRWLLLDQNVIDKDALDRLFSGHLEDIYSLRVRALDELLTGEELARLLIHLSQRRGFQSNRKNPSTDEDGLILSAVSNNQAIMKENGYRTVGEMLLRDPRFSAHKRNKGGEYIATVSRRLIEEEVHLIFAAQRKLLSPHATEALEDAYLNILLSQRSFDDGPGGNSPYGGNQIEKMVGSCTFCPDHPRAAKATYTFEYFTLLEKINHIRILHNGHTLPLTAEQRAALISLAHSTENVDFARIRKVLSLPDDARFNVVRYQEENAANCEKKQKLGCLRAYHQMRKALDRLSRDYILSLPVSHRDAIATALTQYKTTAKIAQYLEQEDLPEALISAVETIGNFSGYGHLSIHACSAIIPHLETGMNYSDACTAAGFQFKGHDGCTRTMLLHPTEADYESITSPVARRAISQTIKVVNAIIRKQKTSPTFINVEVARELAKSFSERNRIKKENQANQAANERCMARLREEFGLLSPSGQDLVKLKLYEQQKGFCPYSQTQMSISRLFESGYAEIDHIIPYSISFDNSYKNKVLVLASKNRDKGNRLPLQYLQGEQAEKFKVWVKNEVKDYKKRQLLLKETITEEERKQFRERTLQDTKTASRFILNYLNDHLQFSPFRARGAKHVTAVNGTITSYMRKRLGISKVRANGDLHHAVDALVVACTTEAMIQQISSHTAYRECRYTRGLQESYAVDESTGEVLKRFPDPWEKFKLELEAYFSSNPAAVLADLHLPLYRSCGLVPPKQPVFVSRVPQRHVTGAAHEATVKSPRLLDSDLVCEKDYVIVKRPLQELKLKNGGIEHYYRQEDDRLLYEALLNRLQEFHGDAKKAFAEEFRKPRHDGSPGPVVKKVKLREPTTLNVKIHGGNGVADNGSLVRTDVFYVEGEGYYLIPIYVADTLKKELPQKACVAHESYKEWKPMRDEDFVFSLYKNDLIRISGSKMIALSRIREDSDLPKQLEADSHMLYYQGMDISSAGIKCISHDNAYEKRLGVKTLESIEKYTVDVLGEYHRVKKEKRVPFTLKRG

SEQ ID NO: 16133 - protein, 1080 aa, unidentified
  REGION 1..1080: note = Cas Enzyme sequence
MRYKVGLDVGIASVGWATVELNEKDEPIRIIEMGSRIFDAAENPQDGASLALPRREARGARRRLRRHRHRLERIRSLILSEGLLTKEERDSLFVGPLSDIYSLRAKALDEKLSPKELARVLIHLAQRRGFSSNRKADSADKEAGLLLTAVNQNRDRIRKKGYRTVGEMFYLDEDFGKHKRNKGGDYSHTVDRAMIADEARLIFANQRALGLSLNEAFEQAYMDILLSQRSFDQGPGEPSPYGGNQIEKMLGSCTFETGERRAVKAAYSFEYFSLLQNINHMRILSDGAARELTKDEKNRLVALAHASPGLTYSRLRKELSLSPFETFAGVSYSAPTIEEAEKKAKFPHLKAYHEIRKALNKVAKDSVKNFTKNQLNQIGYAITVFKNDGQITEHLQAAGVEEAFIPSLLGLSGFTKTGHLSVTAYDKIIPFLEQGLKYNEACQAAGYDFRAHAGEEKARLLPPVSEELENITNPVVRRATAQTIKVINAIIRKMGDSPVYLSIELAREMAKNKKERDKIKKEQQENHARNQRILERIKNEYKKANPTGMDLVKLKLWEEQGGICPYSLAPLDPVQIFDPGYADIDHIAPYSISFDDSYRNKVLVSARENRQKGNRLPMEYLKGEGKDKFCVWVSNTVRDPRKRQLLLKEKFTEEDEKSFKERNLQDTKYIASFLKNYIEDHLLFAPSNTGRKKRVSAVNGAVTSYMRKRWGISKVREDGDLHHAVDALVIACISDSLIQKVSRHYKYRETEYEENTPRVDPATGEVLDRFPLPWPLFRKEVEVRLSNNPSSYLSQLHFYNYQNVDTSAIKPPFVSRMPKRKVTGAAHKDTVRSPKALDEGFTVSKKPLTALKLKDGEIEGYYKPQSDTLLYNALKERLALFGGKADKAFEQPFYKPTKDGRQGPLVKKVKLLEKTTQQVPLHKGTGVADHDNMVRIDVFFVEGEGYYLVPIYIADTLKKTLPNKAVVAFKPYAQWKEMEDENFIFSLYPNDLIKVTSKKDMTLSVVHPDSTLPKELVVSEGMLYYVSANISVASIRVIDHDNSYTIKSMGIKTLKSLEKYQVDVLGSISKVKKEKRQYFK

SEQ ID NO: 16134 - protein, 1083 aa, unidentified
  REGION 1..1083: note = Cas Enzyme sequence
MLPYAIGLDIGIASVGWAAVGLDSEENPCGILQMGSRIFDAAEGERGKSLAAPRREARSVRRRLRRHRHRNERIRALLLREGVLTQEQMDTLFDGKLEDIYTLRVRALDQLVTPEEFSRILIHLAQRRGFRSNRKSGAAEGEDGKLLKAVSENEARMKQCGYRTVGEMILRDKAFADHKRNKGGAYLATVARAAVEKEAMAIFASQREKGACFAAQQLENEYIEILLSQRSFDEGPGGESPYGGNQTEKKVGTCTLEGSSEPRAARACISFEEFTLLDKLNNLRIVSSGSSAALDEEQRAKVLELCFKKDAVDFKAIRSCLKLEPELRFNLVNYYGKDKTQEEAEKKTKFSYLKAYHRIRKEFEKRQPGRYETLSREQLNEIGRVLSLYETTKGIQTALKDSGLTEADLETVDAIGSFSKFGRLSVKACEKLLPYLRQGMRYNEACEAAGYDFKAHSGQERTMLLPAPVEEYDNLTSPVVRRAVSQTIKVVNAIIREQGGSPTYVNIELARELSRDFNEREKIRRDNESNRSANEKLMEQLRKDYGRINPTGLDLVKLRLWQEQQGCCAYSGKNIPAEHLFDENYAEIDHIIPYSISFDDTRSNKVLVLAGENRDKGNRLPMQYLSGEKRERYIVWVERFIRDPRKKAKLLKEQFTEEDEKRFKERNLQDTKTMAVFLKNYIEDHLLFAPSSRRIKRVTAVSGAVTGFLRKRWGIAKVRANGDLHHAVDALVIACTTDGMIRRVTQYANSRETRYQSAQSARNREEFPQPWPHFHRELEARLEPDPQAVIAQLRLPFYMNGNVPEVRPLFVSRMPRRKVHGPAHEATVKSARMLEDGYTLKKVELTALRLDKDGEIKDYYNPESDRLLYDALRARLDECGGNGEKAFKDMEFRKPKRDGTPGPVVKKVKRMEKSTLNVSLPNGGVAIHDKRVRIDVFLVPGDGYYFVPIYVADTLKAELPDRASVAHKEYKDWKQMREEDFIFSLYPNDLVKVTHKSGMTFARANKESTLPESYQTKSEFVYYKSANISKGSLTVINHDNTYGIDSLGIKTLRGLEKYTVDMLGNVSPVGREKRQPFCFKRRG

SEQ ID NO: 16135 - protein, 1083 aa, unidentified
  REGION 1..1083: note = Cas Enzyme sequence
MDKYAIGLDIGIASVGWAIVALDESEKPCGILDMGSRIFTEAEHPKTGASLALPRREARSARRRLRRHRHRNERIRSLLIKSNVVSETQLQQLFQGKLEDIYALRVRALDELLSGPELTRVSIHLAQRRGFRSSRKNGVGEDGKLLEAVTENARRMEDKGYRTVAEMLLLDPEYAEHKRNKGGEYLSTVTRDAVVQETKAVFLAQRNLGSTLATVALEEAYLEILLSQRSFDDGPGGDSPYAGGQIEKMVGTCTFEQGQKRAAKGAYSFEYFTLLEKINHLRLIENGASAPLSAQQREILIALAHKTADLNYAKIRKALLLNENAKFNTVRYRSDSSVEEAEKKEKFQHLQKFHKMRKVFGTRMETLTVQQRNAIAQTLTYYKTEKNIRQMLADQSFTPAELDLICTMDGFAGFGHLSTKACDKLIPYLEQGMRYHEACAAAGYDFRGRDQKEKTVLLHPTEETYADITSPVAKRAIAQTVKVINAVIRRQGVSPVFINIELAREMAKAFAERKQMEKDMRENQAQNERLMERIRKEYGKQEPTGQDLIKLRLFEEQDGVCAYSLQRISAARLFEPNYVEIDHIIPYSLSFDDSRSNKVLVLSAENRNKGNRLPMQYLTGSKREQFIVWTNNNVRSYKKRQLLLKTELTDADLDGFRERNLQDTKTASRFLLNYIQDNLAFAPSDCGRKKKVTAVNGAVTAHLRKRWGIGKVRADGDLHHAVDALVVACTTDGLIRAVSSYSKWRECRYAPAEQVSYAIDEHTGEILKEFPYPWPLFRQELNARLSSNPTQAVLDARIPFYLRSGKPLRLKPLFVSRTPKRKVTGAAHKDTVRSSVLQEEGCVVSKQPLTSLKLDKDGQIQGYYAPESDRLLYEALLAQLVKYGGDAKKAFAEPFYKPKSDGTPGPRVNKVKIYEKATATVSVQGGVAAHDTMVRIDVFLVEGDGYYLVPIYVADTVKEELPRLACVAGKPYSEWKPMDDRHFIFSLYPNDLVKVIHRKTFKLECAEKDTTLAKSKEVKESFLYYCGANIATGAVSFVTHDGAYKTALGLKTLESVEKYAVDVLGSYSPVRKETRQDFTGKRR

SEQ ID NO: 16136 - protein, 1086 aa, unidentified
  REGION 1..1086: note = Cas Enzyme sequence
MIPYAIGFDIGITSVGWAVVALDSEDKPYGIINMGSRVFDAAEQPKTGASLAAPRREARSARRRLRRHQHRLERIRRLLLTENVISQAELDTLFAGKLEDIYTLRVKALDAPVSRTEFARILLHIAQRRGFRSNRKVETAKEDGELLAAVSKNRALMAEKGYRTVGEMLLQDPLYAASKRNKGGQYIATVGRDMVAEEVRAIFRAQRQLGQPFASEKLEARYLDILLSQRSFDEGPGEGSPYAGSQIERMIGKCTLEDGEQRAAKATYSFEYFTLLQNINHLRLLRGGEGSPLTPAQREALIALAHKTKELNFSHIRRELAIPADTTFNAVYYKNTDDAEEAEKKTKFSYLKAYHQMRTAFNKLSKNHFDTLTRAQKNELGRVLSTYKTSAKIRAALLPAGLSDAELDIAETLSFSKFGHISVKACDKLIPFLEKGMKYDEACAAAGYDFKAHSGRERTQLLHPTPDDLADITSPVVRRAVAQTVKVLNAIIRERGCSPTFINLELAREMAQDFTERNQAKKSMDDNRARNERLMERIRTEYGKEHPTGQDLVKLKLWEEQHGECAYSQKHISIEHLFEPDYAEVDHIIPYSISFDDGYKNKILVLAEENRNKGNRLPLQYLQGKRREDFIVWVENTIRSTPKKQRLLKEKLTSEDEKQFKERNLQDTKTMARFLLNYIGDHLAFADFAAGRKKHITAVNGAVTSYMRKRWGISKIRENGDLHHAVDALVIACTTDGMIQQVSRYAALRECEYVQTEGGSLAVSVHTGEVLKSFPYPWPEFRRELEARLGDDPRRAVISQRFPVYLNNNIPVRRLFVSRMPRRKVTGAAHKETIKSPKALQDGVVVTKRPLTSLKLDKNGEIANYYMPQSDRLLYEALKEQLMKYGGDGAKAFTQPFHKPKSDGTPGPIVNKVKLCEPTTLHVPVLKGTGVADNDSMVRIDVFYVEGEGYYFVPIYIADTLKKELPSKACVAFKPYEDWKAMSDENFIFSLYPNDLMRVTHKNKLKLTKAQKESTLPDTYETKQEMLYYISAGIAVAAISCRTHDAAYEIKSMGIKTLAKLEKFTVDVLGEYYKVEREPRMAFNRK

SEQ ID NO: 16137 - protein, 1085 aa, unidentified
  REGION 1..1085: note = Cas Enzyme sequence
MYPYAIGFDIGIASVGWAVVALDGEDRPFGIINMGSRVFDAAEQPKTGDSLAAPRREARSARRRLRRHQHRLERIRRLLAAEKVVSQAELDTLFEGKLEDIYALRVEALDAPVSNTGFARILLHIAQRRGFKSNRKSGTSKEDGELLAAVTANRALMSEKGYRTVGEMLLKDPQYSGNKRNKGGKYLATVGRDMEEVRAIFKAQRERGQPFAAAELEEQYLEILLSQRSFDEGPGQGSPYGGSQIEKMIGKCTLETGEPRAAKASYSFEYFTLLQNVNHLRLMSGGESSPLSSAQRETLIALAHKTKDLNFSRIRKELGISAGTTFNAVFYKNAEDYEEAEKKTKFCYLRAYHQMRAAFNKLAKNHFDGLSRQQKNELGRVLSTYKTSANIRPRLAAAGLSEIEIDIAETMSFSKFGHLSVKACDKLIPFLEKGMKYDEACAAAGYDFNGHDGETRTRLLHPAEDDFADVTSPVVRRAISQTVKVLNAIIRERGGSPTFINIELAREMARDFAERSKMKKDMDENRARNERIMERIRTEYGKERPTGQDLVKFKLWEEQHGECAYSQKHISIERLFEPGYVEVDHIIPYSISFDDGYKNKVLVFTEENRNKSNRLPLQYLQGKRREDFTVWVESSIRDFRKKQRLLKETITAEDEKKFKERNLQDTKTMSRFLLNYISDHLEFADFASGRKKHVTAVNGAVTSYMRKRWGITKIRENGDLHHAVDALVVACTTDGMIQQVSRYAALRECEYVQTEAGSMAVSQHTGEVLRQFPYPWPEFRRELEARLGDDPRRAVISQRFPVYANGDIPVRKLFVSRMPRRKVTGAAHKETIKSPKALDSGNVVVKRALTDLKLDPKTGEIANYYMPQSDRLLYEALKEELKKHGGNGAKAFTAPFHKPKSDGTPGPVVNKVKLCEPTTLNVPVLKGAGVADNDSMVRIDVFHVENDGYYFVPIYIADTLKKELPNKACVAYKPYEQWKEMADKDFIFSLYPNDLLRVTHKTKLKLTKAQKESTLPDTYETKREMLYYISANIHTAAIGCRNHDNTYEIGGMGIKTLEKLEKFTVDVLGEYHKVEKEPRMAFCRK

SEQ ID NO: 16138 - protein, 1090 aa, unidentified
  REGION 1..1090: note = Cas Enzyme sequence
MNKYAIGLDVGIASVGWAVVKLDESEKPCGILKMGSRIFTAAEHPKTGASLAAPRREARGARRRTRRHRHRNERIRNLLINSNVISQSELDNLFNGKLEDIYSLRVKALDEAVTRAEFARMLIHISQRRGFRSNRKEGASAEDGKLLTAVSENRQRMEEKGYRTVGEMFLKDPLFEQSKRNKGGDYIATVDRSMVEEEVRKIFSAQRGFGAKFASEELESAYLSILLSQRSFDEGPGGNSPYAGNQIEKMVGRCTFYPEEPRAAKATYSFEYFNLLEKMNHLRLVSGGSSITLNSEQRTKLLDMAHKSESITYAKIRKELPIPEEYTFNLVHYADDVAVEESEKKEKFSYLKSYHKMRKALDKVSKGRIVGMPIEHRNAIGTALSYYKTSEKITEYLTEAGLETVDIDAAEGIGNFSGFGHLSVKACNELIPFLEQGMNYNDACAAAGFDFKAHSGGEKSKLLHLSEEDMESITSPVVKRSISQTVKVINAIVRDQGESPIYVNIELAREMSKNFNERTKIKKENEDNRAKNAAVLERIQSEYGWHNASGLDIVKMKLYEEQGGVCAYSQKNISLERLLEPGYTEVDHIIPYSISFDDSYKNKVLVLTKENRDKGNRLPLQYLTGERRDKFIVWVNACVRDSKKRKILLTETITDDDKKKFIDRNLQDTKTASRFLLNYINDNLEFAPSDCGRKKKVTAVNGAVTSYMRKRWGITKIREDGDLHHAVDALTVACTTDGMIQQISRYSAYRECEYSPTDVASVAYDPDTGEVIRQFPYPWPNFRKELEARLEDDPGRVISELKLPMYELGLIPVPEKPIFVSRMPNRKVSGAAHKDTVKSPRALDDGKVVVKKSITELKLKNGEIENYYDPNSDRLLYDALKKRLEAFGGDGKKAFAEDFHKPKSDGTPGPIVKKVKVYEPTTLNVSLHDGKGVADNDSMVRIDVFHVENDGYYLVPIYVADTLKPELPNKACLAHKPYSEWKEMKDEDFVFSLYPNDLVEVCHKKVITLSVSNKGSSLPETLSDKSMLLYYTGADISTGAIAGVTHDNAYKARGIGIKTLASMTKYTVDVLGEYHKVGKEKRQPFNIKRR

SEQ ID NO: 16139 - protein, 1095 aa, unidentified
  REGION 1..1095: note = Cas Enzyme sequence
MRPYAIGLDIGITSVGWATVALDADENPCGIIDLGARIFDAAEQPKTGESLAAPRREARSARRRLRRHRHRNERIRNLITDERLVSKDELEVLFDGRLEDIYALRVKALDEQVGRTDFARILLHISQRRGFKSNRKNPTTKEDGVLLAAVNENKQRMSEHGYRTVGEMFLLDETFKDHKRNKGGNYITTVARDMVADEVKAIFSAQREFGASFASEEFEERYLEILLSQRSFDEGPGGNSPYGGSQIERMVGRCTFFPDEPRAAKATYSFEYFTLLQKVNHIRIVENGVSSKLTDEQRRIIIELAHATKDVSYAKIRKALKLSDKQLFNIRYTDNLPAEDSEKKEKLGLMKAYHQMRSAIDRVSKGRFAMMPRAQRNAIGTALSLYKTSDKIRKYLSDAGLEEVDIDAADSIGSFSKFGHISVKACDMLIPFLEQGMNYNEACAAAGLDFKGHDAGEKSKLLHPKEEDYEDITSPVVRRAIAQTIKVINAIIRRERCSPTFINIELAREMAKDFRERNRIKKENDDNRAKNERLLERIRTEYGKNNPTGLDLVKLRLYEEQSGVCMYSLKQMSLEKLFEPNYAEVDHIVPYSISFDDSRKNKVLVLTEENRNKGNRLPLQYLKGRRREDFIVWVNNNVKDYRKRRLLLKEELTAEDESGFKERNLQDTKTMSRFLLNYIADNLEFAESTRGRKKKVTAVNGAVTAYMRKRWGITKIREDGDCHHAVDAVVIACTTDAMIRQVSRYAQFRECEYMQTESGSVAVDTGTGEVLRTFPYPWPDFRKELEARLANDPAKVINDLHLPFYMSAGRPLPEPVFVSRMPRRKVTGAAHKDTIKSARELDNGYLIVKRPLTDLKLKNGEIENYYNPQSDKCLYDALKNALIEHGGDAKKAFAGEFRKPKSDGTPGPIVKKVKLLEPTTMCVPVHGGKGAADNDSMVRVDVFLSGGKYYLVPIYVADTLKPELPNKAVTRGKKYSEWLEMADEDFIFSLYPNDLICATSKNGITLSVCRKDSTLPPTVESKSFMLYYRGTNISTGGISCITHDNAYEIGGLGVKTLEKLEKYTVDVLGEYHKVGKEVRQPFNIKRRKACPSEML

SEQ ID NO: 16140 - protein, 1095 aa, unidentified
  REGION 1..1095: note = Cas Enzyme sequence
MRPYAIGLDIGITSVGWATVALDADENPCGIIDLGSRIFDAAEHPQTGESLAAPRREARSARRRLRRHRHRNERIRSLMLEEQLISQDELEVLFDGRLEDIYALRVKALDEIVSLTDFARILLHISQRRGFKSNRKNPTTKEDGILLAAVNENKQRMSEHGYRTVGEMFLLDETFKAHKRNKGGNYITTVARDMVADEVRAIFSAQRELGASFASEEFEERYLEILLSQRSFDEGPGGNSPYGGSQIERMVGRCTFFPDEPRAAKATYSFEYFTLLQKVNHIRIVENGVSSKLTDEQRRIIIELAHTTKDVSYAKIRKALKLSDKQLFNIRYTDNLPAEDSEKKEKLGLMKAYHQMRSAIDRISKGRFAMMPRAQRNAIGTALSLYKTSDKIRKYLTDAGLDEIDINSADSIGSFSKFGHISVKACDMLIPFLEQGMNYNEACAAAGLNFKGHDAGEKSKLLHPKEEDYEDITSPVVRRAIAQTIKVINAIIRREGCSPTFINIELAREMAKDFRERNRIKKENDDNRAKNERLLERIRTEYGKNNPTGLDLVKLRLYEEQSGVCMYSLKQMSLEKLFEPNYAEVDHIVPYSISFDDSRKNKVLVLTEENRNKGNRLPLQYLKGRRREDFIVWVNNNVKDYRKRRLLLKEELTAEDESGFKERNLQDTKTMSRFLLNYIADNLEFAESTRGRKKKVTAVNGAVTAYMRKRWGITKIREDGDCHHAVDAVVIACTTDAMIRQVSRYAQFRECEYMQTESGSVAVDTGTGEVLRTFPYPWPDFRKELEARLANDPAKVINDLHLPFYMSAGRPLPEPVFVSRMPRRKVTGAAHKDTIKSARELDNGYLIVKRPLTDLKLKNGEIENYYNPQSDKCLYDALKNALIEHGGDAKKAFAGEFRKPKSDGTPGPIVKKVKLLEPTTMCVPVHGGKGAADNDSMVRVDVFLSGGKYYLVPIYVADTLKPELPNKAVTRGKKYSEWLEMADEDFIFSLYPNDLICATSKKGITLSVCWKDSTLPPTVESKSFMLYYRGTDISTGSISCITHDNAYKLRGLGVKTLEKLEKYTVDVLGEYHKVGKEVRQPFNIKRRKACPSEML

SEQ ID NO: 16141 - protein, 1095 aa, unidentified
  REGION 1..1095: note = Cas Enzyme sequence
MRPYAIGLDIGITSVGWATVALDADENPCGIIDLGSRIFDAAEHPQTGESLAAPRREARSARRRLRRHRHRNERIRSLMLEERLISQDELETLFDGRLEDIYALRVKALDEIVSRTDFARILLHISQRRGFKSNRKNPTTKEDGVLLAAVNENKQRMSEHGYRTVGEMFLLDETFKDHKRNKGGNYITTVARDMVADEVRAIFSAQRELGASFASEEFEERYLEILLSQRSFDEGPGGNSPYGGSQIERMVGRCTFFPDEPRAAKATYSFEYFTLLQKVNHIRIVENGVSSKLTDEQRRIIIELAHTTKDVSYAKIRKALKLSDKQLFNIRYSDNSPAEDSEKKEKLGIMKAYHQMRSAIDRVSKGRFAMMPRAQRNAIGTALSLYKTSDKIRKYLTDAGLDEIDINSADSIGSFSKFGHISVKACDMLIPFLEQGMNYNEACAAAGLNFKGHDAGEKSKLLHPKEEDYEDITSPVVRRAIAQTIKVINAIIRREGCSPTFINIELAREMAKDFRERNRIKKENDDNRAKNERLLERIRTEYGKNNPTGLDLVKLRLYEEQSGVCMYSLKQMSLEKLFEPNYAEVDHIVPYSISFDDSRKNKVLVLTEENRNKGNRLPLQYLKGRRREDFIVWVNNNVKDYRKRRLLLKEELTAEDESGFKERNLQDTKTMSRFLLNYIADNLEFAESTRGRKKKVTAVNGAVTAYMRKRWGITKIREDGDCHHAVDAVVIACTTDAMIRQVSRYAQFRECEYMQTESGSVAVDTGTGEVLRTFPYPWPDFRKELEARLANDPAKVINDLHLPFYMSAGRPLPEPVFVSRMPRRKVTGAAHKDTIKSARELDNGYLIVKRPLTNLKLKNGEIENYYNPQSDKCLYDALKNALIEHGGDAKKAFADEFRKPKSDGTPGPIVNKVKLLESATMCVPVHGGKGAADNDSMVRVDVFLSGGKYYLVPIYVADTLKPELPNKAVTRGKKYSEWLEMADENFIFSLYPNDLICATSKNGITLSVCRKDSTLPPTVENKSFMLYYRGTDISTGSISCITHDNAYKLRGLGVKTLEKLEKYTVDVLGEYHKVGKEVRQPFNIKRRKACPSEML

SEQ ID NO: 16142 - protein, 1097 aa, unidentified
  REGION 1..1097: note = Cas Enzyme sequence
MLPYGIGLDIGITSVGWATVALDENDRPYGIIGMGSRIFDAAEQPKTGESLAAPRRAARSARRRLRRHRHRNERIRALILRENLLSEGQLLHLYDGQLSDVYSLRVKALDERVSNEEFARILIHISQRRGFKSNRKGASSKEDSELLAAISANQVRMQQQGYRTVAEMYLKDPIYQEHRRNKGGNYIATVSRAMVEDEVHQIFTGQRACGNPAATKELEEAYVEILLSQRSFDDGPGDGSPYAGSQIERMIGKCQLEKEAGEPRAAKATYSFEYFSLLAAINNISIISNGQLSPLTKEQREMLIALAHKTSELNYARIRKELGLSEAQRFNTVSYGKMEIAEAEKKTKFEHLKAYHKMRREFERIAKGHFASITIEQRNAIGDVLSKYKTDAKIRPALREAGLTELDIDAAEALNFSKFGHISIKACKKIIPWLEQGMKYSEACNAAGYNFKGHDGQEKSHLLPPLDEESRNVITSPVALRAISQTIKVVNAIIRERGCSPTFINIELAREMSKDFYERIEIKKEQDGNRAKNERMMERIRTEYGKASPTGQDLVKFKLYEEQGGVCAYSLKQMSLAHLFEPDYAEVDHIVPYSISFDDGYKNKVLVLAKENRDKGNRLPLQYLQGKRREDFIAWVNSCVRDYKKRQRLLKESISEDDLRAFKERNLQDTKTASRFLLNYISDHLEFTQFATERKKHVTAVNGSVTAYLRKRWGITKIRENGDLHHAVDALVIACTTDGMIQQVSRFAQHRENQYSLAEDSRFIIDPETGEVIKEFPYPWPRFRQELEARLSSNPGLAVRDRGFLLYMAESIPVHPLFVSRMPRRKVTGAAHKETIKSGKAQKDGLLIVKKPLTDLKLDKEGEIANYYNPMSDRLLYEALKKRLTAFNGDGKKAFADPFYKPKSDGTQGPLVNKVKLCEPSTLNVSVIGGKGVAENDSMVRIDVFRVEGDGYYFVPVYVADTVKPELPNKACVANKPYTDWKEMRESDFLFSLYPNDLLKVTHKKALILTKAQKDSDLPDCKETKSEMLYFVSASISTASLACRTHDNSYRINSLGIKTLEALEKYTVDVLGEYHPVRRETRQTFTGRESSGHSGIS

SEQ ID NO: 16143 - protein, 1095 aa, unidentified
  REGION 1..1095: note = Cas Enzyme sequence
MRPYAIGLDIGITSVGWAALALDADENPCGIIGLGSRIFDAAEQPKTGESLAAPRREARSARRRLRRHRHRNERIRSLMLEEQLISQDELAALFDGRLEDIYALRVKALDEIVSRTDFARILLHISQRRGFKSNRKNPTTKEDGVLLAAVNENKQRMSEHGYRTVGEMFLLDETFKDHKRNKGGSYITTVTRDMVADEVKAIFSAQREFGASFASEEFEERYLAILLSQRSFDEGPGGNSPYGGSQIERMVGHCTFFPEEPRAAKATYSFEYFTLLQKVNHIRIVENGVTSKLTDEQRRIMIELAHTTKDVSYAKIRKALRLSDNQFFNIRYSDSASVEDTEKKEKLGLMKAYHQMRSAIDRISKGRFAMIPRAQRNAIGTALSLYKTSDKIRKYLTDAGLDEIDINSADSIGSFSKFGHISVKACDMLIPFLEQGMNYNEACAAAGLNFKGHDAGEKSKLLHPTEEDYEDITSPVARRAIAQTIKVINAIIRREGCSPTFINIELAREMAKDFKERNRIKKENDDNHAKNERLLERIRTEYGKNNPTGLDLVKLRLYEEQGGVCMYSLKQMSLEKLFEPNYAEVDHIVPYSISFDDSRKNKVLVLTEENRNKGNRLPLQYLKGRRREDFIVWVNNNVKDYRKRRLLLKEELTAEDESGFKERNLQDTKTMSRFLLNYIADNLEFAESTRGRKKKVTAVNGAVTAYMRKRWGITKIREDGDCHHAVDAVVIACTTDAMIRQVSRYAQFRECEYMQTESGSVAVDTGTGEVLRTFPYPWPNFRKELEARLANDPAKVINDLHLPFYMSAGRPLPEPVFVSRMPRRKVTGAAHKDTIKSARELDNGYLIVKRPLTDLKLKNGEIENYYNPQSDKCLYDALKNALIEHGGDAKKAFAGEFRKPKSDGTPGPIVKKVKLLEPTTMCVPVHGGKGAADNDSMVRVDVFLSGGKYYLVPIYVADTLKPELPNKAVTRGKKYSEWLEMADEDFIFSLYPNDLICATSKNGITLSVCRKDSTLPPTVENKSFMLYYRGTDISTGSISCITHDNAYKLRGLGVKTLEKLEKYTVDVLGEHHKVGKEVRQPFNIKRRKACPSEML

SEQ ID NO: 16144 - protein, 1095 aa, unidentified
  REGION 1..1095: note = Cas Enzyme sequence
MRHYAIGLDIGITSVGWATVALDADENPCGIIGLGSRIFDAAEQPKTGESLAAPRREARSARRRLRRHRHRNERIRSLMIEEQLISQDELAALFDGRLEDIYALRVKALDEIVSRTDFARILLHISQRRGFKSNRKNPTTKEDGVLLAAVNENKQRMNEHGYRTVGEMFLLDETFKDHKRNKGGSYITTVTRDMVADEVKAIFSAQREFGASFASEEFEERYLAILLSQRSFDEGPGGNSPYGGSQIERMVGHCTFFPEEPRAAKATYSFEYFTLLQKVNHIRIVENGVASKLTDEQRRIIIELAHTTKDVSYAKIRKVLKLSDKQLFNIRYSDNLPAEDSEKKEKLGIMKAYHQMRSAINRISKGRFAMMPRAQRNAIGTALSLYKTSDKIRKYLTDAGLDEIDINSADSIGSFSKFGHISVKACDMLIPFLEQGMNYNEACAAAGINFKGHDVGEKSKLLHPTEEDYEDITSPVARRAIAQTIKVINAIIRREGYSPTFINIELAREMAKDFKERNRIKKENDDNHAKNERLLERIRTEYGKNNPTGLDLVKLRLYEEQGGVCMYSLKQMSLEKLFEPNYAEVDHIVPYSISFDDSRKNKVLVLTEENRNKGNRLPLQYLKGRRREDFIVWVNNNVKDYRKRRLLLKEELTAEDESGFKERNLQDTKTMSRFLLNYIADNLEFAESTRGRKKKVTAVNGAVTAYMRKRWGITKIREDGDVHHAVDAVVIACTTDAMIRQVSRYARFRECEYMQTESGSMAVDTGTGEVIRTFPYPWPDFRKELEARLANDPAKVINDLHLPFYMSAGRPLPEPVFVSRMPRRKVTGAAHKDTIKSARELDNGYLIVKRPLTDLKLKNGEIENYYNPQSDKCLYDALKNALIEHGGDAKKAFAGEFRKPKSDGTPGPIVKKVKLLEPTTMCVPVHGGKGAADNDSMVRVDVFLSGGKYYLVPIYVADTLKPELPNKAVTRGKKYSEWLEMADEDFIFSLYPNDLICAISKNGITLSVCRKDSTLPPTVENKSFMLYYRGTDISTGSISCITHDNAYKLRGLGVKTLEKLEKYTVDVLGEHHKVGKEVRQPFNIKRRKACPSEML

SEQ ID NO: 16145 - protein, 1146 aa, unidentified
  REGION 1..1146: note = Cas Enzyme sequence
LYHTKNYLGYYDKVVHLRALTPRFCEALSLYIAKNANISYNGGTNYKGGTFMRHYAIGLDIGITSVGWATVALDADENPCGIIDLGSRIFDAAEHPQTGESLAAPRREARSARRRLRRHRHRNERIRSLMLEEQLISQDELEVLFDGRLEDIYALRVKALDEIVSRTDFARILLHISQRRGFKSNRKNPTTKEDGILLAAVNENKQRMSEHGYRTVGEMFLLDETFKDHKRNKGGSYITTVTRDMVADEVRAIFSAQRELGASFASEEFEERYLEILLSQRSFDEGPGGNSPYGGSQIERMVGRCTFFPDEPRAAKATYSFEYFTLLQKVNHIRIVENGVSSKLTDEQRRIIIELAHATKDVSYAKIRKALKLSDKQLFNIRYTDNLPAEDSEKKEKLGLMKAYHQMRSAIDRVSKGRFAMMPRAQRNAIGTALSLYKTSDKIRKYLSDAGLEEVDIDAADSIGSFSKFGHISVKACDMLIPFLEQGMNYNEACAAAGLDFKGHDAGEKSKLLHPKEEDYEDITSPVVRRAIAQTIKVINAIIRRERCSPTFINIELAREMAKDFRERNRIKKENDDNRAKNERLLERIRTEYGKNNPTGLDLVKLRLYEEQSGVCMYSLKQMSLEKLFEPNYAEVDHIVPYSISFDDSRKNKVLVLTEENRNKGNRLPLQYLKGRRREDFIVWVNNNVKDYRKRRLLLKEELTAEDESGFKERNLQDTKTMSRFLLNYIADNLEFAESTRGRKKKVTAVNGAVTAYMRKRWGITKIREDGDCHHAVDAVVIACTTDAMIRQVSRYAQFRECEYMQTESGSVAVDTGTGEVLRTFPYPWPDFRKELEARLANDPAKVINDLHLPFYMSAGRPLPEPVFVSRMPRRKVTGAAHKDTIKSARELDNGYLIVKRPLTDLKLKNGEIENYYNPQSDKCLYDALKNALIEHGGDAKKAFAGEFRKPKSDGTPGPIVKKVKLLEPTTMCVPVHGGKGAADNDSMVRVDVFLSGGKYYLVPIYVADTLKPELPNKAVTAAKPYSEWPEMSDEDFIFSLYPNDLICATSKKGITLSVCRKDSTLPPTVESKSFMLYYRGTNISTGGISCITHDNAYEIGGLGVKTLEKLEKYTVDVLGEYHKVGKEVRQPFNIKRRKACPSEML

SEQ ID NO: 16146 - protein, 1087 aa, unidentified
  REGION 1..1087: note = Cas Enzyme sequence
MHQYAIGLDIGTTSVGWAAVALDADENPCGILDFGSRIFTGAEHPKTGASLAAPRREARGARRRLRRHRHRLERIRHLITASGLLTAEGLETLFDGQLEDIYTLRVRALDDCVSREELARIMINLAQRRGFRSNRKGEAGAEDGKILEAVTENRQRMEGSGYRTVGEMFLKDPAFAAHKRNKGGNYIGTVTRAMVEDEARKIFSAQRSFGADYAAAELEQQYLDILLSQRSFDEGPGGNSPYGGSQIERMVGKCTLDNSQMRAAKASYSFEYFTLLSKLNNLRLLSGGLSLPLSDAQREKIVALSHKTDNLNYARIRKELGLDATVRFAGVRYKLDEEAEAQEKKEKIPGMKAYHQMRRALENVGKGRFALLSIEQRNEIARILSCYKSAEKVQSELENIGIEPCDIEALSELNFSRFGHLSVKVCNELIPYLEKGLIYSEACTAAGYNFRAHSADARQKYLPPPEADSSEITSPVVRRAVSQTIKVINAIIRRYGESPVYVNLELARELAKDFNERNKIKKENEDNRSKNEALMEQIREYKHGSPTGLDLVKFKLFNEQGGVCAYSQRQMSLERLFQPNYAEVDHIVPYSISFDDRYKNKVLVLTEENRNKGNRLPLQYLKGERRDSFIVWVNASVRDYQKRNMLLKEEISPEERQKWKERSLQDTKFISRFMLNYINDNLSFAPSIRRKKRVTAVNGAVTSYMRKRWGISKVREDGDRHHAVDALIIACTTDAMIQKVSRYETWHESRYMPTEEGSILFDENTGEVLQEFPAPWPWFRKELEARLANNPSKIVSELKLRFYMDEDAPKVRPLFVSRMPNRKVTGAAHKDTVKSAKAADEGLAITKRPLTTLKLDKSGEIAGYYKPESDRLLYEALKARLAAHGGNAAKAFAEPFRKPRSDGSPGPVVNKVKICEPSTLSVPVYDGAGIADNDSMVRVDIFKVEGDGYYMVPIYVADTLKPELPDRAVVANKPYSQWKQMKDGDFVFSLYPNDLVKLTHRRSIKLSRVFDDSSLPEAIEGREFLLYYNSADISTGAIGCISNDNSYKIRGLGIKTLERMEKYTVDILGEYHPVRKEERQRFNLKRS

SEQ ID NO: 16147 - protein, 1096 aa, unidentified
  REGION 1..1096: note = Cas Enzyme sequence
MAYSIGLDCGISSVGYAVLELDSKEEPKRIIRLGSRIFDKAENPKDGSSLAKPRREARSARRRLRRHRFRLERVKSLIVEAGVLTKQELETLFEGRLPDIYALRVEALDRALLPAEFARVLIHLAQRRGFKSNRKTDASAKEEGELLGAVSKNEALMREKGYRTAGEMFARDALFSVCKRNKGENYLNTVSRSMVEDEIKLIFDAQRRAGNPHASQAMQARYLDIVLSQRSFEDGPGGNSPYGGNQIEKMLGACTFFPDEKRAVKASYSFQYFTLLQNINNLRIVCAGETRTLTSDEREAVKAAAFASAELTYDKLRKALGLADDEYFVALRYGKGDIAETEKAAKFNYLKAYHEIRKALKREKLDIGLLTKEQLNAVGYAFTVYKNDEKIGEALKQAGIGGRVLEALMKLPSFAKAGHISVKACEAIIPWLEQGLKYDQACEAAGFDFKAHIAGKKRFLPADEKEAPELGAITNPVVRRAVSQTVKVVNAILREMGGPPVYINIELSREMSKTFDERRQDESRMKENMAFNERIKQEIKDHFGKTNPTGMDIVKLKLWKEQDGRCPYSLESIDYARLFEDGYVDIDHIIPYSVSFDDSYKNKVLVMSAENRQKGNRLPLQYLQGKRRDDFVVWVGAHIRDARKRQMLLKQKLTEEDEAGFKQRNLQDTQYLSRFLLNFIWDHLDFAVSVTGKKKRVTAVNGAVTGYMRKRWGIQKIRENGDLHHAVDAVVVGCVTDGVIRKVSEYAKRREQYADAGGRIVDRRTGEVKDVFPPPWPDFRTEVEIRLMKDPARMLKEKPLANYAFVNPDGISPCFVSRMPQRKATGAAHKDTVRSPKALGEGLIVSKKPLTDLRLDAAGEIAGYYMPGSDPLLYGALQARLKEYGLYAGSGSAKDLEKRAAAAFAGPFFKPKADGSPGPVVKKVKIAEKASLTVGVHGGRGAAVNDSMVRIDIFYVAGEGYYYVPVYVADTVKPVLPNKACVQAKPYEQWKVMREEDFLFSLYPNDLVRVTAKKPLKMGLVHPASTIPKEMAVNGALLYYTGAGISAASITVINDDHTYVIHSLGVKTLVKLEKYQVDVLGNVSKVGREKRLGFAG

SEQ ID NO: 16148 - protein, 1084 aa, unidentified
  REGION 1..1084: note = Cas Enzyme sequence
MKNTLYGIGLDIGVASVGWAVVGLNGTGEPVGLHRLGVRIFDKAEQPKTGESLAAPRRMARGMRRRLRRKALRRADVYALLERSGLSTREALAQMFEAGGLEDIYALRTRALDEPVGKAEFSRILLHLAQRRGFKSNRRTASDGEDGRLLAAVNENRRRMAQGGWRTVGEMLYRHEAFALHKRNKADDYLSTVGRDMVAEEASILFERQRAMGCSWAAPELQAEYLSILLRQRSFDEGPGGNSPYGGNQVEKMVGRCTFEPDEPRAAKAAYSFEYFSLLQKLNHIRLAENGETRPLTQPQRQQLLSLAHKTPDMSLARIRKELALPETVQFNGVRCRANETLEESEKKEKFACLPAYHKMRKALDGVVKGRISSLSISQRDAAATALSLYKNEDTLRAKLTEAGFQAPEIDALAGLTGFSKFGHLSLKACRKLIPHLEQGLTYDQACSAAGYDFKGHGAGERAFTLPAAAPEMEQITSPVVRRAVAQTIKVVNGIIREMDASPAWVRIELARELSKTFGERQEMDRSMRENAAQNERLMQELRDTFHLLSPTGQDLVKYRLWKEQDGVCAYSLRRLDVERLFEPGYVDVDHIVPYSLSFDDRRSNKVLVLSSENRQKGNRLPLQYLQGKRREDFIVWTNSSVRDYRKRQNLLREKLSGDEAEGFRQRNLQDTQHMARFLYNYISDHLAFAQSEALGKKRVFAVSGAVTSHLRKRWGLSKVRADGDLHHALDAAVIACTTDGMIRRISGYYGHIEGEYLQDADGAGSQHARTKERFPAPWPRFRDELIVRLSEQPGEHLLDINPEFYCEYGTEHICPVFVSRMPRRKVTGPGHKETIKGAAAADEGLLTVRKALTELKLDKDGEIKDYYMPSSDTLLYEALKAQLRRFGGDGKKAFAEPFYKPKADGTPGPLVRKVKTIEKATLTVPVHGGAASNDTMVRVDVFLVPGDGYYWVPVYVADTLKPELPNRAVVQGKPYSEWKEMREEDFIFSLYPNDLVYAEHKSGLKFTVQNADSTLEKTRTQTSAFVYFVGGSISTASITIRTHDNAYGIPSLGVKTLKTFHKYQVDVLGNVFPVHKETRQKFR

SEQ ID NO: 16149 - protein, 1084 aa, unidentified
  REGION 1..1084: note = Cas Enzyme sequence
MKNTLYGIGLDIGVASVGWAVVGLNGTGEPVGLHRLGVRIFDKAEQPKTGESLAAPRRMARGMRRRLRRKALRRADVYALLERSGLSTREALAQMFEAGGLEDIYALRTRALDEPVGKAEFSRILLHLAQRRGFKSNRRTASDGEDGRLLAAVNENRRRMAQGGWRTVGEMLYRHEAFALHKRNKADDYLSTVGRDMVAEEASILFERQRAMGCSWAAPELQAEYLSILLRQRSFDEGPGGNSPYGGNQVEKMVGRCTFEPDEPRAAKAAYSFEYFSLLQKLNHIRLAENGETRPLTQPQRQQLLSLAHKTPDISLARIRKELALPETVQFNGVRCRANETLEESEKKEKFACLPAYHKMRKALDGVVKGRISSLSISQRDAAATALSLYKNEDTLRAKLTEAGFQAPEIDALAGLTGFSKFGHLSLKACRKLIPHLEQGLTYDQACSAAGYDFKGHGAGERAFTLPAAAPEMEQITSPVVRRAVAQTIKVVNGIIREMDASPAWVRIELARELSKTFGERQEMDRSMRENAAKNERLMQELRDTFHQLSPTGQDLVKYRLWKEQDGVCAYSLQRLDVEQLFEPGYVDVDHIVPYSLSFDDRRSNKVLVLSSENRQKGNRLPLQYLQGKRREDFIVWTNSSVRDYRKRQNLLREKFSGDEAEGFRQRNLQDTQHMARFLYNYISDHLAFAQSEALGKKRVFAVSGAVTSHLRKRWGLSKVRADGDLHHALDAAVIACTTDGMIRRISGYYGHIEGEYLQDADGAGSQHARTKERFPAPWPRFRDELIVRLSEQPAEPLLDINPEFYCEYGTEHIRPVFVSRMPRRKVTGPGHKETIKGAAAADEGLLTVRKALTELKLDKDGEIKDYYMPSSDTLLYEALKAQLRRFGGDGKKAFAEPFYKPKADGTPGPLVRKVKTTEKATLTVPVHGGAASNDTMVRVDVFLVPGDGYYWVPVYVADTLKPELPNRAVVQGKPYSEWKEMREEDFIFSLYPNDLVYVEHKSGLKFTLQNADSTLEKTRTQTSAFVYFVGGSISTASITIRTHDNAYGIPSLGVKTLKTFHKYQVDVLGNVFPVHKETRQKFR

SEQ ID NO: 16150 - protein, 1084 aa, unidentified
  REGION 1..1084: note = Cas Enzyme sequence
MKNTLYGIGLDIGVASVGWAVVGLNGTGEPVGLHRLGVRIFDKAEQPKTGESLAAPRRMARGMRRRLRRKALRRADVYALLERSGLSTREALAQMFEAGGLEDIYALRTRALDEPVGKAEFSRILLHLAQRRGFKSNRRTASDGEDGRLLAAVNENRRRMAQGGWRTVGEMLYRHEAFALHKRNKADDYLSTVGRDMVAEEASILFERQRAMGCSWAAPELQAEYLSILLRQRSFDEGPGGNSPYGGNQVEKMVGRCTFEPDEPRAAKAAYSFEYFSLLQKLNHIRLAENGETRPLTQPQRQQLLSLAHKTPDISLARIRKELALPETVQFNGVRCRANETLEESEKKEKFACLPAYHKMRKALDGVVKGRISSLSISQRDAAATALSLYKNEDTLRAKLTEAGFQAPEIDALAGLTGFSKFGHLSLKACRKLIPHLEQGLTYDQACSAAGYDFKGHGAGERAFTLPAAAPEMEQITSPVVRRAVAQTIKVVNGIIREMDASPAWVRIELARELSKTFGERQEMDRSMRENAAQNERLMQELRDTFHQLSPTGQDLVKYRLWKEQDGVCAYSLRRLDVERLFEPGYVDVDHIVPYSLSFDDRRSNKVLVLSSENRQKGNRLPLQYLQGKRREDFIVWTNSSVRDYRKRQNLLREKLSGDEAEGFRQRNLQDTQHMARFLYNYISDHLAFAQSEALGKKRVFAVSGAVTSHLRKRWGLSKVRADGDLHHALDAAVIACTTDGMIRRISGYYGHIEGEYLQDADGAGSQHARTKERFPAPWPRFRDELIVRLSEQPAEPLLDINPGFYCEYGTEHIRPVFVSRMPRRKVTGPGHKETIKGAAAADEGLLTVRKALTELKLDKDGEIKDYYMPSSDTLLYEALKAQLRRFGGDGKKAFAEPFYKPKADGTPGPLVRKVKTTEKATLTVPVHGGAASNDTMVRVDVFLVPGDGYYWVPVYTADTLKPELPNRAVVQGKPYSEWKEMREEDFIFSLYPNDLVYVEHKSGLKFTLQNADSTLEKTRTQTSAFAYFVSGSISTASITIRTHDNAYGIPSLGVKTLKTFHKYQVDVLGNVFPVHKETRQKFR

SEQ ID NO: 16151 - protein, 1084 aa, unidentified
  REGION 1..1084: note = Cas Enzyme sequence
MKNTLYGIGLDIGVASVGWAVVGLNGTGEPVGLHRLGVRIFDKAEQPKTGESLAAPRRMARGMRRRLRRKALRRADVYALLERSGLSTREALAHMFEAGGLEDIYALRTRALDEPVGKAEFSRILLHLAQRRGFKSNRRAASDGEDGRLLAAVNENRRRMAQGGWRTVGEMLYRHEAFALHKRNKADDYLSTVGRDMVAEEASILFERQRAMGCGWATPELQAEYLSILLRQRSFDEGPGGNSPYGGNQVEKMVGRCTFEPDEQRAAKAAYSFEYFSLLQKLNHIRLAENGETRPLTQPQRQQLLSLAHKTPDISLARIRKELALPETVQFNGVRCRANETLEESEKKEKFTCLPAYHKMRKALDGVVKGRISSLSISQRDAAATALSLYKNEDTLRAKLAEAGFQAPEIDALAGLTGFSKFGHLSLKACRKLIPHLEQGLTYDQACTAAGYDFKGHGAGERAFTLPAAAPEMEQITSPVVRRAVAQTIKVVNGIIREMDASPAWVRIELARELSKTFGERQELDRSMRENAAQNERLMQELRDTFHLLSPTGQDLVKYRLWKEQDGVCAYSLQRLDIERLFEPGYVDVDHIVPYSLSFDDRRSNKVLVLSSENRQKGNRLPLQYLQGKRREAFIVWTNSSVRDYRKRQNLLREKFSGDEAEGFRQRNLQDTQHMARFLYNYISDHLAFAQSEALGKKRVFAVSGAVTSHLRKRWGLSKVRADGDLHHALDAAVVACTTDGMIRRISGYYGHIEGEYLQDDDGAGSQHARTKEHFPAPWPRFRDELIVRLSEQPAEPLLDINPAFYCEYGTAHIRPVFVSRMPRRKVTGPGHKETIKGAAAADEGLLTVRKALTELKLDKDGEIKDYYMPSSDTLLYEALKAQLRRFGGDGKKAFAEPFYKPKADGTPGPLVRKVKTTEKATLTVPVHGGAASNDTMVRIDVFLVPGDGYYWVPVYVADTLKPELPNRAVVAFKPYSEWKEMREEDFIFSLYPNDLVYVEHKNGLKFTVQNAESTLEKTRTQASAFVYFVSGSISTASITIRTHDNAYGIPSLGVKTLKTFRKYQVDVLGNVFPVHKETRQKFR

SEQ ID NO: 16152 - protein, 1084 aa, unidentified
  REGION 1..1084: note = Cas Enzyme sequence
MKNTLYGIGLDIGVASVGWAVVGLNGTGEPVGLHRLGVRIFDKAEQPKTGESLAAPRRMARGMRRRLRRKALRRADVYALLERSGLSTREALAQMFEAGGLEDIYALRTRALDEPVGKAEFSRILLHLAQRRGFKSNRRTASDGEDGRLLAAVNENRRRMAQGGWRTVGEMLYRHEAFALHKRNKADDYLSTVGRDMVAEEASLLFQRQRELGCAWATPELQAEYLSILLRQRSFDEGPGGDSPYGGNQVEKMVGRCTFEPDEPRAAKAAYSFEYFSLLQKINHIRLAENGETRPLTQPQRQQLLSLAHKTPDMSLARIRKELALPETVQFNGVRCRANETLEESEKKEKFACLPAYHKMRKALDGVVKGRISSLSISQRDAAATALSLYKNEDTLRAKLTEAGFQAPEIDALAGLTGFSKFGHLSLKACRKLIPHLEQGLTYDQACSAAGYDFKGHGAGERAFTLPAAAPEMEQITSPVVRRAVAQTIKVVNGIIREMDASPAWVRIELARELSKTFGERQEMDRSMRENAAKNERLMQELRDTFHLLSPTGQDLVKYRLWKEQDGVCAYSLQRLDVEQLFEPGYVDVDHIVPYSLSFDDRRSNKVLVLSSENRQKGNRLPLQYLQGKRREDFIVWTNSSVHDYRKRQNLLREKLSDDEAEGFRQRNLQDTQHMARFLYNYISDHLAFAQSEALGKKRVFAVSGAVTSHLRKRWGLSKVRADGDLHHALDAAVVACTTDGMIRRISGYYGHIEGEYFQDADGAGSQHARTKERFPAPWPRFRDELIVRLSEQPGEPLLDINPAFYCEYGTEHIRPVFVSRMPRRKVTGPSHKETVKGAAAADEGLLTVRKALTELKLDKDGEIKDYYMPSSDTLLYEALKAQLRRFGGDGKKAFAEPFYKPKADGTPGPLVRKVKTTEKATLTVPVHGGAASNDTMVRIDVFFMPGDGYYWVPLYVADTLKPELPNRAVVAHKPYSEWQEMREEDFVFSLYPNDLVYVEHKSELKFTVQNADSTLEKTRTQASAFVYFVSGGISGGTITVRTHDNSYGIPSLGLKTLKSLCKYQVDVLGNVFPVHKETRQKFR

SEQ ID NO: 16153 - protein, 1084 aa, unidentified
  REGION 1..1084: note = Cas Enzyme sequence
MKNTLYGIGLDIGVASVGWAVVGLNGTGEPVGLHRLGVRIFDKAEQPKTGESLAAPRRMARGMRRRLRRKALRRADVYALLERSGLSTREALAQMFEAGGLEDIYALRTRALDEPVGKAEFSRILLHLAQRRGFKSNRRTASDGEDGRLLAAVNENRRRMAQGGWRTVGEMLYRHEAFALHKRNKADDYLSTVGRDMVAEEASILFERQRAMGCSWAAPELQAEYLSILLRQRSFDEGPGGNSPYGGNQVEKMVGRCTFEPDEPRAAKAAYSFEYFSLLQKLNHIRLAENGETRPLTQPQRQQLLSLAHKTPDMSLARIRKELALPETVQFNGVRCRANETLEESEKKEKFACLPAYHKMRKALDGVVKGRISSLSISQRDAAATALSLYKNEDTLRAKLTEAGFQAPEIDALAGLTGFSKFGHLSLKACRKLIPHLEQGLTYDQACSAAGYDFKGHGAGERAFTLPAAAPEMEQITSPVVRRAVAQTIKVVNGIIREMDASPAWVRIELARELSKTFGERQEMDRSMRENAAQNERLMQELRDTFHLLSPTGQDLVKYRLWKEQDGVCAYSLRRLDVERLFEPGYVDVDHIVPYSLSFDDRRSNKVLVLSSENRQKGNRLPLQYLQGKRREDFIVWTNSSVHDYRKRQNLLREKLSGDEAEGFRQRNLQDTQHMARFLYNYISDHLAFAQSEALGKKRVFAVSGAVTSHLRKRWGLSKVRADGDLHHALDAAVVACTTDGMIRRISGYYGHIEGEYLQDADGAGSQHARTKERFPAPWPRFRDELIVRLSEQPAEPLLDINPEFYCEYGTEHIRPVFVSRMPRRKVTGPGHKETIKGAAAADEGLLTVRKALTELKLDKDGEIKDYYMPSSDTLLYEALKAQLRRFGGDGKKAFAEPFYKPKADGTPGPLVRKVKTTEKATLTVPVHGGAASNDTMVRVDVFLVPGDGYYWVPVYVADTLKPELPNRAVAQGKPYSEWKEMREEDFIFSLYPNDLVYVEHKSGLKFTVQNADSTLEKTRTQTSAFVYFVGGSISTASITIRTHDNAYGIPSLGVKTLKTFHKYQVDVLGNVFPVHKETRQKFR

SEQ ID NO: 16154 - protein, 1084 aa, unidentified
  REGION 1..1084: note = Cas Enzyme sequence
MKNTLYGIGLDIGVASVGWAVVGLNGTGEPVGLHRLGVRIFDKAEQPKTGESLAAPRRMARGMRRRLRRKALRRADVYALLERSGLSTREELAQMFEAGGLEDIYALRTRALDEPVGKAEFSRILLHLAQRRGFKSNRRTASDGEDGRLLAAVNENRRRMAQGGWRTVGEMLYRHEAFALHKRNKADDYLSTVGRDMVAEEASILFERQRAMGCSWAAPELQAEYLSILLRQRSFDEGPGGNSPYGGNQVEKMVGRCTFEPDEPRAAKAAYSFEYFSLLQKLNHIRLAENGETRPLTQPQRQQLLSLAHKNPDISLARIRKELALPETVQFNGVRCRANETLEESEKKEKFACLPAYHKMRKALDGVVKGRISSLSISQRDAAATALSLYKNEDTLRAKLTEAGFQAPEIDALAGLTGFSKFGHLSLKACRKLIPHLEQGLTYDQACSAAGYDFKGHGAGERAFTLPAAAPEMEQITSPVVRRAVAQTIKVVNGIIREMDASPAWVRIELARELSKTFGERQEMDRSMRENAAQNERLMQELRDTFHLLSPTGQDLVKYRLWKEQDGVCAYSLRRLDVERLFEPGYVDVDHIVPYSLSFDDRRSNKVLVLSSENRQKGNRLPLQYLQGKRREDFIVWTNSSVRDYRKRQNLLREKFSGDEAEGFRQRNLQDTQHMARFLYNYISDHLAFAQSEALGKKRVFAVSGAVTSHLRKRWGLSKVRADGDLHHALDAAVIACTTDGMIRRISGYYGHIEGEYLQDADGAGSQHARTKERFPAPWPRFRDELIVRLSEQPAEPLLDINPEFYCEYGTEHIRPVFVSRMPRRKVTGPGHKETIKGAAAADEGLLTVRKALTELKLDKDGEIKDYYMPSSDTLLYEALKAQLRRFGGDGKKAFAEPFYKPKADGTPGPLVRKVKTTEKATLTVPVHGGAASNDTMVRVDVFLVPGDGYYWVPVYTADTLKPELPNRAVVQGKPYSEWKEMREEDFIFSLYPNDLVYVEHKSGLKFTLQNADSTLEKTRTQTSAFAYFVSGSISTASITIRTHDNAYGIPSLGVKTLKTFHKYQVDVLGNVFPVHKETRQKFR

SEQ ID NO: 16155 - protein, 1095 aa, unidentified
  REGION 1..1095: note = Cas Enzyme sequence
MQMLVKEAVSNMKNTLYGIGLDIGVASVGWAVVGLNGTGEPVGLHRLGVRIFDKAEQPKTGESLAAPRRMARGMRRRLRRKALRRADVYALLERSGLSTREALAQMFEAGGLEDIYALRTRALDEPVGKAEFSRILLHLAQRRGFKSNRRTASDGEDGRLLAAVNENRRRMAQGGWRTVGEMLYRHEAFALHKRNKADDYLSTVGRDMVAEEASILFERQRAMGCSWATPELQAEYLSILLRQRSFDEGPGGNSPYGGNQVEKMVGRCTFEPDEPRAAKAAYSFEYFSLLQKLNHIRLAENGETRPLTQPQRQQLLSLAHKTPDMSLARIRKELALPETVQFNGVRCRANETLEESEKKEKFACLPAYHKMRKALDGVVKGRISSLSISQRDAAATALSLYKNEDTLRAKLTEAGFQAPEIDALAGLTGFSKFGHLSLKACRKLIPHLEQGLTYDQACSAAGYDFKGHGAGERAFTLPAAAPEMEQITSPVVRRAVAQTIKVVNGIIREMDASPAWVRIELARELSKTFGERQEMDRSMRENAAQNERLMQELRDTFHLLSPTGQDLVKYRLWKEQDGVCAYSLRRLDVERLFEPGYVDVDHIVPYSLSFDDRRSNKVLVLSSENRQKGNRLPLQYLQGKRREDFIVWTNSSVRDYRKRQNLLREKLSGDEAEGFRQRNLQDTQHMARFLYNYISDHLAFAQSEALGKKRVFAVSGAVTSHLRKRWGLSKVRADGDLHHALDAAVIACTTDGMIRRISGYYGHIEGEYLQDADGAGSQHARTKERFPAPWPRFRDELIVRLSEQPGEHLLDINPEFYCEYGTEHICPVFVSRMPRRKVTGPGHKETIKGAAAADEGLLTVRKALTELKLDKDGEIKDYYMPSSDTLLYEALKAQLRRFGGDGKKAFAEPFYKPKADGTPGPLVRKVKTIEKATLTVPVHGGAASNDTMVRVDVFLVPGDGYYWVPVYVADTLKPELPNRAVVQGKPYSEWKEMREEDFIFSLYPNDLVYAEHKSGLKFTVQNADSTLEKTRTQTSAFVYFVGGSISTASITIRTHDNAYGIPSLGVKTLKTFHKYQVDVLGNVFPVHKETRQKFR

SEQ ID NO: 16156 - protein, 1084 aa, unidentified
  REGION 1..1084: note = Cas Enzyme sequence
MKNTLYGIGLDIGVASVGWAVVGLNGTGEPVGLHRLGVRIFDKAEQPKTGESLAAPRRMARGMRRRLRRKALRRADVYALLERSGLSTREALAQMFEAGGLEDIYALRTRALDEPVGKAEFSRILLHLAQRRGFKSNRRTASDGEDGRLLAAVNENRRRMAQGGWRTVGEMLYRHEAFALHKRNKADDYLSTVGRDIVAEEASILFERQRAMGCSWATPELQAEYLSILLRQRSFDEGPGGNSPYGGNQVEKMVGRCTFEPDEPRAAKAAYSFEYFSLLQKLNHIRLAENGETRPLTQPQRQQLLSLAHKTPDMSLARIRKELALPETVQFNGVRCRANETLEESEKKEKFACLPAYHKMRKALDGVVKGRISSLSISQRDAAATALSLYKNEDTLRAKLTEAGFQAPEIDALAGLTGFSKFGHLSLKACRKLIPHLEQGLTYDQACSAAGYDFKGHGAGERAFTLPAAAPEMEQITSPVVRRAVAQTIKVVNGIIREMDASPAWVRIELARELSKTFGERQEMDRSMRENAAQNERLMQELRDTFHLLSPTGQDLVKYRLWKEQDGVCAYSLRRLDVERLFEPGYVDVDHIVPYSLSFDDRRSNKVLVLSSENRQKGNRLPLQYLQGKRREDFIVWTNSSVRDYRKRQNLLREKLSGDEAEGFRQRNLQDTQHMARFLYNYISDHLAFAQSEALGKKRVFAVSGAVTSHLRKRWGLSKVRADGDLHHALDAAVIACTTDGMIRRISGYYGHIEGEYLQDADGAGSQHARTKERFPAPWPRFRDELIVRLSEQPGEHLLDINPEFYCEYGTEHICPVFVSRMPRRKVTGPGHKETIKGAAAADEGLLTVRKALTELKLDKDGEIKDYYMPSSDTLLYEALKAQLRRFGGDGKKAFAEPFYKPKADGTPGPLVRKVKTIEKATLTVPVHGGAASNDTMVRVDVFLVPGDGYYWVPVYVADTLKPELPNRAVVQGKPYSEWKEMREEDFIFSLYPNDLVYAEHKSGLKFTVQNADSTLEKTRTQTSAFVYFVGGSISTASITIRTHDNAYGIPSLGVKTLKTFHKYQVDVLGNVFPVHKETRQKFR

SEQ ID NO: 16157 - protein, 1084 aa, unidentified
  REGION 1..1084: note = Cas Enzyme sequence
MKNTLYGIGLDIGVASVGWAVVGLNGTGEPVGLHRLGVRIFDKAEQPKTGESLAAPRRMARGMRRRLRRKALRRADVYALLERSGLSTREALAQMFEAGGLEDIYALRTRALDEPVGKAEFSRILLHLAQRRGFKSNRRTASDGEDGRLLAAVNENRRRMAQGGWRTVGEMLYRHEAFALHKRNKADDYLSTVGRDMVAEEASILFERQRAMGCSWAAPELQAEYLSILLRQRSFDEGPGGNSPYGGNQVEKMVGRCTFEPDEPRAAKAAYSFEYFSLLQKLNHIRLAENGETRPLTQPQRQQLLSLAHKTPDISLARIRKELALPETVQFNGVRCRANETLEESEKKEKFACLPAYHKMRKALDGVVKGRISSLSISQRDAAATALSLYKNEDTLRAKLTEAGFQAPEIDALAGLTGFSKFGHLSLKACRKLIPHLEQGLTYDQACTAAGYDFKGHGAGERAFTLPAAAPEMEQITSPVVRRAVAQTIKVVNGIIREMDASPAWVRIELARELSKTFGERQEMDRSMRENAAQNERLMQELRDTFHLLSPTGQDLVKYRLWKEQDGVCAYSLRRLDVERLFEPGYVDVDHIVPYSLSFDDRRSNKVLVLSSENRQKGNRLPLQYLQGKRREDFIVWTNSSVRDYRKRQNLLREKLSGDEAEGFRQRNLQDTQHMARFLYNYISDHLAFAQSEALGKKRVFAVSGAVTSHLRKRWGLSKVRADGDLHHALDAAVIACTTDGMIRRISGYYGHIEGEYLQDADGAGSQHARTKERFPAPWPRFRDELIVRLSEQPGEHLLDINPGFYCEYGTEHIRPVFVSRMPRRKVTGPGHKETIKGAAAADEGLLTVRKALTELKLDKDGEIKDYYMPSSDTLLYEAIKAQLRRFGGDGKKAFAEPFYKPKADGTPGPLVRKVKTTEKATLTVPVHGGAASNDTMVRVDVFLVPGDGYYWVPVYVADTLKPELPNRAVAQGKPYSEWKEMREEDFIFSLYPNDLVYVEHKSGLKFTLQNADSTLEKTRTQTSAFAYFVSGSISTASITIRTHDNAYGIPSLGVKTLKTFHKYQVDVLGNVFPVHKETRQKFR

SEQ ID NO: 16158 - protein, 1084 aa, unidentified
  REGION 1..1084: note = Cas Enzyme sequence
MKNTLYGIGLDIGVASVGWAVVGLNGTGEPVGLHRLGVRIFDKAEQPKTGESLAAPRRMARGMRRRLRRKALRRADVYALLERSGLSTREALAHMFEAGGLEDIYALRTRALDEPVGKAEFSRILLHLAQRRGFKSNRRTASDGEDGRLLAAVNENRRRMAQGGWRTVGEMLYRHEAFALHKRNKADEYLSTVGRDMVAEEASLLFQRQRELGCAWATPELQAEYLSILLRQRSFDEGPGGNSPYGGNQVEKMVGRCTFEPDEPRAAKAAYSFEYFSLLQKINHIRLVENGETRPLTQQQRQQLLSLAHKTPDVSLARIRKELALPETVQFNGVRCRANETLEESEKKEKFACLPAYHKMRKALDGVVKGRISSLSISQRDAAATALSLYKNEDTLRAKLTEAGFQAPEIDALAGLTGFSKFGHLSLKACRKLIPHLEQGLTYDQACSAAGYDFKGHGAGERAFTLPAAAPEMEQITSPVVRRAVAQTIKVVNGIIREMDASPAWVRIELARELSKTFGERQEMDRSMRENAAQNERLMQELRDTFHLLSPTGQDLVKYRLWKEQDGVCAYSLRRLDVERLFEPGYVDVDHIVPYSLSFDDRRSNKVLVLSSENRQKGNRLPLQYLQGKRREDFIVWTNSSVRDYRKRQNLLREKLSGDEAEGFRQRNLQDTQHMARFLYNYISDHLAFAQSEALGKKRVFAVSGAVTSHLRKRWGLSKVRADGDLHHALDAAVIACTTDGMIRRISGYYGHIEGEYLQDADGAGSQHARTKERFPAPWPRFRDELIVRLSEQPGEHLLDINPEFYCEYGTEHIRPVFVSRMPRRKVTGPGHKETIKGAAAADEGLLTVRKALTELKLDKDGEIKDYYMPSSDTLLYEALKAQLRRFGGDGKKAFAEPFYKPKADGTPGPLVRKVKTTEKATLTVPVHGGAASNDTMVRVDVFLVPGDGYYWVPVYTADTLKPELPNRAVVQGKPYSEWKEMREEDFIFSLYPNDLVYVEHKSGLKFTVQNADSTLEKTRTQTSAFVYFVGGSISTASITIRTHDNAYGIPSLGVKTLKTFHKYQVDVLGNVFPVHKETRQKFR

SEQ ID NO: 16159 - protein, 1084 aa, unidentified
  REGION 1..1084: note = Cas Enzyme sequence
MKNTLYGIGLDIGVASVGWAVVGLNGTGEPVGLHRLGVRIFDKAEQPKTGESLAAPRRMARGMRRRLRRKALRRADVYALLERSGLSTREALAQMFEAGGLEDIYALRTRALDEPVGKAEFSRILLHLAQRRGFKSNRRTASDGEDGRLLAAVNENRRRMAQGGWRTVGEMLYRHEAFALHKRNKADDYLSTVGRDMVAEEASILFERQRAMGCSWATPELQAEYLSILLRQRSFDEGPGGNSPYGGNQVEKMVGRCTFEPDEPRAAKAAYSFEYFSLLQKINHIRLVENGETRPLTQQQRQQLLSLAHKTPDVSLARIRKELALPETVQFNGVRCRANETLEESEKKEKFACLPAYHKMRKALDGVVKGRISSLSISQRDAAATALSLYKNEDTLRAKLTEAGFQAPEIDALAGLTGFSKFGHLSLKACRKLIPHLEQGLTYDQACSAAGYDFKGHGAGERAFTLPAAAPEMEQITSPVVRRAVAQTIKVVNGIIREMDASPAWVRIELARELSKTFGERQEMDRSMRENAAQNERLMQELRDTFHLLSPTGQDLVKYRLWKEQDGVCAYSLRRLDVERLFEPGYVDVDHIVPYSLSFDDRRSNKVLVLSSENRQKGNRLPLQYLQGKRREDFIVWTNSSVRDYRKRQNLLREKLSGDEAEGFRQRNLQDTQHMARFLYNYISDHLAFAQSEALGKKRVFAVSGAVTSHLRKRWGLSKVRADGDLHHALDAAVIACTTDGMIRRISGYYGHIEGEYLQDADGAGSQHARTKERFPAPWPRFRDELIVRLSEQPGEHLLDINPEFYCEYGTEHIRPVFVSRMPRRKVTGPGHKETIKGAAAADEGLLTVRKALTELKLDKDGEIKDYYMPSSDTLLYEALKAQLRRFGGDGKKAFAEPFYKPKADGTPGPLVRKVKTTEKATLTVPVHGGAASNDTMVRVDVFLVPGDGYYWVPVYTADTLKPELPNRAVVQGKPYSEWKEMREEDFIFSLYPNDLVYVEHKSGLKFTVQNADSTLEKTRTQTSAFVYFVGGSISTASITIRTHDNAYGIPSLGVKTLKTFHKYQVDVLGNVFPVHKETRQKFR

SEQ ID NO: 16160 - protein, 925 aa, unidentified
  REGION 1..925: note = Cas Enzyme sequence
MAQGGWRTVGEMLYRHEAFALHKRNKADEYLSTVGRDMVAEEASLLFQRQRELGCAWATPELQAEYLSILLRQRSFDEGPGGNSPYGGNQVEKMVGRCTFEPDEPRAAKAAYSFEYFSLLQKLNHIRLAENGETRPLTQPQRQQLLSLAHKTPDISLARIRKELALPETVQFNGVRCRANETLEESEKKEKFACLPAYHKMRKALDGVVKGRISSLSISQRDAAATALSLYKNEDTLRAKLTEAGFQAPEIDALAGLTGFSKFGHLSLKACRKLIPHLEQGLTYDQACSAAGYDFKGHGAGERAFTLPAAAPEMEQITSPVVRRAVAQTIKVVNGIIREMDASPAWVRIELARELSKTFGERQEMDRSMRENAAKNERLMQELRDTFHLLSPTGQDLVKYRLWKEQDGVCAYSLRRLDVERLFEPGYVDVDHIVPYSLSFDDRRSNKVLVLSSENRQKGNRLPLQYLQGKRREDFIVWTNSSVRDYRKRQNLLREKLSGDEAEGFRQRNLQDTQHMARFLYNYISDHLAFAQSEALGKKRVFAVSGAVTSHLRKRWGLSKVRADGDLHHALDAAVIACTTDGMIRRISGYYGHIEGEYLQDADGAGSQHARTKERFPAPWPRFRDELIVRLSEQPGEHLLDINPEFYCEYGTEHIRPVFVSRMPRRKVTGPGHKETIKGAAAADEGLLTVRKALTELKLDKDGEIKDYYMPSSDTLLYEALKAQLRRFGGDGKKAFAEPFYKPKADGTPGPLVRKVKTIEKATLTVPVHGGAASNDTMVRVDVFLVPGDGYYWVPVYTADTLKPELPNRAVVQGKPYSEWKEMREEDFIFSLYPNDLVYAEHKSGLKFTVQNADSTLEKTRTQTSAFVYFVGGSISTASITIRTHDNAYGIPSLGVKTLKTFHKYQVDVLGNVFPVHKETRQKFR

SEQ ID NO: 16161 - protein, 1084 aa, unidentified
  REGION 1..1084: note = Cas Enzyme sequence
MKNTLYGIGLDIGVASVGWAVVGLNGTGEPVGLHRLGVRIFDKAEQPKTGESLAAPRRMARGMRRRLRRKALRRADVYALLERSGLSTREELAQMFEAGGLEDIYALRTRALDEPVGKAEFSRILLHLAQRRGFKSNRRTASDGEDGRLLAAVNENRRRMAQGGWRTVGEMLYRHEAFALHKRNKADDYLSTVGRDMVAEEASILFERQRELGCAWATPELQAEYLSILLRQRSFDEGPGGDSPYGGNQVEKMVGRCTFEPDEPRAAKAAYSFEYFSLLQKINHIRLAENGETRPLTQPQRQQLLSLAHKTPDMSLARIRKELALPETVQFNGVRCRANETLEESEKKEKFACLPAYHKMRKALDGVVKGRISSLSISQRDAAATALSLYKNEDTLRAKLTEAGFQAPEIDALAGLTGFSKFGHLSLKACRKLIPHLEQGLTYDQACSAAGYDFKGHGAGERAFTLPAAAPEMEQITSPVVRRAVAQTIKVVNGIIREMDASPAWVRIELARELSKTFGERQEMDRSMRENAAKNERLMQELRDTFHLLSPTGQDLVKYRLWKEQDGVCAYSLQRLDVEQLFEPGYVDVDHIVPYSLSFDDRRSNKVLVLSSENRQKGNRLPLQYLQGKRREDFIVWTNSSVHDYRKRQNLLREKLSDDEAEGFRQRNLQDTQHMARFLYNYISDHLAFAQSEALGKKRVFAVSGAVTSHLRKRWGLSKVRADGDLHHALDAAVVACTTDGMIRRISGYYGHIEGEYFQDADGAGSQHARTKERFPAPWPRFRDELIVRLSEQPGEPLLDINPAFYCEYGTEHIRPVFVSRMPRRKVTGPSHKETVKGAAAADEGLLTVRKALTELKLDKDGEIKDYYMPSSDTLLYEALKAQLRRFGGDGKKAFAEPFYKPKADGTPGPLVRKVKTTEKATLTVPVHGGAASNDTMVRVDVFLVPGDGYYWVPVYVADTLKPELPNRAVVQGKPYSEWKEMREEDFIFSLYPNDLVYVEHKSGLKFTLQNADSTLEKTRTQTSAFAYFVSGSISTASITIRTHDNAYGIPSLGVKTLKTFHKYQVDVLGNVFPVHKETRQKFR

SEQ ID NO: 16162 - protein, 1087 aa, unidentified
  REGION 1..1087: note = Cas Enzyme sequence
MKYIIGLDMGIASVGYATLLLDDKEQPCRILKMNSRIFEAAEHPKDGSSLAAPRRINRGMRRRLRRRRFRKEQIRDLIAEKGIMTTEEIDEIYNSGKELSDIYEIRAEALDRILSKEEFVRLMIHLSQRRGFKSNRKVDASDSKSESGKLLIAVKNNRELLSEKGYRTIGEMLYKDERFAANKRNKADDYSNTFSRAEYEDEINQIFEAQLALGNPYATDDFRKKYLDIYLSQRAFDDGPGGKSPYAGNQIEKMLGHCTFEENELRAVKASYSFEYFNLLSKVNAIKIVGEGGKRSLTDAERKSVIALAFAKNSVTYASLRRELKLPDGKFFNISYGKGDKSAEEVEKKTKFAYLTAFHTFKKAYGQAYVGWSTEKKNALAYALTVYKNDNKIIAYLTDHNFEKAEIEIALTLPSFTKTGNLSVKALDKLIPYLEQGMLYNEACSAAGYNFKADDASKRMFLPANAKDAPELEELRNPVVRRAVSQTIKVINAVIRECGESPTFVNIEIARELAKDFKDRKQIEREQKENQEKNEKLMERLRNEFHILKPTGQDLIKLKLWEEQDGRCPYSQKPISIEKLFDVGYTDIDHIIPYSICFDDTYNNKVLVLSAENRMKGNRLPMQYLGGKRQDDFRLWVNSAHLRKRKKDNLLRESYTEEDKSGWKKRNLQDTQYMASFMLNYLKKYLALQPSDQGRKNQIISVNGRATDYLRKRWGVQKIRENGDTHHAVDAVIIACVTQGMIKRISEYAKYKETAFQHPETKEYFDVDKKTGEVINRFPLPYPDFRKELDIRCSDDPIRLLRLHPLVQYSSGEEVKPMFVSRMPNHKVKGAAHMETIRGHFKEDGKDYSVAKVPLTSLKLKNGEIEGYFNPGSDMLLYNALKARLAQFGGDGKKAFSEPFYKPKADGSQGPLVKKVKIVNKSTLSVPVHGGTAVADNGSMVRVDVFYVENEGYYLVPVYVSDTVKRELPNRAIVAHKAYEDWKEMDENNFVFSLYPNDLIKLTFAKEMSFSLTNKGSSLPPEMKCKEIFAYYKGTNIASGTIGVINHDNTYGIGSLGIKRLPHIEKYQVDVLGNITKVGKEKRMRFR

SEQ ID NO: 16163 - protein, 1077 aa, unidentified
  REGION 1..1077: note = Cas Enzyme sequence
MNTAYGIGLDIGIASVGWAVVALNEDAEPYGLIRCGSRVFDKAEQPKTGDSLAASRREARSTRRRLRRRSLRKADLYALMEKSGLPGRAAVEEAVLAGHLPDIYALRVQALDGPVTAMDFARILLHLMQRRGFRSNRKADDAQKDGKLLQAIDANTQRMKDNHYRTVGEMMYRDPAFATHKRNKTENYLSTVRRDQIASEAAQLFAAQRQYGAAWASPETEAEYLTILTRQRSFDEGPGGNSPYGGNMIEKMVGTCTLEGTAEPRAAKATWSFEYFTLLQKLNHIRIEEGGNSHPLTHAQRQELLALCYQTDKLDFARIRKVLELPPQARFNMVRYRADQPADACEKKEKITALPCYHKMRKALNTLRKDYILTVGHDRLDAAATALTLYKSEDLLREKLQQADFEPLEINALLTLPSFSKFGHISVKACRKLIPYLEQGENYNDACREAGYDFQGSGHGEKSILLPAEAEKFSDITSPVVRRAVAQTIKVVNAIIREQGESPVSIHLELAREMSKSFQERADLENAMKENNADNERLMRDLHERFPGRNISGQDLVKYRLWKEQDGRCAYSLQPLELQSVITVSGYAEVDHIVPYSISFDDRRTNKVLVLASENRQKGNRLPLQYLQGTRRDNFIVYTKNNVKNYRKRQNLLKENLSAEDSSGFMQRNLQDTQYIASFMLNYIRGHLAFAAHPMAGKKRVVAVNGAVTSFLRKRWGIAKVRADGDLHHAVDAAVIACTTDGMIQRVSRFYQREELSHARGERFPEPWPRFRDELMQRLSSCPQENLLTINPVYYTTADIAGIKPVFVSRMPRHKATGPAHKETIKGRLDDTYVTQRRSITDLKLNKDGEIDGYFNPSSDTLLYNALKERLVAFGGNGKKAFAEPFFKPRADGTPGAQVRKVKLYSKATSTVPVHGGNGVADNDTMVRVDVYYIPGDGYYWVPIYVADTVKPILPNRAVVAYKSCSEWKEMSEENFLFSLCKNDLVCIESKRPIKLKAANEDSTLEKELTVQRVLAYFEGGNIATGAVSVTTHDNAYIAGSLGFKTLQKVEKYQVDVLGNYTRVKKEKRQLFPAQRR

SEQ ID NO: 16164 - protein, 1010 aa, unidentified
  REGION 1..1010: note = Cas Enzyme sequence
RLRRRSLRKADLYELMEKNGLPGKAEIEQAVQAGHLPDVYALRVQALDGPVTALDFARILLHLMQRRGFRSNRKADDAQKDGKLLQAIDANTRRMEANRYRTVGEMMYRDPVFAEHKRNKAENYLSTVKRDQIIDEARLVFAAQRQYGATWASLEMEAEYLCILTRQRSFAEGPGKGSPYSGSNRVGTCTLEGKSEQRAAKAAFSFEYFTLLQKINHIRIAENGTSRTLTPAERQVLLSVCSQTDKLDFARVRKALALPEEARFNMVRYRGEQTAEACEKKEKITALPCYHKMRKALNTLRKDHIRNISREQLDAAGAALTNPENEDKLREALKQAEFEPLEIEALLTLPSFAGYGHISVKACRKLIPYLEQGMNYNDACQAAGYDFQGRQNGEKAQFLPASTEEMEDITSPVVRRAVAQTIKVVNAIIREQGESPVSIHLELAREMNKNFQQRSELDKAMRDNSAENERLMKELNELFPGRTVSGQDLVKYRLWKEQDGRCAYSIQPLELDKVITVSGYAEVDHIVPYSISFDDRRTNKVLVLASENRQKGNRLPLQYLQGKRRDDFIVYTKANVKNFRKRQNLLKERLSEEDGKGYIQRNLQDTQYIAAFMLNYIRNHLAFADCSGAGKRRVVAVNGAVTAFLRKRWGLSKVRADGDLHHAVDAAVIACTTQGMIKRVSDFCKRAETTAVRNEHFPEPWPHFRDELRQRLSACPQEDLMKINPVYYATVDISSIQPVFVSRMPRHKVTGAAHEETIRSQVNEQYTAVRKSITELSLDKDGKIKDYFKPSSDTLLYEALKKRLTEFGGNAKKAFAEPFYKPRADGTPGAQVRKVKVVAKMNNTIPVRSGGGVAKGGDMIRIDVYYVPGDGYYWVPIYVADTVRPELPNKAVLRGKSMEDWKEMKEENFLFSLYANDLILVEREEPINFSLVNNDSTLPNKFSVKKVLVYYKNGNISNAAIKVETHDGAYVFEGMTFGTVRKIQKYQVDILGNYVPVKKEKRQTFPAQRR

SEQ ID NO: 16165 - protein, 1074 aa, unidentified
  REGION 1..1074: note = Cas Enzyme sequence
MKHPYGIGLDIGIASVGWAVVALNENAEPYGLIRCGSRIFDKAEQPKTGDSLAAPRREARSARRRLRRRSLRKADLYELMEKNGLPGKAEIEQAVQAGHLPDVYALRVQALDGPVTALDFARILLHLMQRRGFRSNRKADDAQKDGKLLQAIDANTRRMEANRYRTVGEMMYRDPVFAEHKRNKAENYLSTVKRDQIIDEVRLVFAAQRQYGATWASPEMEAEYLCILTRQRSFAEGPGKGSPYSGSNRVGTCTLEGKSEQRAAKAAFSFEYFTLLQKINHIRIAENGTSRTLTPAERQILLSVCCQTDKMDFARVRKALALPEEARFNMVRYRGEQTAEACEKKEKITALPCYHKMRKALNTLRKDHIRNISREQLDAAGAALTNPENEDKLREALKQAEFEPLEIEALLTLPSFAGYGHISVKACRKLIPYLEQGMNYNDACQAAGYDFQGRQNGEKAQFLPASTEEMEDITSPVVRRAVAQTIKVVNAIIREQGESPVSIHLELAREMNKNFQQRSELDKAMRDNSAENERLMKELNELFPGRTVTGQDLVKYRLWKEQNEICAYSLEKLDLTRVITEAGYAEVDHIVPYSISFDDRRTNKVLVLASENRQKGNRLPLQYLQGKRRDDFIVYTKANVKNFRKRQNLLKERLSEEDGKGYIQRNLQDTQYIAAFMLNYIRNHLAFADCSGAGKRRVVAVNGAVTAFLRKRWGLSKVRTDGDLHHAADAAVIACTTQGMIKRVSDFCKRAETTAVRNEHFPEPWPRFRDELTQRLSACPQEDLMKINPVYYATVDISSIQPVFVSRMPRHKVTGAAHEETIRSQVNEKYTAVRKSITELSLDKDGKIKDYFKPSSDTLLYEALKKRLTEFGGNAKKAFAEPFYKPRADGTPGAQVRKVKVVAKMNNTIPVRSGGGVAKGGDMIRIDVYYVPGDGYYWVPIYVADTVKETLPNKAVVRDKTMEEWKEMKEDDFLFSLYSNDLILVERDKPICFSLMHEDSTLPKKYETKKELVYYKGGDISNGGIRIETHEGAYFLKSLTFGIVQKVQKYQVDVLGNYTPVKKEKRQTFPAQRR

SEQ ID NO: 16166 - protein, 1009 aa, unidentified
  REGION 1..1009: note = Cas Enzyme sequence
LRRRSLRKADLYELMEKNGLPGKAEIEQAVQAGHLPDVYALRVQALDGPVTALDFARILLHLMQRRGFRSNRKADDAQKDGKLLQAIDANTRRMEANRYRTVGEMMYRDPVFAEHKRNKAENYLSTVKRDQIIDEARLVFAAQRQYGATWASPEMEAEYLCILTRQRSFAEGPGKGSPYSGSNRVGTCTLEGKSEQRVAKAAFSFEYFTLLQKINHIRIAENGTSRTLTPAERQVLLSVCCQTDKLDFARVRKALALPEEARFNMVRYRGEQTAEACEKKEKITALPCYHKMRKALNTLRKDHIRNISREQLDAAGAALTNPENEDKLREALKQAEFEPLEIEALLTLPSFAGYGHISVKACRKLIPYLEQGMNYNDACQAAGYDFQGRQNGEKAQFLPASTEEMEDITSPVVRRAVAQTIKVVNAIIREQGESPVSIHLELAREMNKNFQQRSELDKAMRDNSAENEKLMQELHAKFSGRKISGQDLVKYRLWKEQNEICAYSLEKLDLTRVITEAGYAEVDHIVPYSISFDDRRTNKVLVLASENRQKGNRLPLQYLQGKRRDDFIVYTKANVKNFRKRQNLLKERLSEEDGKGYIQRNLQDTQYIAAFMLNYIRNHLAFADCSGAGKRRVVAVNGAVTAFLRKRWGLSKVRADGDLHHAADAAVIACTTQGMIKRVSDFCKRAETTAVRNEHFPEPWPHFRDELTQRLSACPQEDLMKINPVYYATVDISSIQPVFVSRMPRHKVTGAAHKETIKSRLDDTHVVQRRNITELKLDKDGEIAGYFNRSSDTLLYNALKARLLAFGGDGKKAFAEPFYKPRADGTPGARVQKVKICDKVTSTVPVHDGKGVADNDTMVRIDVYYVPGDGYYWIPVYVADTVKPELPSKAVVAYKSSAEWKEMKDEDFLFSLCQHDLVRIESKRLMKFKVQNRDSTLEKEMPVNKILAYFEGGNIATGAVTLTTHDDAYIADGLGFKTLQKVQKYQVDVLGNYTPVKKEKRQTFPAQRR

SEQ ID NO: 16167 - protein, 995 aa, unidentified
  REGION 1..995: note = Cas Enzyme sequence
MEKNGLPGKAEIEQAVQAGHLPDVYALRVQALDGPVTALDFARILLHLMQRRGFRSNRKADDAQKDGKLLQAIDANTRRMEANRYRTVGEMMYRDPVFAEHKRNKAENYLSTVKRDQIIDEARLVFAAQRQYGATWASPEMEAEYLCILTRQRSFAEGPGKGSPYSGSNRVGTCTLEGKSEQRAAKAAFSFEYFTLLQKINHIRIAENGTSRTLTPAERQVLLSVCSQTDKLDFARIRKALALPEEARFNMVRYRGEQTAEACEKKEKITALPCYHKMRKALNTLRKDHIRNISREQLDAAGAALTNPENEDKLREALRQAEFEPLEIEALLTLPSFAGYGHISVKACRKLIPYLEQGMNYNDACQAAGYDFQGSQNGEKAQFLPASTEEMEDITSPVVRRAVAQTIKVVNAIIREQGESPVSIHLELAREMNKNFQQRSELDKAMRDNSAENERLMKELNELFPGRTVTGQDLVKYRLWKEQDGRCAYSIQPLELDKVITVSGYAEVDHIVPYSISFDDRRTNKVLVLASENRQKGNRLPLQYLQGKRRDDFIVYTKANVKNFRKRQNLLKERLSEEDGKGFIQRNLQDTQYIAAFMLNYIRNHLAFADCSGAGKRRVVAVNGAVTAFLRKRWGLGKVRADGDLHHAVDAAVIACTTQGMIKRVSDFCKRAETTAVRNEHFPEPWPHFRDELTQRLSACPQEDLMKINPVYYATVDISSIQPVFVSRMPRHKVTGAAHEDTIRSQVNEKYTAVRKSITELSLDKDGKIKDYFKPSSDTLLYEALKKRLTEFGGNAKKAFAEPFYKPRADGTPGAQVRKVKVVVKMSNTIPVRSGGGVAKGGNMIRIDVYYVPGDGYYWVPIYVADTVKETLPNKAVVRDKTMEEWKEMKEDDFLFSLYSNDLILVERDKPICFSLMHEDSTLPKKYETKKELVYYKGGDISNGGIRIETHEGAYFLKSLTFGIVQKVQKYQVDVLGNYTPVKKEKRQTFPAQRR

SEQ ID NO: 16168 - protein, 1021 aa, unidentified
  REGION 1..1021: note = Cas Enzyme sequence
RCSGPRAGACRSLRRRSLRKADLYELMEKNGLPGKAEIEQAVQAGHLPDVYALRVQALDGPVTALDFARILLHLMQRRGFRSNRKADDAQKDGKLLQAIDANTRRMEANRYRTVGEMMYRDPVFAEHKRNKAENYLSTVKRDQIIDEARLVFAAQRQYGATWASPEMEAEYLCILTRQRSFAEGPGKGSPYSGSNRVGTCTLEGKSEQRVAKAAFSFEYFTLLQKINHIRIAENGTSRTLTPAERQVLLSVCCQTDKLDFARVRKALALPEEARFNMVRYRGEQTAEACEKKEKITALPCYHKMRKALNTLRKDHIRNISREQLDAAGAALTNPENEDKLREALKQAEFEPLEIEALLTLPSFAGYGHISVKACRKLIPYLEQGMNYNDACQAAGYDFQGRQNGEKAQFLPASTEEMEDITSPVVRRAVAQTIKVVNAIIREQGESPVSIHLELAREMNKNFQQRSELDKAMRDNSAENEKLMQELHAKFSGRKISGQDLVKYRLWKEQNEICAYSLEKLDLTRVITEAGYAEVDHIVPYSISFDDRRTNKVLVLASENRQKGNRLPLQYLQGKRRDDFIVYTKANVKNFRKRQNLLKERLSEEDGKGYIQRNLQDTQYIAAFMLNYIRNHLAFADCSGAGKRRVVAVNGAVTAFLRKRWGLSKVRADGDLHHAADAAVIACTTQGMIKRVSDFCKRAETTAVRNEHFPEPWPHFRDELTQRLSACPQEDLMKINPVYYATVDISSIQPVFVSRMPRHKVTGAAHKETIKSRLDDTHVVQRRNITELKLDKDGEIAGYFNRSSDTLLYNALKARLLAFGGDGKKAFAEPFYKPRADGTPGARVQKVKICDKVTSTVPVHDGKGVADNDTMVRIDVYYVPGDGYYWIPVYVADTVKPELPSKAVVAYKSSAEWKEMKDEDFLFSLCQHDLVRIESKRLMKFKVQNRDSTLEKEMPVNKILAYFEGGNIATGAVTLTTHDDAYIADGLGFKTLQKVQKYQVDVLGNYTPVKKEKRQTFPAQRR

SEQ ID NO: 16169 - protein, 1078 aa, unidentified
  REGION 1..1078: note = Cas Enzyme sequence
MCKKMKHPYGIGLDIGIASVGWAVVALNENAEPYGLIRCGSRIFDKAEQPKTGDSLAAPRREARSARPRPRPPRPPPAGRHPLPGRNGLPGKAEIEQAVQAGHLPDVYALRVQALDGPVTALDFARILLHLMQRRGFRSNRKADDAQKDGKLLQAIDANTRRMEANRYRTVGEMMYRDPVFAEHKRNKAENYLSTVKRDQIIDEVRLVFAAQRQYGATWASPEMEAEYLCILTRQRSFAEGPGKGSPYSGSNRVGTCTLEGKSEQRAAKAAFSFEYFTLLQKINHIRIAENGTSRTLTPAERQILLSVCCQTDKMDFARVRKALALPEEARFNMVRYRGEQTAEACEKKEKITALPCYHKMRKALNTLRKDHIRNISREQLDAAGAALTNPENEDKLREALKQAEFEPLEIEALLTLPSFAGYGHISVKACRKLIPYLEQGMNYNDACQAAGYDFQGRQNGEKAQFLPASTEEMEDITSPVVRRAVAQTIKVVNAIIREQGESPVSIHLELAREMNKNFQQRSELDKAMRDNSAENERLMKELNELFPGRTVTGQDLVKYRLWKEQNEICAYSLEKLDLTRVITEAGYAEVDHIVPYSISFDDRRTNKVLVLASENRQKGNRLPLQYLQGKRRDDFIVYTKANVKNFRKRQNLLKERLSEEDGKGYIQRNLQDTQYIAAFMLNYIRNHLAFADCSGAGKRRVVAVNGAVTAFLRKRWGLSKVRTDGDLHHAADAAVIACTTQGMIKRVSDFCKRAETTAVRNEHFPEPWPRFRDELTQRLSACPQEDLMKINPVYYATVDISSIQPVFVSRMPRHKVTGAAHEETIRSQVNEKYTAVRKSITELSLDKDGKIKDYFKPSSDTLLYEALKKRLTEFGGNAKKAFAEPFYKPRADGTPGAQVRKVKVVAKMNNTIPVRSGGGVAKGGDMIRIDVYYVPGDGYYWVPIYVADTVKETLPNKAVVRDKTMEEWKEMKEDDFLFSLYSNDLILVERDKPICFSLMHEDSTLPKKYETKKELVYYKGGDISNGGIRIETHEGAYFLKSLTFGIVQKVQKYQVDVLGNYTPVKKEKRQTFPAQRR

SEQ ID NO: 16170 - protein, 1010 aa, unidentified
  REGION 1..1010: note = Cas Enzyme sequence
RLRRRSLRKADLYELMEKNGLPGKAEIEQAVQAGHLPDVYALRVQALDGPVTALDFARILLHLMQRRGFRSNRKADDAQKDGKLLQAIDANTRRMEANRYRTVGEMMYRDPVFAEHKRNKAENYLSTVKRDQIIDEVRLVFAAQRQYGATWASPEMEAEYLCILTRQRSFAEGPGKGSPYSGSNRVGTCTLEGKSEQRAAKAAFSFEYFTLLQKINHIRIAENGTSRTLTPAERQILLSVCCQTDKMDFARVRKALALPEEARFNMVRYRGEQTAEACEKKEKITALPCYHKMRKALNTLRKDHIRNISREQLDAAGAALTNPENEDKLREALKQAEFEPLEIEALLTLPSFAGYGHISVKACRKLIPYLEQGMNYNDACQAAGYDFQGRQNGEKAQFLPASTEEMDDITSPVVRRAVAQTIKVVNAIIREQGESPVSIHLELAREMNKNFQQRSELDKAMRDNSAENERLMKELNELFPGRTVTGQDLVKYRLWKEQNEICAYSLEKLDLTRVITEAGYAEVDHIVPYSISFDDRRTNKVLVLASENRQKGNRLPLQYLQGKRRDDFIVYTKANVKNFRKRQNLLKERLSEEDGKGYIQRNLQDTQYIAAFMLNYIRNHLAFADCSGAGKRRVVAVNGAVTAFLRKRWGLSKVRTDGDLHHAADAAVIACTTQGMIKRVSDFCKRAETTAVRNEHFPEPWPRFRDELTQRLSACPQEDLMKINPVYYATVDISSIQPVFVSRMPRHKVTGAAHEETIRSQVNEKYTAVRKSITELSLDKDGKIKDYFKPSSDTLLYEALKKRLTEFGGNAKKAFAEPFYKPRADGTPGAQVRKVKVVAKMNNTIPVRSGGGVAKGGDMIRIDVYYVPGDGYYWVPIYVADTVKETLPNKAVVRDKTMEEWKEMKEDDFLFSLYSNDLILVERDKPICFSLMHEDSTLPKKYETKKELVYYKGGDISNGGIRIETHEGAYFLKSLTFGIVQKVQKYQVDVLGNYTPVKKEKRQTFPAQRR

SEQ ID NO: 16171 - protein, 1077 aa, unidentified
  REGION 1..1077: note = Cas Enzyme sequence
MKHPYGIGLDIGIASVGWAVVALNENAEPYGLIRCGSRIFDAAEQPNTGESLAAPRREARSTRRRLRRRSLRKADLYELMAQNGLPGRAEIEEAVQAGHLPDIYALRVQALDGPVTAMDFARILLHLMQRRGFRSNRKADDAQKDGKLLQAIDANTRRMEENHYRTVGEMMYRDPVFAEHKRNKSENYLSTVRRDQIVEEAVQLFAAQRQYGAAWASPEMEAEYLTILTRQRSFAEGPGGNSPYGGNIVEKMVGTCTLEGQAEPRAAKATWSFEYFTLLQKINHIRIIESGAARILTAEERQELLSVCYQTDKLDFARIRKALALSEQARFNMVRYRDGQTTEDCEKKEKIVCLPCYHKMRKVLNTLRKDYIRSVSRDRLDAAATALTMYKNEATLRAKLEEAQFEPLEVDALMTLPSFSGFGHISVKACRKLIPYLEQGLNYNDACKEAGYDFQGNYRGEKSQFLPASTEEMEDITSPVVRRAVAQTIKVVNAIIREQGESPVNIHLELAREMSKNFQQRNDLDKAMKDNNAENERLMKDLHELFPGRNITGQDLVKYRLWKEQDGRCAYSLQPLELEKAITVSGYAEVDHIVPYSISFDDRRANKVLVLASENRQKGNRLPLQYLQGKRRDDFIVYAKASVKNYRKRQNLLKEKLSEEDSKGFMQRNLQDTQYIASFMLNYIRSHLAFADFSAAGKKRVVAVNGAVTAFLRKRWGLGKVRADGDLHHAVDAAVIACTTDGMIQRVSRFYTHIETSDTRGERFPEPWPRFRDELMQRLSACPQENLMQINPVYYQNVDIASIRPVFVSRMPRHKMTGAAHKETIKGRLDDAHTVQRRSITDLKLDKEGEIAGYFNPSSDTLLYNALKEQLTAFGGDGKKAFTEPFFKPRADGTPGAQVRKVKVYDKATSMVAVHEGKGVADNDTMVRIDVYFVPGDGYYWVPIYVADTVKPELPNKAVVQGKSYAEWKEMDEENFLFSLCQNDLIRIESKRTMKFKVQNSDSTLEKETQMNCGLTYFEGGNISTGAITVTTHDNAYIVGSLGFKTLQKVQKYQVDVLGNYTLVKKEKRQNFPAQRR

SEQ ID NO: 16172 - protein, 1078 aa, unidentified; identical to SEQ ID NO: 15937
  REGION 1..1078: note = Cas Enzyme sequence

SEQ ID NO: 16173 - protein, 1078 aa, unidentified; identical to SEQ ID NO: 15957
  REGION 1..1078: note = Cas Enzyme sequence

SEQ ID NO: 16174 - protein, 1078 aa, unidentified
  REGION 1..1078: note = Cas Enzyme sequence
MCKKMKHPYGIGLDIGIASVGWAVVALNENAEPYGLIRCGSRIFDKAEQPKTGDSLAAPRREARSARRRLRRRSLRKADLYELMEKNGLPGKAEIEQAVQAGHLPDVYALRVQALDGPVTALDFARILLHLMQRRGFRSNRKADDAQKDGKLLQAIDANTRRMEANRYRTVGEMMYRDPVFAEHKRNKAENYLSTVKRDQIIDEARLVFAAQRQYGATWASPEMEAEYLCILTRQRSFAEGPGKGSPYSGSNRVGTCTLEGKSEQRAAKAAFSFEYFTLLQKINHIRIAENGTSRTLTPAERQVLLSVCCQTDKLDFARIRKALALPEEARFNMVRYRGEQTAEACEKKEKITALPCYHKMRKALNTLRKDHIRNISREQLDAAGAALTNPENEDKLREALKQAEFEPLEIEALLTLPSFAGYGHISVKACRKLIPYLEQGMNYNDACQAAGYDFQGRQNGEKAQFLPASTEEMEDITSPVVRRAVAQTIKVVNAIIREQGESPVSIHLELAREMNKNFQQRSELDKAMRDNSAENERLMKELNELFPGRTVTGQDLVKYRLWKEQDGRCAYSIQPLELDKVITVSGYAEVDHIVPYSISFDDRRTNKVLVLASENRQKGNRLPLQYLQGKRRDDFIVYTKANVKNFRKRQNLLKERLSEEDGKGYIQRNLQDTQYIAAFMLNYIRNHLAFADCSGAGKRRVVAVNGAVTAFLRKRWGLGKVRADGDLHHAVDAAVIACTTQGMIKRVSDFCKRAETTAVRNEHFPEPWPRFRDELTQRLSACPQEDLMKINPVYYATVDISSIQPVFVSRMPRHKVTGAAHKETIKSRLDDTHVVQRRNITELKLDKDGEIAGYFNRSSDTLLYNALKARLLAFGGDGKKAFAEPFYKPRADGTPGARVQKVKICDKVTSTVPVHGGKGVADNDTMVRIDVYFVPGDGYYWVPIYVADTVKLKLPNKAVVQGKSYAEWKEMDEENFLFSLCQHDLVRIESKRLMKFKVQRRDSTLEKEMPVNKILAYFEGGDIATGAVTLTTHDDAYIATGLGFKTLQKVQKYQVDVLGNYTPVKKEKRQTFPAQRR

SEQ ID NO: 16175 - protein, 1078 aa, unidentified
  REGION 1..1078: note = Cas Enzyme sequence
MCKKMKHPYGIGLDIGIASVGWAVVALNENAEPYGLIRCGSRIFDKAEQPKTGDSLAAPRREARSARRRLRRRSLRKADLYELMEKNGLPGKAEIEQAVQAGHLPDVYALRVQALDGPVTALDFARILLHLMQRRGFRSNRKADDAQKDGKLLQAIDANTRRMEANRYRTVGEMMYRDPVFAEHKRNKAENYLSTVKRDQIIDEARLVFAAQRQYGATWASPEMEAEYLCILTRQRSFAEGPGKGSPYSGSNRVGTCTLEGKSEQRAAKAAFSFEYFTLLQKINHIRIAENGTSRTLTPAERQVLLSVCSQTDKLDFARVRKALALPEEARFNMVRYRGEQTAEACEKKEKITALPCYHKMRKALNTLRKDHIRNISREQLDAAGAALTNPENEDKLRKALKQAEFEPLEIEALLTLPSFAGYGHISVKACRKLIPYLEQGMNYNDACQAAGYDFQGRQNGEKAQFLPASTEEMEDITSPVVRRAVAQTIKVVNAIIREQGESPVSIHLELAREMNKNFQQRSELDKAMRDNSAENERLMKELNELFPGRTVTGQDLVKYRLWKEQDGHCAYSIQPLELDKVITVSGYAEVDHIVPYSISFDDRRTNKVLVLASENRQKGNRLPLQYLQGKRRDDFIVYTKANVKNFRKRQNLLKERLSEEDGKGYIQRNLQDTQYIAAFMLNYIRNHLAFADCSGAGKRRVVAVNGAVTAFLRKRWGLSKVRADGDLHHAADAAVIACTTQGMIKRVSDFCKRAETTAVRNEHFPEPWPHFRDELTQRLSACPQENLMQINPVYYATVDISSIQPVFVSRMPRHKVTGAAHKETIKSRLDDTHVVQRRNITELKLDKDGEIAGYFNRSSDTLLYNALKARLLAFGGDGKKAFAEPFYKPRADGTPGARVQKVKICDKVTSTVPVHGGKGVADNDTMVRMDVYFVPGDGYYWVPIYVADTVKLELPNKAVVQGKSYAEWKEMDEENFLFSLCQHDLVRIESKRLMKFKVQNRDSTLEKEMPVNKILAYFEGGNISTGAITVTTHDDAYIADGLGFKTLQKVQKYQVDVLGNYTPVKKEKRQTFPAQRR

SEQ ID NO: 16176 - protein, 1016 aa, unidentified
  REGION 1..1016: note = Cas Enzyme sequence
ATDTCPWQPPPSLRKADLYELMEKNGLPGKAEIEQAVQAGHLPDVYALRVQALDGPVTALDFARILLHLMQRRGFRSNRKADDAQKDGKLLQAIDANTRRMEANRYRTVGEMMYRDPVFAEHKRNKAENYLSTVKRDQIIDEARLVFAAQRQYGATWASPEMEAEYLCILTRQRSFAEGPGKGSPYSGSNRVGTCTLEGKSEQRAAKAAFSFEYFTLLQKINHIRIAENGTSRTLTPAERQVLLSVCSQTDKLDFARVRKALALPEEARFNMVRYRGEQTAEACEKKEKITALPCYHKMRKALNTLRKDHIRNISREQLDAAGAALTNPENEDKLRKALKQAEFEPLEIEALLTLPSFAGYGHISVKACRKLIPYLEQGMNYNDACQAAGYDFQGRQNGEKAQFLPASTEEMEDITSPVVRRAVAQTIKVVNAIIREQGESPVSIHLELAREMNKNFQQRSELDKAMRDNSAENERLMKELNELFPGRTVTGQDLVKYRLWKEQDGHCAYSIQPLELDKVITVSGYAEVDHIVPYSISFDDRRTNKVLVLASENRQKGNRLPLQYLQGKRRDDFIVYTKANVKNFRKRQNLLKERLSEEDGKGYIQRNLQDTQYIAAFMLNYIRNHLAFADCSGAGKRRVVAVNGAVTAFLRKRWGLSKVRADGDLHHAADAAVIACTTQGMIKRVSDFCKRAETTAVRNEHFPEPWPHFRDELTQRLSACPQENLMQINPVYYATVDISSIQPVFVSRMPRHKVTGAAHKETIKSRLDDTHVVQRRNITELKLDKDGEIAGYFNRSSDTLLYNALKARLLAFGGDGKKAFAEPFYKPRADGTPGARVQKVKICDKVTSTVPVHGGKGVADNDTMVRMDVYFVPGDGYYWVPIYVADTVKLELPNKAVVQGKSYAEWKEMDEENFLFSLCQHDLVRIESKRLMKFKVQNRDSTLEKEMPVNKILAYFEGGNISTGAITVTTHDDAYIADGLGFKTLQKVQKYQVDVLGNYTPVKKEKRQTFPAQRR

SEQ ID NO: 16177 - protein, 1074 aa, unidentified
  REGION 1..1074: note = Cas Enzyme sequence
MKHPYGIGLDIGIASVGWAVVALNENAEPYGLIRCGSRIFDKAEQPKTGDSLAAPRREARSARRRLRRRSLRKADLYELMEKNGLPGKAEIEQAVQAGHLPDVYALRVQALDGPVTALDFARILLHLMQRRGFRSNRKADDAQKDGKLLQAIDANTRRMEANRYRTVGEMMYRDPVFAEHKRNKAENYLSTVKRDQIIDEVRLVFAAQRQYGATWASPEMEAEYLCILTRQRSFAEGPGKGSPYSGSNRVGTCTLEGKSEQRAAKAAFSFEYFTLLQKINHIRIAENGTSRTLTPAERQVLLSVCSQTDKLDFARVRKALALPEEARFNMVRYRGEQTAEACEKKEKITALPCYHKMRKALNTLRKDHIRNISREQLDAAGAALTNPENEDKLREALKQAEFEPLEIEALLTLPSFAGYGHISVKACRKLIPYLEQGMNYNDACQAAGYDFQGRQNGEKAQFLPASTEEMEDITSPVVRRAVAQTIKVVNAIIREQGESPVSIHLELAREMNKNFQQRSELDKAMRDNSAENERLMKELNELFPGRTVTGQDLVKYRLWKEQDGRCAYSIQPLELDKVITVSGYAEVDHIVPYSISFDDRRTNKVLVLASENRQKGNRLPLQYLQGKRRDDFIVYTKANVKNFRKRQNLLKERLSEEDGKGYIQRNLQDTQYIAAFMLNYIRNHLAFADCSGAGKRRVVAVNGAVTAFLRKRWGLSKVRADGDLHHAADAAVIACTTQGMIKRVSDFCKRAETTAVRNEHFPEPWPHFRDELTQRLSVCPQEDLMKINPVYYATVDISSIQPVFVSRMPRHKVTGAAHKETIKSRLDDTHVVQRRNITELKLDKDGEIAGYFNRSSDTLLYNALKARLLAFGGDGKKAFTEPFYKPRADGTPGARVQKVKICDKVTSTVPVHGGKGVADNDTMVRIDVYYVPGDGYYWIPVYVADTVKPELPSKAVVAYKSSAEWKEMKDEDFLFSLCQHDLVRIESKRLMKFKVQNRDSTLEKEMPVNKILAYFEGGNIATGAVTLTTHDDAYIADGLGFKTLQKVQKYQVDVLGNYTPVKKEKRQTFPAQRR

SEQ ID NO: 16178 - protein, 1074 aa, unidentified
  REGION 1..1074: note = Cas Enzyme sequence
MKHPYGIGLDIGIASVGWAVVALNENAEPYGLIRCGSRIFDKAEQPQKGDSLAAPRREARSARRRLRRRSLRKADLYELMEKNGLPGKAEIEQAVQAGHLPDVYALRVQALDGPVTALDFARILLHLMQRRGFRSNRKADDAQKDGKLLQAIDANTRRMEANRYRTVGEMMYRDPVFAEHKRNKAENYLSTVKRDQIIDEARLVFAAQRQYGATWASPEMEAEYLCILTRQRSFAEGPGKGSPYSGSNRVGTCTLEGKSEQRAAKAAFSFEYFTLLQKINHIRIAENGTSRTLTPAERQVLLSVCCQTDKLDFARVRKALALPEEARFNMVRYRGEQTAEACEKKEKITALPCYHKMRKALNTLRKDHIRNISREQLDAAGAALTNPENEDKLREALRQAEFEPLEIEALLTLPSFAGYGHISVKACRKLIPYLEQGMNYNDACQAAGYDFQGSQNGEKAQFLPASTEEMEDITSPVVRRAVAQTIKVVNAIIREQGESPVSIHLELAREMNKNFQQRSELDKAMRDNSAENERLMKELNELFPGRTVTGQDLVKYRLWKEQDGRCAYSIQPLELDKVITVSGYAEVDHIVPYSISFDDRRTNKVLVLASENRQKGNRLPLQYLQGKRRDDFIVYTKANVKNFRKRQNLLKERLSEEDGKGYIQRNLQDTQYIAAFMLNYIRNHLAFADCSGAGKRRVVAVNGAVTAFLRKRWGLSKVRADGDLHHAVDAAVIACTTQGMIKRVSDFCKRAETTAVRNEHFPEPWPHFRDELTQRLSACPQEDLMKINPVYYATVDISSIQPVFVSRMPRHKVTGAAHEDTIRSQVNEKYTAVRKSITELSLDKDGKIKDYFKPSSDTLLYEALKKRLTEFGGNAKKAFAEPFYKPRADGTPGAQVRKVKVVAKMNNTIPVRSGGGVAKGGDMIRIDVYYVPGDGYYWVPIYVADTVKETLPNKAVVRDKTMEEWKEMKEDDFLFSLYSNDLILVERDKPICFSLMHEDSTLPKKYETKKELVYYKGGDISNGGIRIETHEGAYFLKSLTFGIVQKVQKYQVDVLGNYTPVKKEKRQTFPAQRR

SEQ ID NO: 16179 - protein, 1074 aa, unidentified
  REGION 1..1074: note = Cas Enzyme sequence
MKHPYGIGLDIGIASVGWAVVALNENAEPYGLIRCGSRIFDKAEQPQKGDSLAAPRREARSARRRLRRRSLRKADLYELMEKNGLPGKAEIEQAVQAGHLPDVYALRVQALDGPVTALDFARILLHLMQRRGFRSNRKADDAQKDGKLLQAIDANTRRMEANRYRTVGEMMYRDPVFAEHKRNKAENYLSTVKRDQIIDEARLVFAAQRQYGATWASPEMEAEYLCILTRQRSFAEGPGKGSPYSGSNRVGTCTLEGKSEQRAAKAAFSFEYFTLLQKINHIRIAENGTSRTLTPAERQVLLSACCQTDKLDFARVRKALALPEEARFNMVRYRGEQTAEACEKKEKITALPCYHKMRKALNTLRKDHIRNISREQLDAAGAALTNPENEDKLREALKQAEFEPLEIEALLTLPSFAGYGHISVKACRKLIPYLEQGMNYNDACQAAGYDFQGRQNGEKAQFLPASTEEMEDITSPVVRRAVAQTIKVVNAIIREQGESPVSIHLELAREMNKNFQQRSELDKAMRDNSAENERLMKELNELFPGRTVTGQDLVKYRLWKEQDGRCAYSIQPLELDKVITVSGYAEVDHIVPYSISFDDRRTNKVLVLASENRQKGNRLPLQYLQGKRRDDFIVYTKANVKNFRKRQNLLKERLSEEDGKGYIQRNLQDTQYIAAFMLNYIRNHLAFADCSGAGKRRVVAVNGAVTAFLRKRWGLGKVRADGDLHHAADAAVIACTTQGMIKRVSDFCKRAETTAVRNEHFPEPWPRFRDELTQRLSACPQENLMQINPVYYATVDISSIQPVFVSRMPRHKVTGAAHKETIKSRLDDAHTVQRRSITDLKLDKEGKIAGYFNPSSDTLLYNALKEQLTAFGGDGKKAFAEPFFKPRADGTPGAQVRKVKVYDKATSMVAVHEGKGVADNDTMVRIDVYFVPGDGYYWVPIYVADTVKLKLPNKAVVQGKSYAEWKEMDEENFLFSLCQNDLIRIESKRTMKFKVQNSDSTLEKEVQMNCGLTYFEGGNISTGAITVTTHDNAYIVGSLGFKTLQKVQKYQVDVLGNYTPVKKEKRQTFPAQRR

SEQ ID NO: 16180 - protein, 1074 aa, unidentified
  REGION 1..1074: note = Cas Enzyme sequence
MKHPYGIGLDIGIASVGWAVVALNENAEPYGLIRCGSRIFDKAEEPQTGDSLAAPRRKARSARRRLRRRSLRKADLYELMEKNGLPGKAEIEQAVQAGHLPDVYALRVQALDGPVTALDFARILLHLMQRRGFRSNRKADDAQKDGKLLQAIDANTRRMEANRYRTVGEMMYRDPVFAEHKRNKAENYLSTVKRDQIIDEARLVFAAQRQYGATWASPEMEAEYLCILTRQRSFAEGPGKGSPYSGSNRVGTCTLEGKSEQRAAKAAFSFEYFTLLQKINHIRIVENGTSRTLTPAERQVLLSVCCQTDKLDFARIRKALALPEEARFNMVRYRGEQTAEACEKKEKITALPCYHKMRKALNTLRKDHIRNISREQLDAAGAALTNPENEDKLRKALKQAEFEPLEIEALLTLPSFAGYGHISVKACRKLIPYLDQGMNYNDACQAAGYDFQGRQNGEKAQFLPASTEEMEDITSPVVRRAVAQTIKVVNAIIREQGESPVSIHLELAREMNKNFQQRSELDKAMRDNSAENERLMKELNELFPGRTVTGQDLVKYRLWKEQDGRCAYSIQPLELDKVITVSGYAEVDHIVPYSISFDDRRTNKVLVLASENRQKGNRLPLQYLQGKRRDDFIVYTKANVKNFRKRQNLLKERLSEEDGKGYIQRNLQDTQYIAAFMLNYIRNHLAFADCSGAGKRRVVAVNGAVTAFLRKRWGLGKVRADGDLHHAVDAAVIACTTQGMIKRVSDFCKRAETTAVRNEHFPEPWPRFRDELTQRLSACPQEDLMKINPIYYATVDISSIQPVFVSRMPRHKVTGAAHEETIRSQVNEQYTAVRKSITELSLDKDGKIKDYFNPSSDTLLYEALKKRLTEFGGNAKKAFAEPFYKPRADGTPGAQVRKVKVVAKMNNTIPVRSGGGVAKGGNMIRIDVYYVPGDGYYWVPIYVADTVRPELPNKAVLRGKSMEDWKEMKEENFLFSLYDNDLILVEREEPINFSLVNSDSTLPNKFSVKKVLVYYKSGNISNAAIKVETHDGAYVFEGMTFGTVRKIQKYQVDILGNYVPVKKEKRQTFPAQRR

SEQ ID NO: 16181 - protein, 1074 aa, unidentified
  REGION 1..1074: note = Cas Enzyme sequence
MKHPYGIGLDIGIASVGWAVVALNENAEPYGLIRCGSRIFDKAEEPQTGDSLAAPRREARSARRRLRRRSLRKADLYELMEKNGLPGKAEIEQAVQAGHLPDVYALRVQALDGPVTALDFARILLHLMQRRGFRSNRKADDAQKDGKLLQAIDANTRRMEANRYRTVGEMMYRDPVFAEHKRNKAENYLSTVKRDQIIDEARLVFAAQRQYGATWASPEMEAEYLCILTRQRSFAEGPGKGSPYSGSNRVGTCTLEGKSEQRAAKAAFSFEYFTLLQKINHIRIAENGTSRTLTPAERQVLLSVCCQTDKLDFARVRKALALPEEARFNMVRYRGEQTAEACEKKEKITALPCYHKMRKALNTLRKDHIRNISREQLDAAGAALTNPENEDKLRKALKQAEFETLEIEALLTLPSFAGYGHISVKACRKLIPYLEQGMNYNDACQAAGYDFQGRQNGEKAQFLPASTEEMEDITSPVVRRAVAQTIKVVNAIIREQGESPVSIHLELAREMNKNFQQRSELDKAMRDNSAENERLMKELNELFPGRTVTGQDLVKYRLWKEQDGRCAYSIQPLELDKVITVSGYAEVDHIIPYSISFDDRRTNKVLVLASENRQKGNRLPLQYLQGKRRDDFIVYTKANVKNFRKRQNLLKERLSEEDGKGYIQRNLQDTQYIAVFMLNYIRNHLAFADCSRAGKRRVVAVNGAVTAFLRKRWGLGKVRADGDLHHAADAAVIACTTQGMIKRVSDFCKRAETTAVRNEHFPEPWPRFRDELTQRLSACPQEDLMKINPVYYATVDISSIQPVFVSRMPRHKVTGAAHKETIKSRLDDTHVVQRRNITELKLDKDGEIAGYFNRSSDTLLYNALKARLLAFGGDGKKAFAEPFYKPRADGTPGARVQKVKICDKVTSTVPVHGGKGVADNDTMVRIDVYYVPGDGYYWIPVYVADTVKPELPSKAVVAYKSSAEWKEMKDEDFLFSLCQHDLVRIESKRLMKFKVQNRDSTLEKEMPVNKILAYFEGGNIATGAVTLTTHDDAYIADGLGFKTLQKVQKYQVDVLGNYTPVKKEKRQTFPAQRR

SEQ ID NO: 16182 - protein, 1074 aa, unidentified
  REGION 1..1074: note = Cas Enzyme sequence
MKHPYGIGLDIGIASVGWAVVALNENAEPYGLIRCGSRIFDKAEQPKTGDSLAAPRREARSARRRLRRRSLRKADLYELMEKNGLPGKAEIEQAVQAGHLPDVYALRVQALDGPVTALDFARILLHLMQRRGFRSNRKADDAQKDGKLLQAIDANTRRMEANRYRTVGEMMYRDPVFAEHKRNKAENYLSTVKRDQIIDEARLVFAAQRQYGATWASPEMEAEYLCILTRQRSFAEGPGKGSPYSGSNRVGTCTLEGKSEQRAAKAAFSFEYFTLLQKINHIRIAENGTSRTLTPAERQVLLSVCSQTDKLDFARVRKVLALPEEARFNMVRYRGEQTAEACEKKEKITALPCYHKMRKALNTLRKDHIRNISREQLDAAGAALTNPENEDKLREALKQAEFEPLEIEALLTLPSFAGYGHISVKACRKLIPYLEQGMNYNDACQAAGYDFQGRQNGEKAQFLPASTEEMEDITSPVVRRAVAQTIKVVNAIIREQGESPVSIHLELAREMNKNFQQRSELDKAMRDNSAENERLMKELNELFPGRTVTGQDLVKYRLWKEQDGRCAYSIQPLELDKVITVSGYAEVDHIIPYSISFDDRRTNKVLVLASENRQKGNRLPLQYLQGKRRDDFIVYTKANVKNFRKRQNLLKERLSEEDGKGFIQRNLQDTQYIAAFMLNYIRNHLAFADCSGAGKRRVVAVNGAVTAFLRKRWGLGKVRADGDLHHAVDAAVIACTTQGMIKRVSDFCKRAETTAVRNEHFPEPWPHFRDELRQRLSACPQEDLMKINPVYYATVDISSIQPVFVSRMPRHKVTGAAHKETIKSRLNDTHVVQRRNITELKLDKDGEIAGYFNRSSDTLLYNALKARLLAFGGDGKKAFAEPFYKPRADGTPGARVQKVKICDKVTSTVPVHGGKGVADNDTMVRMDVYFVPGDGYYWVPIYVADTVKLELPNKAVVQGKSYAEWKEMDEENFLFSLCQNDLIRIESKRTMKFKVQNSDSTLEKEVQMNCGLTYFEGGNISTGAITVTTHDNAYIVGSLGFKTLQKVQKYQVDVLGNYTLVKKEKRQTFPAQRR

SEQ ID NO: 16183 - protein, 1074 aa, unidentified
  REGION 1..1074: note = Cas Enzyme sequence
MKHPYGIGLDIGIASVGWAVVALNENAEPYGLIRCGSRIFDKAEQPKTGDSLAAPRREARSARRRLRRRSLRKADLYELMEKNGLPGKAEIEQAVQAGHLPDVYALRVQALDGPVTALDFARILLHLMQRRGFRSNRKADDAQKDGKLLQAIDANTRRMEANRYRTVGEMMYRDPVFAEHKRNKAENYLSTVKRDQIIDEARLVFAAQRQYGATWASPEMEAEYLCILTRQRSFAEGPGKGSPYSGSNRVGTCTLEGKSEQRAAKAAFSFEYFTLLQKINHIHIAENGTNRTLTPAERQVLLSACYQTDKLDFARIRKALALPEEARFNMVRYRGEQTAEACEKKEKITALPCYHKMRKALNTLRKDHIRNISREQLDAAGAALTNPENEDKLREALKQAEFEPLEIEALLTLPSFAGYGHISVKACRKLIPYLEQGMNYNDACQAAGYDFQGSQNGEKAQFLPASTEEMEDITSPVVRRAVAQTIKVVNAIIREQGESPVSIHLELAREMNKNFQQRSELDKAMRDNSAENERLMKELNELFPGRTVTGQDLVKYRLWKEQNEICAYSLEKLDLTRVITEPGYAEVDHIVPYSISFDDRRTNKVLVLASENRQKGNRLPLQYLQGKRRDDFIVYTKANVKNFRKRQNLLKERLSEEDGKGYIQRNLQDTQYIAAFMLNYIRNHLAFADCSGAGKRRVVAVNGAVTAFLRKRWGLSKVRADGDLHHAADAAVIACTTQGMIKRVSDFCKRAETTAVRNEHFPEPWPRFRDELTQRLSACPQENLMQINPVYYATVDISSIQPVFVSRMPRHKVTGAAHKETIKSRLDDTHVVQRRNITELKLDKDGEIAGYFNRSSDTLLYNALKARLLAFGGDGKKAFAEPFYKPRADGTPGARVQKVKICDKVTSTVPVHGGKGVADNNTMVRMDVYFVPGDGYYWIPVYVADTVKPELPSKAVVAYKSSAEWKEMKDEDFLFSLCQHDLVRIESKRLMKFKVQNRDSTLEKEMPVNKILAYFEGGDIATGAVTLTTHDDAYIATGLGFKTLQKVQKYQVDVLGNYTPVKKEKRQTFPAQRR

SEQ ID NO: 16184 - protein, 1074 aa, unidentified
  REGION 1..1074: note = Cas Enzyme sequence
MKHPYGIGLDIGIASVGWAVVALNENAEPYGLIRCGSRIFDKAEQPKTGDSLAAPRREARSARRRLRRRSLRKADLYELMEKNGLPGKAEIEQAVQAGHLPDVYALRVQALDGPVTALDFARILLHLMQRRGFRSNRKADDAQKDGKLLQAIDANTRRMEANRYRTVGEMMYRDPVFAEHKRNKAENYLSTVKRDQIIDEARLVFAAQRQYGATWASPEMEAEYLCILTRQRSFAEGPGKGSPYSGSNRVGTCTLEGKSEQRAAKAAFSFEYFTLLQKINHIRIAENGTSRTLTPAERQVLLSVCSQTDKLDFARVRKALALPEEARFNMVRYRGGQTAEACEKKEKITALPCYHKMRKALNTLRKDHIRNISREQLDAAGAALTNPENEDKLREALKQAEFEPLEIEALLTLPSFAGYGHISVKACRKLIPYLEQGMNYNDACQAAGYDFQGRQNGEKAQFLPASTEEMEDITSPVVRRAVAQTIKVVNAIIREQGESPVSIHLELAREMNKNFQQRSELDKAMRDNSAENERLMKELNELFPGRTVTGQDLVKYRLWKEQNEICAYSLEKLDLTRVITEPGYAEVDHIVPYSISFDDRRTNKVLVLASENRQKGNRLPLQYLQGKRRDDFIVYTKANVKNFRKRQNLLKERLSEEDGKGYIQRNLQDTQYIAAFMLNYIRNHLAFADCSGAGKRRVVAVNGAVTAFLRKRWGLSKVRADGDLHHAADAAVIACTTQGMIKRVSDFCKRAETTAVRNEHFPEPWPRFRDELTQRLSACPQENLMQINPVYYATVDISSIQPVFVSRMPRHKVTGAAHEETIRSQVNEQYTAVRKSITELSLDKDGKIKDYFNPSSDTLLYEALKKRLTEFGGNAKKAFAEPFYKPRADGTPGAQVRKVKVVAKMNNTIPVRSGGGVAKGGNMIRIDVYYVPGDGYYWVPIYVADTVRPELPNKAVLRGKSMEDWKEMKEENFLFSLYDNDLILVEREEPINFSLVNSDSTLPNKFSVKKVLVYYKSGNISNAAIKVETHDGAYVFEGMTFGTVRKIQKYQVDILGNYVPVKKEKRQTFPAQRR

SEQ ID NO: 16185 - protein, 964 aa, unidentified
  REGION 1..964: note = Cas Enzyme sequence
LDGPVTALDFARILLHLMQRRGFRSNRKADDAQKDGKLLQAIDANTRRMEANRYRTVGEMMYRDPVFAEHKRNKAENYLSTVKRDQIIDEARLVFAAQRQYGATWASPEMEAEYLCILTRQRSFAEGPGKGSPYSGSNRVGTCTLEGKSEQRAAKAAFSFEYFTLLQKINHIRIAENGTSRTLTPAERQVLLSVCCQTDKLDFARVRKALALPEEARFNMVRYRGEQTAEACEKKEKITALPCYHKMRKALNTLRKDHIRNISREQLDAAGAALTNPENEDKLREALKQAEFEPLEIEALLTLPSFAGYGHISVKACRKLIPYLEQGMNYNDACQAAGYDFQGRQNGEKAQFLPASTEEMEDITSPVVRRAVAQTIKVVNAIIREQGESPVSIHLELAREMNKNFQQRSELDKAMRDNSAENERLMKELNELFPGRTVTGQDLVKYRLWKEQDGRCAYSIQPLELDKVITVSGYAEVDHIIPYSISFDDRRTNKVLVLASENRQKGNRLPLQYLQGKRRDDFIVYTKANVKNFRKRQNLLKERLSEEDGKGYIQRNLQDTQYIAAFMLNYIRNHLAFADCSGAGKRRVVAVNGAVTAFLRKRWGLGKVRADGDLHHAVDAAVIACTTQGMIKRVSDFCKRAETTAVRNEHFPEPWPHFRDELTQRLSACPQEDLMKINPVYYATVDISSIQPVFVSRMPRHKVTGAAHKETIKSRLDDTHVVQRRNITELKLDKDGEIAGYFNHSSDTLLYNALKARLLAFGGDGKKAFAEPFYKPRADGTPGARVQKVKICDKVTSTVPVHGGKGVADNDTMVRIDVYYVPGDGYYWIPVYVADTVKPELPSKAVVAYKSSTEWKEMKDEDFLFSLCQHDLVRIESKRLMKFKVQNRDSTLEKEMPVNKILAYFEGGNIATGAVTLTTHDDAYIADGLGFKTLQKVQKYQVDVLGNYTPVKKEKRQTFPAQRR

SEQ ID NO: 16186 - protein, 1074 aa, unidentified
  REGION 1..1074: note = Cas Enzyme sequence
MKHPYGIGLDIGIASVGWAVVALNENAEPYGLIRCGSRIFDKAEEPQTGDSLAAPRRKARSARRRLRRRSLRKADLYELMEKNGLPGKAEIEQAVQAGHLPDVYALRVQALDGPVTALDFARILLHLMQRRGFRSNRKADDAQKDGKLLQAIDANTRRMEANRYRTVGEMMYRDPVFAEHKRNKAENYLSTVKRDQIIDEARLVFAAQRQYGATWASPEMEAEYLCILTRQRSFAEGPGKGSPYSGSNRVGTCTLEGKSEQRAAKAAFSFEYFTLLQKINHIRIAENGTSRTLTPAERQVLLSVCCQTDKLDFARVRKALALPEEARFNMVRYRGEQTAEACEKKEKITALPCYHKMRKALNTLRKDHIRNISREQLDAAGAALTNPENEDKLREALKQAEFEPLEIEALLTLPSFAGYGHISVKACRKLIPYLEQGMNYNDACQAAGYDFQGSQNGEKAQFLPASTEEMEDITSPVVRRAVAQTIKVVNAIIREQGESPVSIHLELAREMNKNFQQRSELDKAMRDNSAENERLMKELNELFPGRTVTGQDLVKYRLWKEQDGRCAYSIQPLELDKVITVSGYAEVDHIVPYSISFDDRRTNKVLVLASENRQKGNRLPLQYLQGKRRDDFIVYTKANVKNFRKRQNLLKERLSEEDGKGYIQRNLQDTQYIAAFMLNYIRNHLAFADCSGAGKRRVVAVNGAVTAFLRKRWGLSKVRADGDLHHAVDAAVIACTTQGMIKRVSDFCKRAETTAVRNEHFPEPWPHFRDELTQRLSACPQEDLMKINPVYYATVDISSIQPVFVSRMPRHKVTGAAHEDTIRSQVNEKYTAVRKSITELSLDKDGKIKDYFKPSSDTLLYEALKKRLTEFGGNAKKAFAEPFYKPRADGTPGAQVRKVKVVAKMSNTIPVRSGGGVAKGGDMIRIDVYYVPGDGYYWVPIYVADTVKETLPNKAVVRDKTMEEWKEMKEDDFLFSLYSNDLILVERDKPICFSLMQEDSTLPKKYETKKELVYYKGGDISNGGIRIETHEGAYFLKSLTFGIVQKVQKYQVDVLGNYTPVKKEKRQTFPAQRR

SEQ ID NO: 16187 - protein, 1074 aa, unidentified
  REGION 1..1074: note = Cas Enzyme sequence
MKHPYGIGLDIGIASVGWAVVALNENAEPYGLIRCGSRIFDKAEQPKTGDSLAAPRREARSARRRQRRRSLRKADLYELMEKNGLPGKAEIEQAVQAGHLPDVYALRVQALDGPVTALDFARILLHLMQRRGFRSNRKADDAQKDGKLLQAIDANTRRMEANRYRTVGEMMYRDPVFAEHKRNKAENYLSTVKRDQIIDEARLVFAAQRQYGATWASPEMEAEYLCILTRQRSFAEGPGKGSPYSGSNRVGTCTLEGKSEQRAAKAAFSFEYFTLLQKINHIRIAENGTSRTLTPAERQVLLSVCCQTDKLDFARIRKALALPEEARFNMVRYRGEQTAEACEKKEKITALPCYHKMRKALNTLRKDHIRNISREQLDAAGAALTNPENEDKLREALKQAEFEPLEIEALLTLPSFAGYGHISVKACRKLIPYLEQGMNYNDACQAAGYDFQGRQNGEKAQFLPASTEEMEDITSPVVRRAVAQTIKVVNAIIREQGESPVSIHLELAREMNKNFQQRSELDKAMRDNSAENERLMKELNELFPGRIVTGQDLVKYRLWKEQDGRCAYSIQPLELDKVITVSGYAEVDHIIPYSISFDDRRTNKVLVLASENRQKGNRLPLQYLQGKRRDDFIVYTKANVKNFRKRQNLLKERLSEEDGKGYIQRNLQDTQYIAAFMLNYIRNHLAFADCSGAGKRRVVAVNGAVTAFLRKRWGLSKVRADGDLHHAVDAAVIACTTQGMIKRVSDFCKRAETTAVRNEHFPEPWPHFRDELTQRLSACPQEDLMKINPVYYATVDISSIQPVFVSRMPRHKVTGAAHEETIRSQVNEKYTAVRKSITELSLDKDGKIKDYFKPSSDTLLYEALKKRLTEFGGNAKKAFAEPFYKPRADGTPGAQVRKVKVIAKMSNTIPVRSGGGVAKGGDMIRIDVYYVPGDGYYWVPIYVADTVKETLPNKAVVRDKTMEEWKEMKEDDFLFSLYSNDLILVERDKPICFSLMHEDSTLPKKYETKKELVYYKGGDISNGGIRIETHEGAYFLKSLTFGIVQKVQKYQVDVLGNYTPVKKEKRQTFPAQRR

SEQ ID NO: 16188 - protein, 1074 aa, unidentified
  REGION 1..1074: note = Cas Enzyme sequence
MKHPYGIGLDIGIASVGWAVVALNENAEPYGLIRCGSRIFDKAEEPQKGDSLAAPRRKARSARRRLRRRSLRKADLYELMEKNGLPGKAEIEQAVQAGHLPDVYALRVQALDGPVTALDFARILLHLMQRRGFRSNRKADDAQKDGKLLQAIDANTRRMEANRYRTVGEMMYRDPVFAEHKRNKAENYLSTVKRDQIIDEARLVFAAQRQYGATWASPEMEAEYLCILTRQRSFAEGPGKGSPYSGSNRVGTCTLEGKSEQRAAKAAFSFEYFTLLQKINHIRIAENGTSRTLTPAERQVLLSVCCQTDKLDFARVRKALALPEEARFNMVRYRGEQTAEACEKKEKITALPCYHKMRKALNTLRKDHIRNISREQLDAAGAALTNPENEDKLREALKQAEFEPLEIEALLTLPSFAGYGHISVKACRKLIPYLEQGMNYNDACQAAGYDFQGSQNGEKAQFLPASTEEMEDITSPVVRRAVAQTIKVVNAIIREQGESPVSIHLELAREMNKNFQQRSELDKAMRDNSAENERLMKELNELFPGRTVTGQDLVKYRLWKEQDGRCAYSIQPLELDKVITVSGYAEVDHIVPYSISFDDRRTNKVLVLASENRQKGNRLPLQYLQGKRRDDFIVYTKANVKNFRKRQNLLKERLSEEDGKGYIQRNLQDTQYIAAFMLNYICNHLAFADCSGAGKRRVVAVNGAVTAFLRKRWGLGKVRADGDLHHAVDAAVIACTTQGMIKRVSDFCKRAETTAVRNEHFPEPWPHFRDELTQRLSACPQEDLMKINPVYYATVDISSIQPVFVSRMPRHKVTGAAHEETIRSQVNEKYTAVRKSITELSLDKDGKIKDYFNPSSDTLLYEALKKRLTEFGGNAKKAFAEPFYKPRADGTPGAQVRKVKVVAKMSNTIPVRSGGGVAKGGDMIRIDVYYVPGDGYYWVPIYVADTVKETLPNKAVVRDKTMEEWKEMKEDDFLFSLYSNDLILVERDKPICFSLMHEDSTLPKKYETKKELVYYKGGDISNGGIRIETHEGAYFLKSLTFGIVQKVQKYQVDVLGNYTPVKKEKRQTFPAQRR

SEQ ID NO: 16189 - protein, 1074 aa, unidentified
  REGION 1..1074: note = Cas Enzyme sequence
MKHPYGIGLDIGIASVGWAVVALNENAEPYGLIRCGSRIFDKAEEPQKGDSLAAPRRKARSARRRLRRRSLRKADLYELMEKNGLPGKAEIEQAVQAGHLPDVYALRVQALDGPVTALDFARILLHLMQRRGFRSNRKADDAQKDGKLLQAIDANTRRMEANRYRTVGEMMYRDPVFAEHKRNKAENYLSTVKRDQIIDEARLVFAAQRQYGATWASPEMEAEYLCILTRQRSFAEGPGKGSPYSGSNRVGTCTLEGKSEQRAAKAAFSFEYFTLLQKINHIRIAENGTSRTLTPAERQVLLSVCCQTDKLDFARIRKALALPEEARFNMVRYRGEQTAEACEKKEKITALPCYHKMRKALNTLRKDHIRNISREQLDAAGAALTNPENEDKLREALKQAEFEPLEIEALLTLPSFAGYGHISVKACRKLIPYLEQGMNYNDACQAAGYDFQGRQNGEKAQFLPASTEEMEDITSPVVRRAVAQTIKVVNAIIREQGESPVSIHLELAREMNKNFQQRSELDKAMRDNSAENERLMKELNELFPGRTVTGQDLVKYRLWKEQDGRCAYSIQPLELDKVITVSGYAEVDHIVPYSISFDDRRTNKVLVLASENRQKGNRLPLQYLQGKRRDDFIVYTKANVKNFRKRQNLLKERLSEEDGKGYIQRNLQDTQYIAAFMLNYIRNHLAFADCSGAGKRRVVAVNGAVTAFLRKRWGLSKVRADGDLHHAADAAVIACTTQGMIKRVSDFCKRAETTAVRNEHFPEPWPHFRDELTQRLSACPQEDLMKINPVYYATVDISSIQPVFVSRMPRHKVTGAAHEEMIRSQVNEKYTAVRKSITELSLDKDGKIKDYFKPSSDTLLYEALKKRLTEFGGNAKKAFAEPFYKPRADGTPGAQVRKVKVVAKMNNTIPVRSGGGVAKGGDMIRIDVYYVPGDGYYWVPIYVADTVKETLPNKAVVRDKTMEEWKEMKEDDFLFSLYSNDLILVERDKPICFSLMHEDSTLPKKYETKKELVYYKGGDISNGGIRIETHEGAYFLKSLTFGIVQKVQKYQVDVLGNYTPVKKEKRQTFPAQRR

SEQ ID NO: 16190 - protein, 1074 aa, unidentified
  REGION 1..1074: note = Cas Enzyme sequence
MKHPYGIGLDIGIASVGWAVVALNENAEPYGLVRCGSRIFDKAEQPQKGDSLAAPRRKARSARRRLRRRSLRKADLYELMEKNGLPGKAEIEQAVQAGHLPDVYALRVQALDGPVTALDFARILLHLMQRRGFRSNRKADDAQKDGKLLQAIDANTRRMEANRYRTVGEMMYRDPVFAEHKRNKAENYLSTVKRDQIIDEARLVFAAQRQYGATWASPEMEAEYLCILTRQRSFAEGPGKGSPYSGSNRVGSCTLEGKSEQRAAKAAFSFEYFTLLQKINHIRIAENGTSRTLTPAERQVLLSVCCQTDKLDFARVRKALALPEEARFNMVRYRGEQTAEACEKKEKITALPCYHKMRKALNTLRKDHIRNISREQLDAAGAALTNPENEDKLREALKQAEFEPLEIEALLTLPSFAGYGHISVKACRKLIPYLEQGMNYNDACQAAGYDFQGSQNGEKAQFLPASTEEMEDITSPVVRRAVAQTIKVVNAIIREQGESPVSIHLELAREMNKNFQQRSELDKAMRDNSAENERLMKELNELFPGRTVTGQDLVKYRLWKEQDGRCAYSIQPLELDKVITVSGYAEVDHIIPYSISFDDRRTNKVLVLKSENRQKGNRLPLQYLQGKRRDDFIVYTKANVKNFRKRQNLLKERLSEEDGKGYIQRNLQDTQYIAAFMLNYIRNHLEFADCSGAGKRRVVAVNGAVTAFLRKRWGLSKVRADGDLHHAADAAVIACTTQGMIKRVSDFCKRAETTAVRNEHFPEPWPHFRDELTQRLSACPQEDLMKINPVYYATVDISSIQPVFVSRMPRHKVTGAAHEEMIRSQVNEKYTAVRKSITELSLDKDGKIKDYFKPSSDTLLYEALKKRLTEFGGNAKKAFAEPFYKPRADGTPGAQVRKVKVVAKMNNTIPVRSGGGVAKGGDMIRIDVYYVPGDGYYWVPIYVADTVKETLPNKAVVRDKTMEEWKEMKEDDFLFSLYSNDLILVERDKPICFSLMHEDSTLPKKYETKKELVYYKGGDISNGGIRIETHEGAYFLKSLTFGIVQKVQKYQVDVLGNYTPVKKEKRQTFPAQRR

SEQ ID NO: 16191 - protein, 1074 aa, unidentified
  REGION 1..1074: note = Cas Enzyme sequence
MKHPYGIGLDIGIASVGWAVVALNENAEPYGLIRCGSRIFDKAEEPQTGDSLAAPRRKARSARRRLRRRSLRKADLYELMEKNGLPGKAEIEQAVQAGHLPDVYALRVQALDGPVTALDFARILLHLMQRRGFRSNRKADDAQKDGKLLQAIDANTRRMEANRYRTVGEMMYRDPVFAEHKRNKAENYLSTVKRDQIIDEARLVFAAQRQYGATWASPEMEAEYLCILTRQRSFAEGPGKGSPYSGSNRVGTCTLEGKSEQRAAKAAFSFEYFTLLQKINHIRIAENGTSRTLTPAERQVLLSVCCQTDKLDFARIRKALALPEEARFNMVRYRGEQTAEACEKKEKITALPCYHKMRKALNTLRKDHIRNISREQLDAAGTALTNPENEDKLREALKQAEFEPLEIEALLTLPSFAGYGHISVKACRKLIPYLEQGMNYNDACQAAGYDFQGRQNGEKAQFLPASTEEMEDITSPVVRRAVAQTIKVVNAIIREQGESPVSIHLELAREMNKNFQQRSELDKAMRDNSAENERLMKELNELFPGRTVTGQDLVKYRLWKEQDGRCAYSIQPLELDKVITVSGYAEVDHIVPYSISFDDRRTNKVLVLKSENRQKGNRLPLQYLQGKRRDDFIVYTKANVKNFRKRQNLLKERLSEEDGKGYIQRNLQDTQYIAAFMLNYIRNHLAFADCSGAGKRRVVAVNGAVTAFLRKRWGLGKVRADGDLHHAADAAVIACTTQGMIKRVSDFCKRAETTAVRNEHFPEPWPRFRDELTQRLSACPQEDLMKINPVYYATVDISSIQPVFVSRMPRHKVTGAAHKETIKSRLDDTHVVQRRNITELKLDKDGEIAGYFNRSSDTLLYNALKARLLAFGGDGKKAFAEPFYKPRADGTPGARVQKVKICDKVTSTVPVHGGKGVADNDTMVRIDVYYVPGDGYYWIPVYVADTVKPELPSKAVVAYKSSAEWKEMKDEDFLFSLCQHDLVRIESKRLMKFKVQNRDSTLEKEMPVNKILAYFEGGNIATGAVTLTTHDDAYIADGLGFKTLQKVQKYQVDVLGNYTPVKKEKRQTFPAQRR

SEQ ID NO: 16192 - protein, 1074 aa, unidentified
  REGION 1..1074: note = Cas Enzyme sequence
MKHPYGIGLDIGIASVGWAVVALNENAEPYGLIRCGSRIFDKAEEPQKGDSLAAPRRKARSARRRLRRRSLRKADLYELMEKNGLPGKAEIEQAVQAGHLPDVYALRVQALDGPVTALDFARILLHLMQRRGFRSNRKADDAQKDGKLLQAIDANTRRMEANRYRTVGEMMYRDPVFAEHKRNKAENYLSTVKRDQIIDEARLVFAAQRQYGATWASPEMEAEYLCILTRQRSFAEGPGKGSPYSGSNRVGTCTLEGKSEQRAAKAAFSFEYFTLLQKINHIRIAENGTSRTLTPAERQVLLSVCCQTDKLDFARVRKALALPEEARFNMVRYRGEQTAEACEKKEKITALPCYHKMRKALNTLRKDHIRNISREQLDAAGAALTNPENEDKLREALKQAEFEPLEIEALLTLPSFAGYGHISVKACRKLIPYLEQGMNYNDACQAAGYDFQGRQNGEKAQFLPASTEEMEDITSPVVRRAVAQTIKVVNAIIREQGESPVSIHLELAREMNKNFQQRSELDKAMRDNSAENERLMKELNELFPGRTVTGQDLVKYRLWKEQDGRCAYSIQPLELDKVITVSGYAEVDHIVPYSISFDDRRTNKVLVLASENRQKGNRLPLQYLQGKRRDDFIVYTKANVKNFRKRQNLLKERLSEEDGKGYIQRNLQDTQYIAAFMLNYIRNHLAFADCSGAGKRRVVAVNGAVTAFLRKRWGLSKVRADGDLHHAVDAAVIACTTQGMIKRVSDFCKRAETTAVRNEHFPEPWPHFRDELTQRLSACPQEDLMKINPVYYATVDISSIQPVFVSRMPRHKVTGAAHEDTIRSQVNEKYTAVRKSITELSLDKDGKIKDYFKPSSDTLLYEALKKRLTEFGGNAKKAFAEPFYKPRADGTPGAQVRKVKVVAKMSNTIPVRSGGGVAKGGDMIRIDVYYVPGDGYYWVPIYVADTVKETLPNKAVVRDKTMEEWKEMKEDDFLFSLYSNDLILVERDKPICFSLMQEDSTLPKKYETKKELVYYKGGDISNGGIRIETHEGAYFLKSLTFGIVQKVQKYQVDVLGNYTPVKKEKRQTFPAQRR

SEQ ID NO: 16193 - protein, 1013 aa, unidentified
  REGION 1..1013: note = Cas Enzyme sequence
ARRRLRRRSLRKADLYELMEKNGLPGKAEIEQAVQAGHLPDVYALRVQALDGPVTALDFARILLHLMQRRGFRSNRKADDAQKDGKLLQAIDANTRRMEANRYRTVGEMMYRDPVFAEHKRNKAENYLSTVKRDQIIDEARLVFAAQRQYGATWASPEMEAEYLCILTRQRSFAEGPGKGSPYSGSNRVGTCTLEGKSEQRAAKAAFSFEYFTLLQKINHIRIAENGTSRTLTPAERQVLLSVCSQTDKLDFARIRKALALPEEARFNMVRYRGEQTAEACEKKEKITALPCYHKMRKALNTLRKDHIRNISREQLDAAGAALTNPENENKLREALKQAEFEPLEIEALLTLPSFAGYGHISVKACRKLIPYLEQGMNYNDACQAAGYDFQGRQNGEKAQFLPASTEEMEDITSPVVRRAVAQTIKVVNAIIREQGESPVSIHLELAREMNKNFQQRSELDKAMRDNSAENERLMKELNELFPGRTVTGQDLVKYRLWKEQDGCCAYSIQPLELDKVITVSGYAEVDHIVPYSISFDDRRTNKVLVLASENRQKGNRLPLQYLQGKRRDDFIVYTKANVKNFRKRQNLLKERLSEEDGKGYIQRNLQDTQYIAVFMLNYIRNHLAFADCSGAGKRRVVAVNGAVTAFLRKRWGLSKVRADGDLHHAADAAVIACTTQGMIKRVSDFCKRAETTVVRNEHFPEPWPRFRDELTQRLSACPQENLMQINPVYYATVDISSIQPVFVSRMPRHKVTGAAHKETIKSRLDDTHVVQRRNITELKLDKDGEIAGYFNRSSDTLLYNALKARLLAFSGDGKKAFAEPFYKPRADGTPGARVQKVKICDKVTSTVPVHGGKGVADNDTMVRIDVYYVPGDGYYWVPIYVADTVKLELPNKAVVQGKSYAEWKEMDEENFLFSLCQHDLVRIESKRLMKFKVQNRDSTLEKEMPVNKILAYFEGGNISTGAITVTTHDDAYIADGLGFKTLQKVQKYQVDVLGNYTPVKKEKRQTFPAQRR

SEQ ID NO: 16194 - protein, 1074 aa, unidentified
  REGION 1..1074: note = Cas Enzyme sequence
MKHPYGIGLDIGIASVGWAVVALNENAEPYGLIRCGSRIFDKAEQPKTGDSLAAPRREARSARRRLRRRSLRKADLYELMEKNGLPGKAEIEQAVQAGHLPDVYALRVQALDGPVTALDFARILLHLMQRRGFRSNRKADDAQKDGKLLQAIDANTRRMEANRYRTVGEMMYRDPVFAEHKRNKAENYLSTVKRDQIIDEVRLVFAAQRQYGATWASPEMEAEYLCILTRQRSFAEGPGKGSPYSGSNRVGTCTLEGKSEQRAAKAAFSFEYFTLLQKINHIRIAENGTSRTLTPAERQILLSVCCQTDKMDFARVRKALALPEEARFNMVRYRGEQTAEACEKKEKITALPCYHKMRKALNTLRKDHIRNISREQLDAAGAALTNPENEDKLREALKQAEFEPLEIEALLTLPSFAGYGHISVKACRKLIPYLEQGMNYNDACQAAGYDFQGRQNGEKAQFLPASTEEMEDITSPVVRRAVAQTIKVVNAIIREQGESPVSIHLELAREMNKNFQQRSELDKAMRDNSAENERLMKELNELFPGRTVTGQDLVKYRLWKEQNEICAYSLEKLDLTRVITEAGYAEVDHIVPYSISFDDRRTNKVLVLASENRQKGNRLPLQYLQGKRRDDFIVYTKANVKNFRKRQNLLKERLSEEDGKGYIQRNLQDTQYIAAFMLNYIRNHLAFADCSGAGKRRVVAVNGAVTAFLRKRWGLSKVRTDGDLHHAADAAVIACTTQGMIKRVSDFCKRAETTAVRNEHFPEPWPRFRDELTQRLSACPQEDLMKINPVYYATVDISSIQPVFVSRMPRHKVTGAAHKETIKSRLDDTHVVQRRNITELKLDKDGEIAGYFNRSSDTLLYNALKARLLAFGGDGKKAFAEPFYKPRADGTPGARVQKVKICDKVTSTVPVHDGKGVADNDTMVRIDVYYVPGDGYYWIPVYVADTVKPELPSKAVVAYKSSAEWKEMKDEDFLFSLCQHDLVRIESKRLMKFKVQNRDSTLEKEMPVNKILAYFEGGNIATGAVTLTTHDDAYIADGLGFKTLQKVQKYQVDVLGNYTPVKKEKRQTFPAQRR

SEQ ID NO: 16195 - protein, 1074 aa, unidentified
  REGION 1..1074: note = Cas Enzyme sequence
MKHPYGIGLDIGIASVGWAVVALNENAEPYGLIRCGSRIFDKAEEPQKGDSLAAPRRKARSARRRLRRRSLRKADLYELMEKNGLPGKAEIEQAVQAGHLPDVYALRVQALDGPVTALDFARILLHLMQRRGFRSNRKADDAQKDGKLLQAIDANTRRMEANRYRTVGEMMYRDPVFAEHKRNKAGNYLSTVKRDQIIDEARLVFAAQRQYGATWASPEMEAEYLCILTRQRSFAEGPGKGSPYSGSNRVGTCTLEGKSEQRAAKAAFSFEYFTLLQKINHIRIAENGTSRTLTPAERQVLLSVCCQTDKLDFARVRKALALPEEARFNMVRYRGEQTAEACEKKEKITALPCYHKMRKALNTLRKDHIRNISREQLDAAGAALTNPENEDKLRKALKQAEFEPLEIEALLTLPSFAGYGHISVKACRKLIPYLEQGMNYNDACQAAGYDFQGRQNGEKAQFLPASTEEMEDITSPVVRRAVAQTIKVVNAIIREQGESPVSIHLELAREMNKNFQQRSELDKAMRDNSAENERLMKELNELFPGRTVTGQDLVKYRLWKEQDGRCAYSIQPLELDKVITVSGYAEVDHIVPYSISFDDRRTNKVLVLASENRQKGNRLPLQYLQGKRRDDFIVYTKANVKNFRKRQNLLKERLSEEDGKGYIQRNLQDTQYIAAFMLNYIRNHLAFADCSGAGKRRVVAVNGAVTAFLRKRWGLGKVRADGDLHHAVDAAVIACTTQGMIKRVSDFCKRAETTAVRNEHFPEPWPRFRDELTQRLSACPQEDLMKINPVYYATVDISSIQPVFVSRMPRHKVTGAAHEDTIRSQVNEKYTAVRKSITELSLDKDGKIKDYFKPSSDTLLYEALKKRLTEFGGNAKKAFAEPFYKPRADGTPGAQVRKVKVVAKMNNTIPVRSGGGVAKGGDMIRIDVYYVPGDGYYWVPIYVADTVKETLPNKAVVRDKTMEEWKEMKEDDFLFSLYSNDLILVERDKPICFSLMHEDSTLPKKYETKKELVYYKGGDISNGGIRIETHEGAYFLKSLTFGIVQKVQKYQVDVLGNYTPVKKEKRQTFPAQRR

SEQ ID NO: 16196 - protein, 1074 aa, unidentified
  REGION 1..1074: note = Cas Enzyme sequence
MKHPYGIGLDIGIASVGWAVVALNENAEPYGLIRCGSRIFDKAEQPKTGDSLAAPRREARSARRRLRRRSLRKADLYELMEKNGLPGKAEIEQAVQAGHLPDVYALRVQALDGPVTALDFARILLHLMQRRGFRSNRKADDAQKDGKLLQAIDANTRRMEANRYRTVGEMMYRDPVFAEHKRNKAENYLSTVKRDQIIDEARLVFAAQRQYGATWASPEMEAEYLCILTRQRSFAEGPGKGSPYSGSNRVGTCTLEGKSEQRAAKAAFSFEYFTLLQKINHIRIAENGTSRALTPAERQVLLSVCSQTDKLDFARIRKALALPEEARFNMVRYRGEQTAEACEKKEKITALPCYHKMRKALNTLRKDHIRNISREQLDAAGAALTNPENEDKLREALKQAEFEPLEIEALLTLPSFAGYGHISVKACRKLIPYLEQGMNYNDACQAAGYDFQGRQNGEKAQFLPASTEEMEDITSPVVRRAVAQTIKVVNAIIREQGESPVSIHLELAREMNKNFQQRSELDKAMRDNSAENERLMKELNELFPGRTVTGQDLVKYRLWKEQDGRCAYSIQPLELDKVITVSGYAEVDHIVPYSISFDDRRTNKVLVLASENRQKGNRLPLQYLQGKRRDDFIVYTKANVKNFRKRQNLLKERLSEEDGKGYIQRNLQDTQYIAAFMLNYIRNHLAFADCSGAGKRRVAAVNGAVTAFLRKRWGLSKVRADGDLHHAVDAAVIACTTQGMIKRVSDFCKRAETTAVRNEHFPEPWPRFRDELTQRLSACPQENLMQINPVYYATVDISSIQPVFVSRMPRHKVTGAAHKETIKSRLDDIHVVQRRNITELKLDKDGEIAGYFNRSSDTLLYNALKARLLAFGGDGKKAFAEPFYKPRADGTPGARVQKVKICDKVTNTVPVHGGKGVADNDTMVRIDVYYVPGDGYYWIPVYVADTVKPELPSKAVVAYKSSAEWKEMKDEDFLFSLCQHDLVRIESKRLMKFKVQHRDSTLEKEMPVNKILAYFEGGDIATGAVTLTTHDDAYIATGLGFKTLQKVQKYQVDVLGNYTPVKKEKRQTFPAQRR

SEQ ID NO: 16197 - protein, 1046 aa, unidentified
  REGION 1..1046: note = Cas Enzyme sequence
PYGLIRCGSRIFDKAEQPKTGDSLAAPRREARSARRRLRRRSLRKADLYELMEKNGLPGKAEIEQAVQAGHLPDVYALRVQALDGPVTALDFARILLHLMQRRGFRSNRKADDAQKDGKLLQAIDANTRRMEANRYRTVGEMMYRDPVFAEHKRNKAENYLSTVKRDQIIDEARLVFAAQRQYGATWASPEMEAEYLCILTRQRSFAEGPGKGSPYSGSNRVGTCTLEGKSEQRAAKAAFSFEYFTLLQKINHIRIAENGTSRALTPAERQVLLSVCSQTDKLDFARIRKALALPEEARFNMVRYRGEQTAEACEKKEKITALPCYHKMRKALNTLRKDHIRNISREQLDAAGAALTNPENEDKLREALKQAEFEPLEIEALLTLPSFAGYGHISVKACRKLIPYLEQGMNYNDACQAAGYDFQGRQNGEKAQFLPASTEEMEDITSPVVRRAVAQTIKVVNAIIREQGESPVSIHLELAREMNKNFQQRSELDKAMRDNSAENERLMKELNELFPGRTVTGQDLVKYRLWKEQDGRCAYSIQPLELDKVITVSGYAEVDHIVPYSISFDDRRTNKVLVLASENRQKGNRLPLQYLQGKRRDDFIVYTKANVKNFRKRQNLLKERLSEEDGKGYIQRNLQDTQYIAAFMLNYIRNHLAFADCSGAGKRRVAAVNGAVTAFLRKRWGLSKVRADGDLHHAVDAAVIACTTQGMIKRVSDFCKRAETTAVRNEHFPEPWPRFRDELTQRLSACPQENLMQINPVYYATVDISSIQPVFVSRMPRHKVTGAAHKETIKSRLDDIHVVQRRNITELKLDKDGEIAGYFNRSSDTLLYNALKARLLAFGGDGKKAFAEPFYKPRADGTPGARVQKVKICDKVTNTVPVHGGKGVADNDTMVRIDVYYVPGDGYYWIPVYVADTVKPELPSKAVVAYKSSAEWKEMKDEDFLFSLCQHDLVRIESKRLMKFKVQHRDSTLEKEMPVNKILAYFEGGDIATGAVTLTTHDDAYIATGLGFKTLQKVQKYQVDVLGNYTPVKKEKRQTFPAQRR

SEQ ID NO: 16198 - protein, 979 aa, unidentified
  REGION 1..979: note = Cas Enzyme sequence
QAGHLPDVYALRVQALDGPVTALDFARILLHLMQRRGFRSNRKADDAQKDGKLLQAIDANTRRMEANRYRTVGEMMYRDPVFAEHKRNKAENYLSTVKRDQIIDEARLVFAAQRQYGATWASPEMEAEYLCILTRQRSFAEGPGKGSPYSGSNRVGTCTLEGKSEQRAAKAAFSFEYFTLLQKINHIRIAENGTSRTLTPAERQVLLSVCSQTDKLDFARIRKALALPEEARFNMVRYRGEQTAEACEKKEKITALPCYHKMRKALNTLRKDHIRNISREQLDAAGAALTNPENEDKLREALRQAEFEPLEIEALLTLPSFAGYGHISVKACRKLIPYLEQGMNYNDACQAAGYDFQGSQNGEKAQFLPASTEEMEDITSPVVRRAVAQTIKVVNAIIREQGESPVSIHLELAREMNKNFQQRSELDKAMRDNSAENERLMKELNELFPGRTVTGQDLVKYRLWKEQDGRCAYSIQPLELDKVITVSGYAEVDHIVPYSISFDDRRTNKVLVLASENRQKGNRLPLQYLQGKRRDDFIVYTKANVKNFRKRQNLLKERLSEEDGKGFIQRNLQDTQYIAAFMLNYIRNHLAFADCSGAGKRRVVAVNGAVTAFLRKRWGLGKVRADGDLHHAVDAAVIACTTQGMIKRVSDFCKRAETTAVRNEHFPEPWPHFRDELTQRLSACPQEDLMKINPVYYATVDISSIQPVFVSRMPRHKVTGAAHKETIKSRLDDTHVVQRRNITELKLDKDGEIAGYFNRSSDTLLYNALKARLLAFGGDGKKAFAEPFYKPRADGTPGARVQKVKICDKVTSTVPVHGGKGVADNDTMVRMDVYFVPGDGYYWVPIYVADTVKLELPNKAVVQGKSYAEWKEMDEENFLFSLCQHDLVRIESKRLMKFKVQNRDSTLEKEMPVNKILAYFEGGNISTGAITVTTHDDAYIADGLGFKTLQKVQKYQVDVLGNYTPVKKEKRQTFPAQRR

SEQ ID NO: 16199 - protein, 1074 aa, unidentified
  REGION 1..1074: note = Cas Enzyme sequence
MKHPYGIGLDIGIASVGWAVVALNENAEPYGLIRCGSRIFDKAEQPKTGDSLAAPRREARSARRRLRRRSLRKADLYELMEKNGLPGKAEIEQAVQAGHLPDVYALRVQALDGPVTALDFARILLHLMQRRGFRSNRKADDAQKDGKLLQAIDANTRRMEANRYRTVGEMMYRDPVFAEHKRNKAENYLSTVKRDQIIDEARLVFAAQRQYGATWASPEMEAEYLCILTRQRSFAEGPGKGSPYSGSNRVGTCTLEGKSEQRAAKAAFSFEYFTLLQKINHIRIAENGTSRTLTPAERQVLLSVCCQTDKLDFARVRKALALPEEARFNMVRYRGEQTAEACEKKEKITALPCYHKMRKALNTLRKDHIRNISREQLDAAGAALTNPENEDKLREALKQAEFEPLEIEALLTLPSFAGYGHISVKACRKLIPYLEQGMNYNDACQAAGYDFQGRQNGEKAQFLPASTEEMEDITSPVVRRAVAQTIKVVNAIIREQGESPVSIHLELAREMNKNFQQRSELDKAMRDNSAENERLMKELNELFPGRTVTGQDLVKYRLWKEQDGRCAYSIQPLELDKVITVSGYAEVDHIVPYSISFDDRRTNKVLVLASENRQKGNRLPLQYLQGKRRDDFIVYTKANVKNFRKRQNLLKERLSEEDGKGYIQRNLQDTQYIAAFMLNYIRNHLAFADCSGAGKRRVVAVNGAVTAFLRKRWGLSKVRADGDLHHAADAAVIACTTQGMIKRVSDFCKRAETTAVRNEHFPEPWPRFRDELTQRLSACPQENLMQINPVYYATVDISSIQPVFVSRMPRHKVTGAAHKETIKSRLNDTHVVQRRNITELKLDKDGEIAGYFNRSSDTLLYNALKARLLAFGGDGKKAFAEPFYKPRADGTPGARVQKVKICDKVTSTVPVHGGKGVADNDTMVRMDVYFVPGDGYYWVPIYVADTVKLELPNKAVVQGKSYAEWKEMDEENFLFSLCQNDLIRIESKRTMKFKVQNSDSTLEKEVQMNCGLTYFEGGNISTGAITVTTHDNAYIVGSLGFKTLQKVQKYQVDVLGNYTLVKKEKRQTFPAQRR

SEQ ID NO: 16200 - protein, 1074 aa, unidentified
  REGION 1..1074: note = Cas Enzyme sequence
MKHPYGIGLDIGIASVGWAVVALNENAEPYGLIRCGSRIFDKAEEPQTGDSLAAPRRKARSARRRLRRRSLRKADLYELMEKNGLPGKAEIEQAVQAGHLPDVYALRVQALDGPVTALDFARILLHLMQRRGFRSNRKADDAQKDGKLLQAIDANTRRMEANRYRTVGEMMYRDPVFAEHKRNKAENYLSTVKRDQIIDEARLVFAAQRQYGATWALPEMEAEYLCILTRQRSFAEGPGKGSPYSGSNRVGTCTLEGKSEQRAAKAAFSFEYFTLLQKINHIRIAENGTSRTLTPAERQVLLSVCCQTDKLDFARVRKALALPEEARFNMVRYRGEQTAEACEKKEKITALPCYHKMRKALNTLRKDHIRNISREQLDAAGAALTNPENEDKLREALKQAEFEPLEIEALLTLPSFAGYGHISVKACRKLIPYLEQGMNYNDACQAAGYDFQGSQNGEKAQFLPASTEEMEDITSPVVRRAVAQTIKVVNAIIREQGESPVSIHLELAREMNKNFQQRSELDKAMRDNSAENEKLMQELHAKFSGRKISGQDLVKYRLWKEQNERCAYSLEKLDLTRVITEPGYAEVDHIVPYSISFDDRRTNKVLVLASENRQKGNRLPLQYLQGKRRDDFIVYTKANVKNFRKRQNLLKERLSEEDGKGYIQRNLQDTQYIAAFMLNYIRNHLAFADCSGAGKRRVVAVNGAVTAFLRKRWGLGKVRADGDLHHAADAAVIACTTQGMIKRVSDFCKRAETTAVRNEHFPEPWPHFRDELTQRLSACPQENLMQINPVYYATVDISSIQPVFVSRMPRHKVTGAAHEETIRSQVNEKYTAVRKSITELSLDKDGKIKDYFKPSSDTLLYEALKKRLTEFGGNAKKAFAEPFYKPRADGTPGAQVRKVKVVAKMNNTIPVRSGGGVAKGGDMIRIDVYYVPGDGYYWVPIYVADTVKETLPNKAVVRDKTMEEWKEMKEDDFLFSLYSNDLILVERDKPICFSLMHKDSTLPKKYETKKELVYYKYGNISNAAIKVETHNGAYVFEGMTFGTVRKIQKYQVDILGNYVPVKKEKRQTFPAQRR

SEQ ID NO: 16201 - protein, 1074 aa, unidentified
  REGION 1..1074: note = Cas Enzyme sequence
MKHPYGIGLDIGIASVGWAVVALNENAEPYGLIRCGSRIFDKAEEPQTGDSLAAPRRKARSARRRLRRRSLRKADLYELMEKNGLPGKAEIEQAVQAGHLPDVYALRVQALDGPVTALDFARILLHLMQRRGFRSNRKADDAQKDGKLLQAIDANTRRMEANLYRTVGEMMYRDPVFAEHKRNKAENYLSTVKRDQIIDEARLVFAAQRQYGATWASPEMEAEYLCILTRQRSFAEGPGKGSPYSGSNRVGTCTLEGKSEKRAAKAAFSFEYFTLLQKINHIRIAENGTSRTLTPAERQVLLSVCCQTDKLDFARVRKALALPEEARFNMVRYRGEQTAEACEKKEKITALPCYHKMRKALNTLRKDHIRNISREQLDAAGAALTNPENEDKLREALKQAEFEPLEIEALLTLPSFAGYGHISVKACRKLIPYLEQGMNYNDACQAAGYDFQGRQNGEKAQFLPASTEEMEDITSPVVRRAVAQTIKVVNAIIREQGESPVSIHLELAREMNKNFQQRSELDKAMQDNSAENEKLMQELHAKFSGRKISGQDLVKYRLWKEQNEICAYSLEKLDLTRVITEPGYAEVDHIVPYSISFDDRRTNKVLVLKSENRQKGNRLPLQYLQGKRRDDFIVYTKANVKNFRKRQNLLKERLSEEDGKGYIQRNLQDTQYIAAFMLNYIRNHLAFADCSGAGKRRVVAVNGAVTAFLRKRWGLGKVRADGDLHHAADAAVIACTTQGMIKRVSDFCKRAETTAVRNEHFPEPWPRFRDELTQRLSACPQENLMQINPVYYATVDISSIQPVFVLRMPRHKVTGAAHKETIKSRLDDAHTVQRRSITDLKLDKEGEIAGYFNPSSDTLLYNALKEQLTAFGGDGKKAFAEPFFKPRADGTPGAQVRKVKVYDKATSMVAVHEGKGVADNDTMVRIDVYFVPGDGYYWVPIYVADTVKLKLPNKAVVQGKSYAEWKEMDEENFLFSLCQNDLIRIESKRTMKFKVQNSDSTLEKEAQMNCRLTYFEGGNISTGAITVTTHDNAYIVGSLGFKTLQKIQKYQVDVLGNYTLVKKEKRQTFPAQRR

SEQ ID NO: 16202 - protein, 1074 aa, unidentified
  REGION 1..1074: note = Cas Enzyme sequence
MKHPYGIGLDIGIASVGWAVVALNENAEPYGLIRCGSRIFDKAEQPKTGDSLAAPRREARSARRRLRRRSLRKADLYELMEKNGLPGKAEIEQAVQAGHLPDVYALRVQALDGPVTALDFARILLHLMQRRGFRSNRKADDAQKDGKLLQAIDANTRRMEANRYRTVGEMMYRDPVFAEHKRNKAENYLSTVKRDQIIDEARLVFAAQRQYGATWASPEMEAEYLCILTRQRSFAEGPGKGSPYSGSNRVGTCTLEGKSEQRAAKAAFSFEYFTLLQKINHIRIAENGTSRTLTPAERQVLLSACYQTDKLDFARIRKALALPEEARFNMVRYRGEQTAEACEKKEKITALPCYHKMRKALNTLRKDHIRNISREQLDAAGAALTNPENEDKLREALKQAEFEPLEIEALLTLPSFAGYGHISVKACRKLIPYLEQGMNYNDACQAAGYDFQGRQNGEKAQFLPASTEEMEDITSPVVRRAVAQTIKVVNAIIREQGESPVSIHLELAREMNKNFQQRSELDKAMRDNSAENERLMKELNELFPGRTVTGQDLVKYRLWKEQNEICAYSLEKLDLTRVITEPGYAEVDHIVPYSISFDDRRTNKVLVLASENRQKGNRLPLQYLQGKRRDDFIVYTKANVKNFRKRQNLLKERLSEEDGKGYIQRNLQDTQYIAAFMLNYIRNHLAFADCSGAGKRRVVAVNGAVTAFLRKRWGLSKVRADGDLHHAVDAAVIACTTQGMIKRVSDFCKRAETTAVRNEHFPEPWPRFRDELTQRLSACPQEDLMKINPVYYATVDISSIQPVFVSRMPRHKVTGAAHKETIKSRLDDTHVVQRRNITELKLDKDGEIAGYFNRSSDTLLYNALKARLLAFGGDGKKAFAEPFYKPRADGTPGARVQKVKICDKVTSTVPVHGGKGVADNNTMVRMDVYFVPGDGYYWVPIYVADTVKLELPNKAVVQGKSYAEWKEMDEENFLFSLCQHDLVRIESKRLMKFKVQNRDSTLEKEMPVNKILAYFEGGDIATGAVTLTTHDDAYIATGLGFKTLQKVQKYQVDVLGNYTPVKKEKRQTFPAQRR

SEQ ID NO: 16203 - protein, 1074 aa, unidentified
  REGION 1..1074: note = Cas Enzyme sequence
MKHPYGIGLDIGIASVGWAVVALNENAEPYGLIRCGSRIFDKAEEPQTGDSLAAPRREARSARRRLRRRSLRKADLYELMEKNGLPGKAEIEQAVQAGHLPDVYALRVQALDGPVTALDFARILLHLMQRRGFRSNRKADDAQKDGKLLQAIDANTRRMEANRYRTVGEMMYRDPVFAEHKRNKAENYLSTVKRDQIIDEARLVFAAQRQYGATWASPEMEAEYLCILTRQRSFAEGPGKGSPYSGSNRVGTCTLEGKSEQRAAKAAFSFEYFTLLQKINHIRIAENGTSRTLTPAERQVLLSVCCQTDKLDFARVRKALALPEEARFNMVRYRGEQTAEACEKKEKITALPCYHKMRKALNTLRKDHIRNISREQLDAAGAALTNPENEDKLRKALKQAEFETLEIEALLTLPSFAGYGHISVKACRKLIPYLEQGMNYNDACQAAGYDFQGRQNGEKAQFLPASTEEMEDITSPVVRRAVAQTIKVVNAIIREQGESPVSIHLELAREMNKNFQQRSELDKAMRDNSAENERLMKELNELFPGRTVTGQDLVKYRLWKEQDGCCAYSIQPLELDKVITVSGYAEVDHIIPYSISFDDRRTNKVLVLASENRQKGNRLPLQYLQGKRRDDFIVYTKANVKNFRKRQNLLKERLSEEDGKGYIQRNLQDTQYIAAFMLNYICNHLAFADCSGAGKRRVVAVNGAVTAFLRKRWGLGKVRADGDLHHAVDAAVIACTTQGMIKRVSDFCKRAETTAVRNEHFPEPWPHFRDELTQRLSACPQEDLMKINPVYYATVDISSIQPVFVSRMPRHKVTGAAHEETIRSQVNEKYTAVRKSITELSLDKDGKIKDYFNPSSDTLLYEALKKRLTEFGGNAKKAFAEPFYKPRADGTPGAQVRKVKVVAKMSNTIPVRSGGGVAKGGDMIRIDVYYVPGDGYYWVPIYVADTVKETLPNKAVVRDKTMEEWKEMKEDDFLFSLYSNDLILVERDKPICFSLMHEDSTLPKKYETKKELVYYKGGDISNGGIRIETHEGAYFLKSLTFGIVQKVQKYQVDVLGNYTPVKKEKRQTFPAQRR

SEQ ID NO: 16204 - protein, 1074 aa, unidentified
  REGION 1..1074: note = Cas Enzyme sequence
MKHPYGIGLDIGIASVGWAVVALNENAEPYGLIRCGSRIFDKAEQPKTGDSLAAPRREARSARRRLRRRSLRKADLYELMEKNGLPGKAEIEQAVQAGHLPDVYALRVQALDGPVTALDFARILLHLMQRRGFRSNRKADDAQKDGKLLQAIDANTRRMEANRYRTVGEMMYRDPVFAEHKRNKAENYLSTVKRDQIIDEARLVFAAQRQYGATWASPEMEAEYLCILTRQRSFAEGPGKGSPYSGSNRVGTCTLEGKSEQRAAKAAFSFEYFTLLQKINHIRIAENGTSRTLTPAERQVLLSACYQTDKLDFARIRKALALPEEARFNMVRYRGEQTAEACEKKEKITALPCYHKMRKALNTLRKDHIRNISREQLDAAGAALTNPENEDKLREALKQAEFEPLEIEALLTLPSFAGYGHISVKACRKLIPYLEQGMNYNDACQAAGYDFQGSQNGEKAQFLPASTEEMEDITSPVVRRAVAQTIKVVNAIIREQGESPVSIHLELAREMNKNFQQRSELDKAMRDNSAENERLMKELNELFPGRTVTGQDLVKYRLWKEQNEICAYSLENLDLTRVITEPGYAEVDHIVPYSISFDDRRTNKVLVLASENRQKGNRLPLQYLQGKRRDDFIVYTKANVKNFRKRQNLLKERLSEEDGKGYIQRNLQDTQYIAAFMLNYIRNHLAFADCSGAGKRRVVAVNGAVTAFLRKRWGLSKVRADGDLHHAADAAVIACTTQGMIKRVSDFCKRAETTAVRNEHFPEPWPRFRDELTQRLSACPQENLMQINPVYYATVDILSIQPVFVSRMPRHKVTGAAHKETIKSRLDDTHVVQRRNITELKLDKDGEIAGYFNRSSDTLLYNALKARLLAFGGDGKKAFAEPFYKPRADGTPGARVQKVKICDKVTSTVPVHGGKGVADNNTMVRIDVYYVPGDGYYWIPVYVADTVKPELPSKAVVAYKSSAEWKEMKDEDFLFSLCQHDLVRIESKRLMKFKVQNRDSTLEKEMPVNKILAYFEGGNISTGAITVTTHDDAYIADGLGFKTLQKVQKYQVDVLGNYTPVKKEKRQTFPAQRR

SEQ ID NO: 16205 - protein, 1007 aa, unidentified
  REGION 1..1007: note = Cas Enzyme sequence
MKHPYGIGLDIGIASVGWAVVALNENAEPYGLIRCGSRIFDKAEQPKTGDSLAAPRREARSARRRQRRRSLRKADLYELMEKNGLPGKAEIEQAVQAGHLPDVYALRVQALDGPVTALDFARILLHLMQRRGFRSNRKADDAQKDGKLLQAIDANTRRMEANRYRTVGEMMYRDPVFAEHKRNKAENYLSTVKRDQIIDEARLIFTAQRQYGATWASPEMEAEYLCILTRQRSFAEGPGKGSPYSGSNRVGTCTLEGKSEQRAAKAAFSFEYFTLLQKINHIRIAENGTSRTLTPAERQVLLSVCCQTDKLDFARVRKALALPEEARFNMVRYRGEQTAEACEKKEKITALPCYHKMRKALNTLRKDHIRNISREQLDAAGAALTNPENEDKLREALKQAEFEPLEIEALLTLPSFAGYGHISVKACRKLIPYLEQGMNYNDACQAAGYDFQGRENGEKAQFLPASTEEMEDITSPVVRRAVAQTIKVVNAIIREQGESPVSIHLELAREMNKNFQQRSELDKAMRDNSAENERLMKELNELFPGRTVTGQDLVKYRLWKEQDGRCAYSIQPLELDKVITVSGYAEVDHIIPYSISFDDRRTNKVLVLASENRQKGNRLPLQYLQGKRRDDFIVYTKANVKNFRKRQNLLKERLSEEDGKGYIQRNLQDTQYIAAFMLNYIRNHLAFANCSGAGKRRVVAVNGAVTAFLRKRWGLGKVRADGDLHHAADAAVIACTTQGMIKRVSDFCKRAETTAVRNEHFPEPWPRFRDELTQRLSACPQEDLMKINPVYYATVDISSIQPVFVSRMPRHKVTGAAHKETIKSRLDDTHVVQRRNITELKLDKDGEIAGYFNRSSDTLLYNALKARLLAFGGDGKKAFEEPFYKPRADGTPGARVQKVKICDKVTSTVPVHGGKGVADNDTMVRMDVYFVPGDGYYWVPIYVADTVKLELPNKAVVQGKSYAEWKEMDEENFLFSLCQNDLIRIESKRTMKFKVQTVTVHWKKKCR

SEQ ID NO: 16206 - protein, 1077 aa, unidentified
  REGION 1..1077: note = Cas Enzyme sequence
MKHPYGIGLDIGIASVGWAVVVLNENAEPYGLIRCGSRIFDKAEQPKTGESLAAPRREARSTRRRLRRRSLRKADLYELMAQNGLPGRAKIEEAVQAGHLPDIYALRVQALDGPVTAMDFARILLHLMQRRGFRSNRKADDAQKDGKLLQAIDANTRRMKENHYRTVGEMMYRDPVFAEHKRNKSENYLSTVRRDQIVEEAVQLFAAQRQYGAAWASQEMEAEYLTILTRQRSFDEGPGGNSPYGGNIVEKMVGTCTLEGQAEPRAAKATWSFEYFTLLQKINHIRIIESGAARILTAEERQELLSVCYQTDKLDFARIRKALALSEQARFNMVRYRDGQTTEDCEKKEKIVCLPCYHKMRKVLNTLRKDYIRSVSRDRLDAAATALTMYKNEATLRAKLEEAQFEPLEVDALMTLPSFSGFGHISVKACRKLIPYLEQGLNYSDACKEAGYDFQGNYRGEKSQFLPASTEEMEDITSPVVRRAVAQTIKVVNAIIREQGESPVNIHLELAREMSKNFQQRNDLDKAMKDNNAENERLMKDLHELFPGRNITGQDLVKYRLWKEQDGRCAYSLQPLELEKTITVSGYAEVDHIVPYSISFDDRRANKVLVLASENRQKGNRLPLQYLQGKRRDDFIVYTKASVKNYRKRQNLLKEKLSEEDSKGFMQRNLQDTQYIASFMLNYIRSHLAFADFPAAGKKRVVAVNGAVTAFLRKRWGLGKVRADGDLHHAVDAAVIACTTDGMIQWVSRFYTHIETSDTRGERFPEPWPRFRDELMQRLSACPQENLMQINPVYYQNVDIASIRPVFVSRMPRHKMTGAAHKETIKGRLDDAHTVQRRSITDLKLDKEGEIAGYFNPSSDTLLYNALKEQLTAFGGDGKKAFAEPFFKPRADGTPGAQVRKVKVYDKATSMVAVHEGKGVADNDTMVRIDVYFVPGDGYYWVPIYVADTVKPELPNKAVVAYKNYDEWKEMDEENFLFSLCQNDLIRIESKRTMKFKVQNSDSTLEKETQMNCGLTYFEGGNISTGAITVTTHDNAYIVGSLGFKTLQKVQKYQVDVLGNYTLVKKEKRQNFPAQRR

SEQ ID NO: 16207 - protein, 1077 aa, unidentified
  REGION 1..1077: note = Cas Enzyme sequence
MKHPYGIGLDIGIASVGWAVVALNENAEPYGLIRCGSRIFDAAEQPKTGESLAAPRREARSTRRRLRRRSLRKADLYELMAQNGLPGRAKIEEAVQAGHLPDIYALRVQALDGPVTAMDFARILLHLMQRRGFRSNRKADDAQKDGKLLQAIDANTRRMEENHYRTVGEMMYRDPVFAEHKRNKSENYLSTVRRDQIVEEAVQLFAAQRQYGAAWASPEMEAEYLAILTRQRSFDEGPGGNSPYGGNIVEKMVGTCTLEGQAEPRAAKATWSFEYFTLLQKINHIRIIESGAARILTAEERQELLSVCYQTDKLDFARIRKALALSEQARFNMVRYRDGQTTEDCEKKEKIVCLPCYHKMRKVLNTLRKDYIRSVSRDRLDAAATALTMYKNEATLRAKLEEAQFEPLEVDALMTLPSFSGFGHISVKACRKLIPYLEQGLNYNDACKEAGYDFQGNYRGEKSQFLPASTEEMEDITSPVVRRAVAQTIKVVNAIIREQGESPVNIHLELAREMSKNFQQRNDLDKAMKDNNAENERLMKDLHELFPGRNITGQDLAKYRLWKEQDGRCAYSLQPLELEKAITVSGYAEVDHIVPYSISFDDRRANKVLVLASENRQKGNRLPLQYLQGKRRDDFIVYTKASVKNYRKRQNLLKEKLSEEDSKGFMQRNLQDTQYIASFMLNYIRSHLAFADFPAAGKKRVVAVNGAVTAFLRKRWGLGKVRADGDLHHAVDAAVIACTTDGMIQRVSRFYTHIETSDTRGERFPEPWPRFRDELMQRLSACPQENLMQINPVYYQNVDIASIRPVFVSRMPRHKMTGAAHKETIKGRLDDAHTVQRRSITDLKLDKEGEIAGYFNPSSDTLLYNALKEQLTAFGGDGKKAFAEPFFKPRADGTPGAQVRKVKVYDKATSMVAVHEGKGVADNDTMVRIDVYFVPGDGYYWVPIYVADTVKPELPNKAVVQGKSYAEWKEMDEENFLFSLCQNDLIRIESKRTMKFKVQNSDSTLEKETQMNCGLTYFEGGNISTGAITVTTHDNAYIVGSLGFKTLQKVQKYQVDVLGNYTLVKKEKRQNFPAQRR

SEQ ID NO: 16208 - protein, 1074 aa, unidentified
  REGION 1..1074: note = Cas Enzyme sequence
MKHPYGIGLDIGIASVGWAVVALNENAEPYGLIRCGSRIFDAAEQPNTGESLAAPRREARSTRRRLRRRSLRKADLYELMAQNGLPGRAKIEEAVQAGHLPDIYALRVQALDGPVTAMDFARILLHLMQRRGFRSNRKADDAQKDGKLLQAIDANTRRMEENHYRTVGEMMYRDPVFAEHKRNKSENYLSTVRRDQIVEEAVQLFAAQRQYGAAWASPEMEAEYLAVLTRQRSFAEGPGGDSPYRGMQKVGPCALEGKSERRAPKATFAFEYFTLLQKINHIRIAENGVTRILTAEERQELLSACYRTDKLDFARIRKLLALPGEARFNMVRYRENQTAEECEKKEKITVLPCYHKMRKVLNTLRKDHIRSISREQLDAAATALTNPENEEKLRAALEEAQFEPLEVDALMTLPSFSGFGHISVKACRKLIPYLEQGLNYNDACKEAGYDFQGNYRGEKSQFLPASTEEMEDITSPVVRRAVAQTIKVVNAIIREQGESPVNIHLELAREMSKNYKQRNELADAMEKNQAENARLMEELHDLFRGRTITGQTLVKYRLWKEQKEVCAYSLQMMKLDSVITDSSYAEVDHIVPYSRSFDDRRTNKVLVLTSENRKKGDRLPLEYLQGKRREDFIVYTKANVKNYRKRQNLLKEGLSKEESREFIQRNLQDTQYSASFMLNYIRNHLAFADCSAAGKQRVVAVNGAVTAFLRKRWGLSKVRADGDLHHAVDATVIACTTPSMVKRVTEFCKQEETNHVRNEYFPEPWPRFRDELMQRLSACPQENLMQINPVYYQNVDIASIRPVFVSRMPRHKATGKVHEDTIRSYVSKGITAVRTSITDLKLDEKGEIEGYFNKESDLLLYNALKRRLEEFGGNAKKAFAEPFYKPRADGTPGAQVRKVKIVDKTSNVICVRDGGGVSKSNNMVRIDVYYVPGEGYYWVPIYVADTVKSTLPNKAVLRNKGMDDWKEMNEKDFQFSLYNNDLVFIERDSPISFSLTNKKSTLPSKFSTEKTFAYYQKGDISNAAIKVETPDGAYVFKSLTLNTVRKIEKYQVDVLGNYTLVKKEKRQNFPAQRR

SEQ ID NO: 16209 - protein, 1074 aa, unidentified
  REGION 1..1074: note = Cas Enzyme sequence
MKHPYGIGLDIGIASVGWAVVALNENAEPYGLIRCGSRIFDKAEQPKTGDSLAAPRREARSARRRLRRRSLRKADLYELMEKNGLPGKAEIEQAVQAGHLPDVYALRVQALDGPVTALDFARILLHLMQRRGFRSNRKADDAQKDGKLLQAIDANTRRMEANRYRTVGEMMYRDPVFAEHKRNKAENYLSTVKRDQIIDEARLVFAAQRQYGATWASPEMEAEYLCILTRQRSFAEGPGKGSPYSGSNRVGTCTLEGKSEQRAAKAAFSFEYFTLLQKINHIRIAENGTSRTLTPAERQVLLSVCSQTDKLDFARVRKALALPEEARFNMVRYRGEQTAEACEKKEKITALPCYHKMRKALNTLRKDHIRNISREQLDAAGAALTNPENEDKLRKALKQAEFEPLEIEALLTLPSFAGYGHISVKACRKLIPYLEQGMNYNDACQAAGYDFQGRQNGEKAQFLPASTEEMEDITSPVVRRAVAQTIKVVNAIIREQGESPVSIHLELAREMNKNFQQRSELDKAMRDNSAENERLMKELNELFPGRTVTGQDLVKYRLWKEQDGHCAYSIQPLELDKVITVSGYAEVDHIVPYSISFDDRRTNKVLVLASENRQKGNRLPLQYLQGKRRDDFIVYTKANVKNFRKRQNLLKERLSEEDGKGYIQRNLQDTQYIAAFMLNYIRNHLAFADCSGAGKRRVVAVNGAVTAFLRKRWGLSKVRADGDLHHAADAAVIACTTQGMIKRVSDFCKRAETTAVRNEHFPEPWPHFRDELTQRLSACPQENLMQINPVYYATVDISSIQPVFVSRMPRHKVTGAAHKETIKSRLDDTHVVQRRNITELKLDKDGEIAGYFNRSSDTLLYNALKARLLAFGGDGKKAFAEPFYKPRADGTPGARVQKVKICDKVTSTVPVHGGKGVADNDTMVRMDVYFVPGDGYYWVPIYVADTVKLELPNKAVVQGKSYAEWKEMDEENFLFSLCQHDLVRIESKRLMKFKVQNRDSTLEKEMPVNKILAYFEGGNISTGAITVTTHDDAYIADGLGFKTLQKVQKYQVDVLGNYTPVKKEKRQTFPAQRR

SEQ ID NO: 16210 - protein, 1077 aa, unidentified
  REGION 1..1077: note = Cas Enzyme sequence
MKHPYGIGLDIGIASVGWAVVALNENAEPYGLIRCGSRIFDAAEQPNTGESLAAPRREARSTRRRLRRRSLRKADLYELMAQNGLPGRAKIEEAVQAGHLPDIYALRVQALDGPVTAMDFARILLHLMQRRGFRSNRKADDAQKDGKLLQAIDANTRRMEENHYRTVGEMMYRDPVFAEHKRNKSENYLSTVRRDQIAEEAVQLFAAQRQYGAAWASPEMEAEYLTILTRQRSFDEGPGGNSPYGGNIVEKMVGTCTLEGQAEPRAAKATWSFEYFTLLQKINHIRIIESGAARILTAEERQELLSVCYQTDKLDFAKIRKALALSEQARFNMVRYRDGQTTEDCEKKEKIVCLPCYHKMRKVLNTLRKDYIRSVSRDRLDAAATALTMYKNETTLRSKLEEAQFEPLEVDALMTLPSFSGFGHISVKACRKLIPYLEQGLNYNDACKEAGYDFQGNYRGEKSQFLPASTEEMEDITSPVVRRAVAQTIKVVNAIIREQGESPVNIHLELAREMSKNFQQRNDLDKAMKDNNAENERLMKDLHELFPGRNITGQDLVKYRLWKEQDGRCAYSLQPLELEKAITVSGYAEVDHIVPYSISFDDRRANKVLVLASENRQKGNRLPLQYLQGKRRDDFIVYTKASVKNYRKRQNLLKEKLSEEDSKGFMQRNLQDTQYIASFMLNYIRSHLAFADFPAAGKKRVVAVNGAVTAFLRKRWGLGKVRADGDLHHAVDAAVIACTTDGMIQRVSRFYTHIETSDTRGERFPEPWPRFRDELMQRLSACPQENLMQINPVYYQNVDIASIRPVFVSRMPRHKMTGAAHKETIKGRLDDAHTVQRRSITDLKLDKEGEIAGYFNPSSDTLLYNALKEQLTAFGGDGKKAFAEPFFKPRADGTPGAQVRKVKVYDKATSMVAVHEGKGVADNDTMVRIDVYFVPGDGYYWVPIYVADTVKPELPNKAVVAYKNYDEWKEMDEGNFLFSLCQNDLIYLERKSAIKFKVKNSESTLEKEIVRNKGIVYFEGGDIATAAISVTTPEDAYFSRGLGFKTLQKVQKYQVDVLGNYTLVKKEKRQNFPAQRR

SEQ ID NO: 16211 - protein, 1077 aa, unidentified
  REGION 1..1077: note = Cas Enzyme sequence
MKHPYGIGLDIGIASVGWAVVVLNENAEPYGLIRCGSRIFDKAEQPKTGESLAAPRREARSTRRRLRRRSLRKADLYELMAQNGLPGRAKIEEAVQAGHLPDIYALRVQALDGPVTAMDFARILLHLMQRRGFRSNRKADDAQKDGKLLQAIDANTRRMKENHYRTVGEMMYRDPVFAEHKRNKSENYLSTVRRDQIVEEAVQLFAAQRQYGAAWASQEMEAEYLTILTRQRSFDEGPGGNSPYGGNIVEKMVGTCTLEGQAEPRAAKATWSFEYFTLLQKINHIRIIESGAARILTAEERQELLSVCYQTDKLDFARIRKALALSEQARFNMVRYRDGQTTEDCEKKEKIVCLPCYHKMRKVLNTLRKDYIRSVSRDRLDAAATALTMYKNEATLRAKLEEAQFEPLEVDALMTLPSFSGFGHISVKACRKLIPYLEQGLNYSDACKEAGYDFQGNYRGEKSQFLPASTEEMEDITSPVVRRAVAQTIKVVNAIIREQGESPVNIHLELAREMSKNFQQRNDLDKAMKDNNAENERLMKDLHELFPGRNITGQDLVKYRLWKEQDGRCAYSLQPLELEKTITVSGYAEVDHIVPYSISFDDRRANKVLVLASENRQKGNRLPLQYLQGKRRDDFIVYTKASVKNYRKRQNLLKEKLSEEDSKGFMQRNLQDTQYIASFMLNYIRSHLAFADFPAAGKKRVVAVNGAVTAFLRKRWGLGKVRADGDLHHAVDAAVIACTTDGMIQRVSRFYTHIETSDTRGERFPEPWPRFRDELMQRLSACPQENLMQINPVYYQNVDIASIRPVFVSRMPRHKMTGAAHKETIKGRLDDAHTVQRRSITDLKLDKEGEIAGYFNPSSDTLLYNALKEQLTAFGGDGKKAFAEPFFKPRADGTPGAQVRKVKVYDKATSMVAVHEGKGVADNDTMVRIDVYFVPGDGYYWVPIYVADTVKPELPNKAVVAYKNYDEWKEMDEENFLFSLCQNDLIRIESKRTMKFKVQNSDSTLEKETQMNCGLTYFEGGNISTGAITVTTHDNAYIVGSLGFKTLQKVQKYQVDVLGNYTLVKKEKRQNFPAQRR

SEQ ID NO: 16212 - protein, 1074 aa, unidentified
  REGION 1..1074: note = Cas Enzyme sequence
MKHPYGIGLDIGIASVGWAVVALNENAEPYGLIRCGSRIFDAAEQPNTGESLAAPRREARSTRRRLRRRSLRKADLYELMAQNGLPGRAKIEEAVQAGHLPDIYALRVQALDGPVTAMDFARILLHLMQRRGFRSNRKADDAQKDGKLLQAIDANTRRMEENHYRTVGEMMYRDPVFAEHKRNKSENYLSTVRRDQIVEEAVQLFAAQRQYGAAWASPEMEAEYLTILTRQRSFAEGPGGDSPYRGMQKVGPCALEGKSERRAPKATFAFEYFTLLQKINHIRIAENGVNRILTAEERQELLSACYRTDKLDFARIRKLLALPVEARFNMVRYRENQTAEECEKKEKITVLPCYHKMRKVLNTLRKDHIRSISREQLDAAATALTNPENEEKLRAALEEAQFEPLEVDALMTLPSFSGFGHISVKACRKLIPYLEQGLNYSDACKEAGYDFQGNYRGEKSQFLPASTEEMEDITSPVVRRAVAQTIKVVNAIIREQGESPVNIHLELAREMSKNYKQRNELADAMEKNQAENARLMEELHDLFRGRTITGQTLVKYRLWKEQKEVCAYSLQMMKLDSVITDSSYAEVDHIVPYSRSFDDRRTNKVLVLTSENRKKGDRLPLEYLQGKRREDFIVYTKANVKNYRKRQNLLKEGLSKEESREFIQRNLQDTQYSASFMLNYIRNHLAFADCSAAGKQRVVAVNGAVTAFLRKRWGLSKVRADGDLHHAVDATVIACTTPSMVKRVTEFCKQEETNHVRNEYFPEPWPRFRDELMQRLSACPQENLMQINPVYYQNVDIASIRPVFVSRMPRHKATGKVHEDTIRSYVSKGITAVRTSITDLKLDEKGEIEGYFNKESDLLLYNALKRRLEEFGGNAKKAFAEPFYKPRADGTPGAQVRKVKIVDKTSNVICVRDGGGVSKSNNMVRIDVYYVPGEGYYWVPIYVADIVKSTLPNKAVLRNKGMDDWKEMNEKDFQFSLYNNDLVFIERDSPISFSLTNKKSTLPSKFSTEKTFAYYQKGDISNAAIKVETPDGAYVFKSLTLNTVRKIEKYQVDVLGNYTLVKKEKRQNFPAQRR

SEQ ID NO: 16213 - protein, 1074 aa, unidentified
  REGION 1..1074: note = Cas Enzyme sequence
MKHPYGIGLDIGIASVGWAVVALNENAEPYGLIRCGSRIFDKAEQPQKGDSLAAPRREARSARRRLRRRSLRKADLYELMEKNGLPGKAEIEQAVQAGHLPDVYALRVQALDGPVTALDFARILLHLMQRRGFRSNRKADDAQKDGKLLQAIDANTRRMEANRYRTVGEMMYRDPVFAEHKRNKAENYLSTVKRDQIIDEARLVFAAQRQYGATWASPEMEAEYLCILTRQRSFAEGPGKGSPYSGSNRVGTCTLEGKSEQRAAKAAFSFEYFTLLQKINHIRIAENGTSRTLTPAERQVLLSVCCQTDKLDFARIRKALALPEEARFNMVRYRGEQTAEACEKKEKITALPCYHKMRKALNTLRKDHIRNISREQLDAAGAALTNPENEDKLREALKQAEFEPLEIEALLTLPSFAGYGHISVKACRKLIPYLEQGMNYNDACQAAGYDFQGRQNGEKAQFLPASTEEMEDITSPVVRRAVAQTIKVVNAIIREQGESPVSIHLELAREMNKNFQQRSELDKAMRDNSAENERLMKELNELFPGRTVTGQDLVKYRLWKEQDGRCAYSIQPLELDKVITVSGYAEVDHIVPYSISFDDRRTNKVLVLASENRQKGNRLPLQYLQGKRRDDFIVYTKANVKNFRKRQNLLKERLSEEDGKGFIQRNLQDTQYIAAFMLNYIRNHLAFADCSGAGKRRVVAVNGAVTAFLSKRWGLGKVRADGDLHHAADAAVIACTTQGMIKRVSDFCKRAETTAVRNEHFPEPWPHFRDELTQRLSACPQENLMQINPVYYATVDTSSIQPVFVSRMPRHKVTGAAHEETIRSQVNEKYTAVRKSITELSLDKDGKIKDYFKPSSDTLLYEALKKRLTEFGGNAKKAFAEPFYKPRADGTPGAQVRKVKVVAKMSNTIPVRSGGGVAKGGDMIRIDVYYVPGDGYYWVPIYVADTVKETLPNKAVVRDKTMEEWKEMKEDDFLFSLYSNDLILVERDKPICFSLMHEDSTLPKKYETKKELVYYKGGDISNGGIRIETHEGAYFLKSLTFGIVQKVQKYQVDVLGNYTPVKKEKRQTFPAQRR

SEQ ID NO: 16214 - protein, 1028 aa, unidentified
  REGION 1..1028: note = Cas Enzyme sequence
KTGDSLAAPRREARSARRRLRRRSLRKADLYELMEKNGLPGKAEIEQAVQAGHLPDVYALRVQALDGPVTALDFARILLHLMQRRGFRSNRKADDAQKDGKLLQAIDANTRRMEANRYRTVGEMMYRDPVFAEHKRNKAENYLSTVKRDQIIDEARLVFAAQRQYGATWASPEMEAEYLCILTRQRSFAEGPGKGSPYSGSNRVGTCTLEGKSEQRAAKAAFSFEYFTLLQKINHIRIAENGTSRTLTPAERQVLLSVCCQTDKLDFARIRKALALPEEARFNMVRYRGEQTAEACEKKEKITALPCYHKMRKALNTLRKDHIRNISREQLDAAGAALTNPENEDKLREALKQAEFEPLEIEALLTLPSFAGYGHISVKACRKLIPYLEQGMNYNDACQAAGYDFQGRQNGEKAQFLPASTEEMEDITSPVVRRAVAQTIKVVNAIIREQGESPVSIHLELAREMNKNFQQRSELDKAMRDNSAENERLMKELNELFPGRTVTGQDLVKYRLWKEQDGRCAYSIQPLELDKVITVSGYAEVDHIVPYSISFDDRRTNKVLVLASENRQKGNRLPLQDLQGKRRDDFIVYTKANVKNFRKRQNLLKERLSGEDGKGYIQRNLQDTQYIAAFMLNYIRNHLAFADCSGAGKRRVVAVNGAVTAFLRKRWGLSKVRADGDLHHAVDAAVIACTTQGMIKRVSDFCKRAETTAVRNEHFPEPWPHFRDELRQRLSACPQEDLMKINPVYYATVDISSIQPVFVSRMPRHKVTGAAHKETIKSRLDDTHVVQRRNITELKLDKDGEIAGYFNRSSDTLLYNALKARLLAFGGDGKKAFAEPFYKPRADGTPGARVQKVKICDKVTSTVPVHGGKGVADNDTMVRIDVYCVPGDGYYWVPIYVADTVKLELPNKAVVQGKSYAEWKEMDEENFLFSLCQHDLVRIESKRLMKFKVQNRDSTLEKEMPVNKILAYFEGGNISTGAITVTTHDDAYIADGLGFKTLQKVQKYQVDVLGNYTPVKKEKRQTFPAQRR

SEQ ID NO: 16215 - protein, 1074 aa, unidentified
  REGION 1..1074: note = Cas Enzyme sequence
MKHPYGIGLDIGIASVGWAVVALNENAEPYGLIRCGSRIFDKAEQPKTGDSLAAPRREARSARRRLRRRSLRKADLYELMEKNGLPGKAEIEQAVQAGHLPDVYALRVQALDGPVTALDFARILLHLMQRRGFRSNRKADDAQKDGKLLQAIDANTRRMEANRYRTVGEMMYRDPVFAEHKRNKAENYLSTVKRDQIIDEARLVFAAQRQYGATWASPEMEAEYLCILTRQRSFAEGPGKGSPYSGSNRVGTCTLEGKSEQRAAKAAFSFEYFTLLQKINHIRIAENGTSRTLTPAERQVLLSVCSQTDKLDFARVRKALALPEEARFNMVRYRGEQTAEACEKKEKITALPCYHKMRKALNTLRKDHIRNISREQLDAAGAALTNPENEDKLRKALKQAEFEPLEIEALLTLPSFAGYGHISVKACRKLIPYLEQGMNYNDACQAAGYDFQGRQNGEKAQFLPASTEEMEDITSPVVRRAVAQTIKVVNAIIREQGESPVSIHLELAREMNKNFQQRSELDKAMRDNSAENERLMKELNELFPGRTVTGQDLVKYRLWKEQDGHCAYSIQPLELDKVITVSGYAEVDHIVPYSISFDDRRTNKVLVLASENRQKGNRLPLQYLQGKRRDDFIVYTKANVKNFRKRQNLLKERLSEEDGKGYIQRNLQDTQYIAAFMLNYIRNHLAFADCSGAGKRRVVAVNGAVTAFLRKRWGLSKVRADGDLHHAVDAAVIACTTQGMIKRVSDFCKRAETTAVRNEHFPEPWPHFRDELTQRLSACPQEDLMKINPVYYATVDISSIQPVFVSRMPRHKVTGAAHKETIKSRLDDTHVVQRRNITELKLDKDGEIAGYFNRSSDTLLYNALKARLLAFGGDGKKAFAEPFYKPRADGTPGARVQKVKICDKVTSTVPVHGGKGVADNDTMVRIDVYYVPGDGYYWIPVYVADTVKPELPSKAVVAYKSSAEWKEMKDEDFLFSLCQHDLVRIESKRLMKFKVQNRDSTLEKEMPVNKILAYFEGGNIATGAVTLTTHDDAYIADGLGFKTLQKVQKYQVDVLGNYTPVKKEKRQTFPAQRR

SEQ ID NO: 16216 - protein, 1074 aa, unidentified
  REGION 1..1074: note = Cas Enzyme sequence
MKHPYGIGLDIGIASVGWAVVALNENAEPYGLVRCGSRIFDKAEQPKTGDSLAAPRREARSARRRLRRRSLRKADLYELMEKNGLPGKAEIEQAVQAGHLPDVYALRVQALDGPVTALDFARILLHLMQRRGFRSNRKADDAQKDGKLLQAIDANTRRMEANRYRTVGEMMYRDPVFAEHKRNKAENYLSTVKRDQIIDEARLVFAAQRQYGATWASPEMEAEYLCILTRQRSFAEGPGKGSPYSGSNRVGTCTLEGKSEQRAAKAAFSFEYFTLLQKINHIRIAENGTSRTLTPAERQVLLSVCSQTDKLDFARVRKALALPEEARFNMVRYRGEQTAEACEKKEKITALPCYHKMRKALNTLRKDHIRNISREQLDAAGAALTNPENEDKLREALKQAEFEPLEIEALLTLPSFAGYGHISVKACRKLIPYLEQGMNYNDACQAAGYDFQGRQNGEKAQFLPASTEEMEDITSPVVRRAVAQTIKVINAIIREQGESPVSIHLELAREMNKNFQQRSELDKAMRDNSAENERLMKELNELFPGRTVTGQDLVKYRLWKEQDGRCAYSIQPLELDKVITVSGYAEVDHIVPYSISFDDRRTNKVLVLASENRQKGNRLPLQYLQGKRRDDFIVYTKANVKNFRKRQNLLKERLSEEDGKGYIQRNLQDTQYIAAFMLNYIRNHLAFADCSGAGKRRVVAVNGAVTAFLRKRWGLSKVRADGDLHHAADAAVIACTTQGMIKRVSDFCKRAETTAVRNEHFPEPWPHFRDELTQRLSACPQEDLMKINPVYYATVDISSIQPVFVSRMPRHKVTGAAHKETIKSRLDDTHVVQRRNITELKLDKDGEIAGYFNRSSDTLLYNALKARLLAFGGDGKKAFAEPFYKPRADGTPGARVQKVKICDKVTSTVPVHDGKGVADNDTMVRIDVYYVPGDGYYWIPVYVADTVKPELPSKAVVAYKSSAEWKEMKDEDFLFSLCQHDLVRIESKRLMKFKVQNRDSTLEKEMPVNKILAYFEGGNIATGAVTLTTHDDAYIADGLGFKTLQKVQKYQVDVLGNYTPVKKEKRQTFPAQRR

SEQ ID NO: 16217 - protein, 1078 aa, unidentified
  REGION 1..1078: note = Cas Enzyme sequence
MCKKVKHPYGIGLDIGIASVGWAVVALNENAEPYGLIRCGSRIFDKAEQPQTGDSLAAPRREARSARRRLRRRSLRKADLYELMAKNGLPGKAEIEQAVQAGHLPDVYALRVQALDGPVTALDFARILLHLMQRRGFRSNRKADDAQKDGKLLQAIDANTRRMEANRYRTVGEMMYRDPVFAEHKRNKAENYLSTVKRDQIIDEARLVFAAQRQYGATWASPEMEAEYLCILTRQRSFAEGPGKGSPYSGSNRVGTCTLEGKSEQRAAKAAFSFEYFTLLQKINHIRIAENGTSRTLTPAERQVLLSVCSQTDKLDFARIRKALALPEEARFNMVRYRGEQTAEACEKKEKITALPCYHKMRKALNTLRKDHIRNISREQLDAAGAALTNPENEDKLREALKQAEFEPLEIEALLTLPSFAGYGHISVKACRKLIPYLEQGMNYNDACQAAGYDFQGRQNGEKAQFLPASTEEMEDITSPVVRRAVAQTIKVVNAIIREQGESPVSIHLELAREMNKNFQQRSELDKAMRDNSAENERLMKELNELFPGRTVTGQDLVKYRLWKEQDGRCAYSIQPLELDKVITVSGYAEVDHIVPYSISFDDRRTNKVLVLASENRQKGNRLPLQYLQGKRRDDFIVYTKANVKNFRKRQNLLKERLSEEDGKGYIQRNLQDTQYIAAFMLNYIRNHLAFADCSGAGKRRVVAVNGAVTAFLRKRWGLSKVRADGDLHHAVDAAVIACTTQGMIKRVSDFCKRAETTAVRNEHFPEPWPHFRDELRQRLSACPQEDLMKINPVYYATVDISSIQPVFVSRMPRHKVTGAAHEETIRSQVNEKYTAVRKSITELSLDKDGKIKDYFKPSSDTLLYEALKKRLTEFGGNAKKAFAEPFYKPRADGTSGAQVRKVKVVAKMNNTIPVRDGGGVAKGGDMIRIDVYYVPGDGYYWVPIYVADTVRPELPNKAVLRGKSMEDWKEMKEENFLFSLYANDLILVEREEPINFSLVNNDSTLPNKFSVKKVLVYYKSGNISNAAIKVETHDGAYVFEGMTFGTVRKIQKYQVDVLGNYTPVKKEKRQTFPAQRR

SEQ ID NO: 16218 - protein, 1074 aa, unidentified
  REGION 1..1074: note = Cas Enzyme sequence
MKHPYGIGLDIGIASVGWAVVALNENAEPYGLIRCGSRIFDKAEQPKTGDSLAAPRREARSARRRLRRRSLRKADLYELMEKNGLPGKAEIEQAVQAGHLPDVYALRVQALDGPVTALDFARILLHLMQRRGFRSNRKADDAQKDGKLLQAIDANTRRMEANRYRTVGEMMYRDPVFAEHKRNKAENYLSTVKRDQIIDEARLVFAAQRQYGATWASPEMEAEYLCILTRQRSFAEGPGKGSPYSGSNRVGTCTLEGKSEQRAAKAAFSFEYFTLLQKINHIRIAENGTSRTLTPAERQVLLSVCSQTDKLDFARVRKALALPEEARFNMVRYRGEQTAEACEKKEKITALPCYHKMRKALNTLRKDHIRNISREQLDAAGAALTNPENEDKLREALKQAEFEPLEIEALLTLPSFAGYGHISVKACRKLIPYLEQGMNYNDACQAAGYDFQGRQNGEKAQFLPASTEEMEDITSPVVRRAVAQTIKVVNAIIREQGESPVSIHLELAREMNKNFQQRSELDKAMRDNSAENERLMKELNELFPGRTVTGQDLVKYRLWKEQDGRCAYSIQPLELDKVITVSGYAEVDHIVPYSISFDDRRTNKVLVLASENRQKGNRLPLQYLQGKRRDDFIVYTKANVKNFRKRQNLLKERLSEEDGKGYIQRNLQDTQYIAAFMLNYIRNHLAFADCSGAGKRRVVAVNGAVTAFLRKRWGLSKVRADGDLHHAADAAVIACTTQGMIKRVSDFCKRAETTAVRNEHFPEPWPHFRDELTQRLSACPQEDLMKINPVYYATVDISSIQPVFVSRMPRHKVTGAAHKETIKSRLDDTHVVQRRNITELKLDKDGEIAGYFNRSSDTLLYNALKARLLAFGGDGKKAFAEPFYKPRADGTPGARVQKVKICDKVTSTVPVHDGKGVADNDTMVRIDVYYVPGDGYYWIPVYVADTVKPELPSKAVVAYKSSAEWKEMKDEDFLFSLCQHDLVRIESKRLMKFKVQNRDSTLEKEMPVNKILAYFEGGNIATGAVTLTTHDDAYIADGLGFKTLQKVQKYQVDVLGNYTPVKKEKRQTFPAQRR

SEQ ID NO: 16219 - protein, 1074 aa, unidentified
  REGION 1..1074: note = Cas Enzyme sequence
VKHPYGIGLDIGIASVGWAVVALNENAEPYGLIRCGSRIFDKAEQPQTGDSLAAPRREARSARRRLRRRSLRKADLYELMAKNGLPGKAEIEQAVQAGHLPDVYALRVQALDGPVTALDFARILLHLMQRRGFRSNRKADDAQKDGKLLQAIDANTRRMEANRYRTVGEMMYRDPVFAEHKRNKAENYLSTVKRDQIIDEARLVFAAQRQYGATWASPEMEAEYLCILTRQRSFAEGPGKGSPYSGSNRVGTCTLEGKSEQRAAKAAFSFEYFTLLQKINHIRIAENGTSRTLTPAERQVLLSVCSQTDKLDFARIRKALALPEEARFNMVRYRGEQTAEACEKKEKITALPCYHKMRKALNTLRKDHIRNISREQLDAAGAALTNPENEDKLREALKQAEFEPLEIEALLTLPSFAGYGHISVKACRKLIPYLEQGMNYNDACQAAGYDFQGRQNGEKAQFLPASTEEMEDITSPVVRRAVAQTIKVVNAIIREQGESPVSIHLELAREMNKNFQQRSELDKAMRDNSAENERLMKELNELFPGRTVTGQDLVKYRLWKEQDGRCAYSIQPLELDKVITVSGYAEVDHIVPYSISFDDRRTNKVLVLASENRQKGNRLPLQYLQGKRRDDFIVYTKANVKNFRKRQNLLKERLSEEDGKGYIQRNLQDTQYIAAFMLNYIRNHLAFADCSGAGKRRVVAVNGAVTAFLRKRWGLSKVRADGDLHHAVDAAVIACTTQGMIKRVSDFCKRAETTAVRNEHFPEPWPHFRDELRQRLSACPQEDLMKINPVYYATVDISSIQPVFVSRMPRHKVTGAAHEETIRSQVNEKYTAVRKSITELSLDKDGKIKDYFKPSSDTLLYEALKKRLTEFGGNAKKAFAEPFYKPRADGTPGAQVRKVKVVAKMNNTIPVRSGGGVAKGGDMIRIDVYYVPGDSYYWVPIYVADTVKETLPNKAVVRDKTMEEWKEMKEDDFLFSLYSNDLILVERDKPICFSLMHEDSTLPKKYETKKELVYYKGGDISNGGIRIETHEGAYFLKSLTFGIVQKVQKYQVDVLGNYTPVKKEKRQTFPAQRR

SEQ ID NO: 16220 - protein, 1074 aa, unidentified
  REGION 1..1074: note = Cas Enzyme sequence
MKHPYGIGLDIGIASVGWAVVALNENAEPYGLVRCGSRIFDKAEQPKTGDSLAAPRREARSARRRLRRRSLRKADLYELMEKNGLPGKAEIEQAVQAGHLPDVYALRVQALDGPVTALDFARILLHLMQRRGFRSNRKADDAQKDGKLLQAIDANTRRMEANRYRTVGEMMYRDPVFAEHKRNKAENYLSTVKRDQIIDEARLVFAAQRQYGATWASPEMEAEYLCILTRQRSFAEGPGKGSPYSGSNRVGTCTLEGKSEQRAAKAAFSFEYFTLLQKINHIRIAENGTSRTLTPAERQVLLSVCSQTDKLDFARIRKALALPEEARFNMVRYRGEQTAEACEKKEKITALPCYHKMRKALNTLRKDHIRNISREQLDAAGAALTNPENEDKLREALKQAEFEPLEIEALLTLPSFAGYGHISVKACRKLIPYLEQGMNYNDACQAAGYDFQGRQNGEKAQFLPASTEEMEDITSPVVRRAVAQTIKVVNAIIREQGESPVSIHLELAREMNKNFQQRSELDKAMRDNSAENERLMKELNELFPGRTVTGQDLVKYRLWKEQDGCCAYSIQPLELDKVITVSGYAEVDHIVPYSISFDDRRTNKVLVLASENRQKGNRLPLQYLQGKRRDDFIVYTKANVKNFRKRQNLLKERLSEEDGKGYIQRNLQDTQYIAVFMLNYIRNHLAFADCSGAGKRRVVAVNGAVTAFLRKRWGLSKVRADGDLHHAADAAVIACTTQGMIKRVSDFCKRAETTVVRNEHFPEPWPRFRDELTQRLSACPQENLMQINPVYYATVDISSIQPVFVSRMPRHKVTGAAHKETIKSRLDDTHVVQRRNITELKLDKDGEIAGYFNRSSDTLLYNALKARLLAFSGDGKKAFAEPFYKPRADGTPGARVQKVKICDKVTSTVPVHGGKGVADNDTMVRIDVYYVPGDGYYWVPIYVADTVKLELPNKAVVQGKSYAEWKEMDEENFLFSLCQHDLVRIESKRLMKFKVQNRDSTLEKEMPVNKILAYFEGGNISTGAITVTTHDDAYIADGLGFKTLQKVQKYQVDVLGNYTPVKKEKRQTFPAQRR

SEQ ID NO: 16221 - protein, 1074 aa, unidentified
  REGION 1..1074: note = Cas Enzyme sequence
MKHPYGIGLDIGIASVGWAVVALNENAEPYGLIRCGSRIFDKAEQPKTGDSLAAPRREARSARRRLRRRSLRKADLYELMEKNGLPGKAEIEQAVQAGHLPDVYALRVQALDGPVTALDFARILLHLMQRRGFRSNRKADDAQKDGKLLQAIDANTRRMEANRYRTVGEMMYRDPVFAEHKRNKAENYLSTVKRDQIIDEVRLVFAAQRQYGATWASPEMEAEYLCILTRQRSFAEGPGKGSPYSGSNRVGTCTLEGKSEQRAAKAAFSFEYFTLLQKINHIRIAENGTSRTLTPAERQILLSVCCQTDKMDFARVRKALALPEEARFNMVRYRGEQTAEACEKKEKITALPCYHKMRKALNTLRKDHIRNISREQLDAAGAALTNPENEDKLREALKQAEFEPLEIEALLTLPSFAGYGHISVKACRKLIPYLEQGMNYNDACQAAGYDFQGRQNGEKAQFLPASTEEMDDITSPVVRRAVAQTIKVVNAIIREQGESPVSIHLELAREMNKNFQQRSELDKAMRDNSAENERLMKELNELFPGRTVTGQDLVKYRLWKEQNEICAYSLEKLDLTRVITEAGYAEVDHIVPYSISFDDRRTNKVLVLASENRQKGNRLPLQYLQGKRRDDFIVYTKANVKNFRKRQNLLKERLSEEDGKGYIQRNLQDTQYIAAFMLNYIRNHLAFADCSGAGKRRVVAVNGAVTAFLRKRWGLSKVRTDGDLHHAADAAVIACTTQGMIKRVSDFCKRAETTAVRNEHFPEPWPRFRDELTQRLSACPQEDLMKINPVYYATVDISSIQPVFVSRMPRHKVTGAAHEETIRSQVNEKYTAVRKSITELSLDKDGKIKDYFKPSSDTLLYEALKKRLTEFGGNAKKAFAEPFYKPRADGTPGAQVRKVKVVAKMNNTIPVRSGGGVAKGGDMIRIDVYYVPGDGYYWVPIYVADTVKETLPNKAVVRDKTMEEWKEMKEDDFLFSLYSNDLILVERDKPICFSLMHEDSTLPKKYETKKELVYYKGGDISNGGIRIETHEGAYFLKSLTFGIVQKVQKYQVDVLGNYTPVKKEKRQTFPAQRR

SEQ ID NO: 16222 - protein, 1077 aa, unidentified
  REGION 1..1077: note = Cas Enzyme sequence
MNTAYGIGLDIGIASVGWAVVALNEDAEPYGLIRCGSRVFDKAEQPKTGDSLAASRREARSTRRRLRRRSLRKADLYALMEKSGLPGRAAVEEAVLAGHLPDIYALRAQALDGPVTAMDFARILLHLMQRRGFRSNRKADDAQKDGKLLQAIDANTQRMKDNHYRTVGEMMYCDPAFATHKRNKTENYLSTVRRDQIASEAAQLFAAQRQYGAAWASPETEAEYLTILTRQRSFDEGPGGNSPYGGNMIEKMVGTCTLEGTAEPRAAKATWSFEYFTLLQKLNHIRIEEGGNSHPLTHAQRQELLTLCYQTDKLDFARIRKVLDLPPQARFNMVRYRADQPADACEKKEKITALPCYHKMRKALNTLRKDYILTVGHDRLDAAATALTLYKSEDLLREKLQQADFEPLEINALLTLPSFSKFGHISVKACRKLIPYLEQGENYNDACRDAGYDFQGSGHGEKSILLPAEAEEFSDITSPVVRRAVAQTIKVVNAIIREQGESPVSIHLELAREMSKSFQERADLENAMKENNADNERLMRDLHERFPGRNISGQDLVKYRLWKEQDGCCAYSLQPLELQSVITVSGYAEVDHIVPYSISFDDRRTNKVLVLASENRQKGNRLPLQYLQGTRRDNFIVYTKNNVKNYRKRQNLLKENLSAEDSSGFMQRNLQDTQYIASFMLNYIRGHLAFAAHPMAGKKRVVAVNGAVTSFLRKRWGIAKVRADGDLHHAVDAAVIACTTDGMIQRVSRFYQRTELSHARGERFPEPWPRFRDELMQRLSSCPQENLLTINPVYYTTADIAGIKPVFVSRMPRHKATGPAHKETIKGRLDDTYVTQRRSITDLKLNKDGEIDGYFNPSSDTLLYNALKERLIAFGGNGKKAFAEPFFKPRADGTPGAQVRKVKLYSKVTSTVPVHGGNGVADNDTMVRVDVYYIPGDGYYWVPIYVADTVKPVLPNCAFVRCKNSIIKKEMSEENFLFSLCKNDLVCIESKRPIKLKAANEDSTLEKELTVQRVLAYFEGGNISTGAVSVTTHDNAYIAESLGFKTLQKVEKYQVDVLGNYTRVKKEKRQLFPAQRR

SEQ ID NO: 16223 - protein, 1077 aa, unidentified
  REGION 1..1077: note = Cas Enzyme sequence
MKHPYGIGLDIGIASVGWAVVVLNENAEPYGLIRCGSRIFDKAEQPKTGESLAAPRREARSTRRRLRRRSLRKADLYELMAQNGLPGRAKIEEAVQAGHLPDIYALRVQALDGPVTAMDFARILLHLMQRRGFRSNRKADDAQKDGKLLQAIDANTRRMKENHYRTVGEMMYRDPVFAEHKRNKSENYLSTVRRDQIVEEAVQLFAAQRQYGAAWASQEMEAEYLTILTRQRSFDEGPGGNSPYGGNIVEKMVGTCTLEGQAEPRAAKATWSFEYFTLLQKINHIRIIESGAARILTAEERQELLSVCYQTDKLDFARIRKALALSEQARFNMVRYRDGQTTEDCEKKEKIVCLPCYHKMRKVLNTLRKDYIRSVSRDRLDAAATALTMYKNEATLRAKLEEAQFEPLEVDALMTLPSFSGFGHISVKACRKLIPYLEQGLNYSDACKEAGYDFQGNYRGEKSQFLPASTEEMEDITSPVVRRAVAQTIKVVNAIIREQGESPVNIHLELAREMSKNFQQRNDLDKAMKDNNAENERLMKDLHELFPGRNITGQDLVKYRLWKEQDGRCAYSLQPLELEKTITVSGYAEVDHIVPYSISFDDRRANKVLVLASENRQKGNRLPLQYLQGKRRDDFIVYTKASVKNYRKRQNLLKEKLSEEDSKGFMQRNLQDTQYIASFMLNYIRSHLAFADFPAAGKKRVVAVNGAVTAFLRKRWGLGKVRADGDLHHAVDAAVIACTTDGMIQRVSRFYTHIETSDTRGERFPEPWPRFRDELMQRLSACPQENLMQINPVYYQNVDIASIRPVFVSRMPRHKMTGAAHKETIKGRLDDAHTVQRRSITDLKLDKEGEIAGYFNPSSDTLLYNALKEQLTAFGGDGKKAFAEPFFKPRADGTPGAQVRKVKVYDKATSMVAVHEGKGVADNDTMVRIDVYFVPGDGYYWVPIYVADTVKPELPNKAVVQGKSYAEWKEMDEENFLFSLCQNDLIRIESKRTMKFKVQNSDSTLEKETQMNCSLAYFEGGNISTGVITVTTHDNAYIVGSLGFKTLQKVQKYQVDVLGNYTLVKKEKRQNFPAQRR

SEQ ID NO: 16224 - protein, 1074 aa, unidentified
  REGION 1..1074: note = Cas Enzyme sequence
MKHPYGIGLDIGIASVGWAVVALNENAEPYGLIRCGSRIFDKAEQPKTGDSLAAPRREARSARRRLRRRSLRKADLYELMEKNGLPGKAEIEQAVQEGHLPDVYALRVQALDGPVTARDFARILLHLMQRRGFRSNRKADDAQKDGKLLQAIDANTRRMEANRYRTVGEMMYRDPVFAEHKRNKAENYLSTVKRDQIIDEARLVFAAQRQYGATWASPEMEAEYLCILTRQRSFAEGPGKGSPYSGSNRVGTCTLEGKSEQRAAKAAFSFEYFTLLQKINHIRIAENGTSRTLTLAERQVLLSVCRQTDKLDFARIRKALALPEEARFNMVRYRGEQTAEACEKKEKITALPCYHKMRKALNTLRKDHIRNISREQLDAAGAALTNPENEDKLREALKQAEFEPLEIEALLTLPSFAGYGHISVKACRKLIPYLEQGMNYNDACQAAGYDFQGRQNGEKAQFLPASTEEMEDITSPVVRRAVAQTIKVVNAIIREQGESPVSIHLELAREMNKNFQQRSELDKAMRDNSAENERLMKELNELFPGRTVTGQDLVKYRLWKEQDGRCAYSIQPLELDKVITVSGYAEVDHIVPYSISFDDRRTNKVLVLASENRQKGNRLPLQYLQGKRRDDFIVYTKANVKNFRKRQNLLKERLSEEDGKGYIQRNLQDTQYIAAFMLNYIRNHLAFADCSGAGKRRVVAVNGAVTAFLRKRWGLSKVRADGDLHHAVDAAVIACTTQGMIKRVSDFCKRAETTAVRNEHFPEPWPRFRDELTQRLSACPQENLMQINPVYYVTVDISSIQPVFVSRMPRHKVTGAAHEETIRSQVNEQYTAVRKSITELSLDKDGKIKDYFNPSSDTLLYEALKKRLTEFGGNAKKAFAEPFYKPRADGTPGAQVRKVKVVAKMNNTIPVRSGGGVAKGGNMIRIDVYYVPGDGYYWVPIYVADTVRPELPNKAVLRGKSMEDWKEMKEENFLFSLYDNDLILVEREEPINFSLVNGDSTLPNRFSVKKVLVYYKSGNISNAAIKVETHDGAYVFEGMTFGTVRKIQKYQVDVLGNYTPVKKEKRQTFPAQRR

SEQ ID NO: 16225 - protein, 1074 aa, unidentified
  REGION 1..1074: note = Cas Enzyme sequence
MKHPYGIGLDIGIASVGWAVVALNENAEPYGLIRCGSRIFDKAEQPKTGDSLAAPRREARSARRRLRRRSLRKADLYELMEKNGLPGKAEIEQAVQAGHLPDVYALRVQALDGPVTALDFARILLHLMQRRGFRSNRKADDAQKDGKLLQAIDANTRRMEANRYRTVGEMMYRDPVFAEHKRNKAENYLSTVKRDQIIDEARLVFAAQRQYGATWASPEMEAEYLCILTRQRSFAEGPGKGSPYSGSNRVGTCTLEGKSEQRAAKAAFSFEYFTLLQKINHIRIAENGTSRTLTPAERQVLLSVCCQTDKLDFARIRKALALPEEARFNMVRYRGEQTAEACEKKEKITALPCYHKMRKALNTLRKDHIRNISREQLDAAGAALTNPENEDKLREALKQAEFEPLEIEALLTLPSFAGYGHISVKACRKLIPYLEQGMNYNDACQAAGYDFQGRQNGEKAQFLPASTEEMEDITSPVVRRAVAQTIKVVNAIIREQGESPVSIHLELAREMNKNFQQRSELDKAMRDNSAENERLMKELNELFPGRTVTGQDLVKYRLWKEQDGRCAYSIQPLELDKVITVSGYAEVDHIVPYSISFDDRRTNKVLVLASENRQKGNRLPLQYLQGKRRDDFIVYTKANVKNFRKRQNLLKERLSEEDGKGYIQRNLQDTQYIAAFMLNYIRNHLAFADCSGAGKRRVVAVNGAVTAFLRKRWGLSKVRADGDLHHAVDAAVIACTTQGMIKRVSDFCKRAETTAVRNEHFPEPWPRFRDELTQRLSACPQENLMQINPVYYATVDISSIQPVFVSRMPRHKVTGAAHKETIKSRLDDTHVVQRRNITELKLDKDGEIAGYFNRSSDTLLYNALKARLLAFGGDGKKAFAEPFYKPRADGTPGARVQKVKICDKVTSTVPVHGGKGVADNDTMVRIDVYYVPGDGYYWIPVYVADTVKPELPSKAVVAYKSSAEWKEMKDEDFLFSLCQHDLVRIESKRLMKFKVQHRDSTLEKEMPVNKILAYFEGGDIATGAVTLTTHDDAYIATGLGFKTLQKVQKYQVDVLGNYTPVKKEKRQTFPAQRR

SEQ ID NO: 16226 - protein, 1074 aa, unidentified
  REGION 1..1074: note = Cas Enzyme sequence
MKHPYGIGLDIGIASVGWAVVALNENAEPYGLIRCGSRIFDKAEEPQTGDSLAAPRRKARSARRRLRRRSLRKADLYELMEKNGLPGKAEIEQAVQAGHLPDVYALRVQALDGPVTALDFARILLHLMQRRGFRSNRKADDAQKDGKLLQAIDANTRRMEANLYRTVGEMMYRDPVFAEHKRNKAENYLSTVKRDQIIDEARLVFAAQRQYGATWASPEMEAEYLCILTRQRSFAEGPGKGSPYSGSNRVGTCTLEGKSEKRAAKAAFSFEYFTLLQKINHIRIAENGTSRTLTPAERQVLLSVCCQTDKLDFARVRKALALPEEARFNMVRYRGEQTAEACEKKEKITALPCYHKMRKALNTLRKDHIRNISREQLDAAGAALTNPENEDKLREALKQAEFEPLEIEALLTLPSFAGYGHISVKACRKLIPYLEQGMNYNDACQAAGYDFQGRQNGEKAQFLPASTEEMEDITSPVVRRAVAQTIKVVNAIIREQGESPVSIHLELAREMNKNFQQRSELDKAMQDNSAENERLMKELNELFPGRTVTGQDLVKYRLWKEQDGRCAYSIQPLELDKVITVSGYAEVDHIVPYSISFDDRRTNKVLVLASENRQKGNRLPLQYLQGKRRDDFIVYTKANVKNFRKRQNLLKERLSEEDGKGYIQRNLQDTQYIAAFMLNYIRNHLAFADCSGAGKRRVIAVNGAVTAFLRKRWGLSKVRADCDLHHAVDAAVIACTTQGMIKRVSDFCKRAETTAVRNEHFPEPWPRFRDELTQRLSACPQEDLMKINPVYYATVDISSIQPVFVSRMPRHKVTGAAHEETIRSQVNEKYTAVRKSITELSLDKDGKIKDYFKPSSDTLLYEALKKRLTEFGGNAKKAFAEPFYKPRADGTPGAQVRKVKVVAKMSNTIPVRSGGGVAKGGDMIRIDVYYVPGDGYYWVPIYVADTVKETLPNKAVVRDKTMEEWKEMKEDDFLFSLYSNDLILVERDKPICFSLMHEDSTLPKKYETKKELVYYKGGDISNGGIRIETHEGAYFLKSLTFGIVQKVQKYQVDVLGNYTPVKKEKRQTFPAQRR

SEQ ID NO: 16227 - protein, 913 aa, unidentified
  REGION 1..913: note = Cas Enzyme sequence
YSGSKRNKGGKYLATVGRDMVEEEVRAIFKAQREQGQAFAAAELEEQYLEILLSQRSFDEGPGEGSPYRGSQIEKMIGKCTLEAGEPRAAKASYSFEYFTLLQNINHLRLICGGESRPLSDAQRKFLIALAHKTKDLNFSRIRKELDIPADTTFNAVSYKSADGYEDAEKKAKFCYLKAYHQMKAAFNKLSNGHFDSLARQQKNELGRVLSTYKTSANIRPRLAAAGLSEMEIDIAETMSFSKFGHISVKACDKLIPFLEKGLKYNDACAAAGYDFKGHDSEARTRLLHPTEDDFADVTSPVVRRAISQTVKVLNAIIRERGNSPTFINIELAREMARDFTERSKMKKDMDENRARNERIMERIRTEYGKEHPTGQDLVKFKLREEQHGECAYSQKHLSLEHLFDPDYAEVDHIIPYSISFDDGYKNKVLVLAEENRNKGNRLPLQYLQGERRDDFIVWVENSIHDYRKKQRLLKETITAEDEKGFKERNLQDTKTMSRFLLNYISDHLEFSDFSTGRKKHVTAVNGAITSYLRKRWGIAKIRENGDLHHAVDALVVACTTDGMIQQLSRYSTLRECEYVQTEAGSIAVSMHTGEVLKRFPYPWPEFRRELEARLGDDPRRAVISQRFPVYANGDIPVRKLFVSRMPRRKVTGAAHKETIKSPKALNDGVVVVKRALTSLKLDPKTGEISNYYMPQSDRLLYEALKEALKKHGGDAAKAFAAPFHKPKSDGTPGPVVNKVKLCEPTTLNVAVLNGAGVADNDSMVRIDVFHVENDGYYFVPIYIADTLKKELPNKACTRGKPYAEWKEMDAEDFLFSLYPNDLIRVTSQKGLTLSKAQKESTLPDTYETKQEMLYYTSASINTAAVACRTHDNSYEIKSMGIKTLEKLEKFTVDVLGEYHKVEKEPRMAFCRK

SEQ ID NO: 16228 - protein, 1146 aa, unidentified
  REGION 1..1146: note = Cas Enzyme sequence
METKYNYRIGLDIGIASVGWAVLENNSKDEPVHIMDLGVRIFDPAEDQQTGDSLAAPRRNARSMRRRLRRRRHRLERIKQLLEREGLIQIEQFMKRYESKDLPDVYQLRYEALNRRLTDDELAQVLIHIAKHRGFKSNRKAELKEDAEAGKVLNATKENRERMQAGNYRTIGEMIYCDEAFRTSCDWVEKGYILTPRNKADSYKHTVERALLVEEVKKIFEAQRTFGNPKATEELEKSYLSIMESQRSFDMGPGLQADGTESPYALNGFEDKVGYCTLEGKPEKRGAKATYTAELFVVSQKLSHLKLIKRGGEGRFLTKEEKAIVLELLHTQKEVKYSAIRKKLAIPVEYHFNALTYTSKKADISQEEREKEVEKVVFGKLENYHKMMSCLNEETKQKPVDELQELLDSIATILTLYKSDDKRRECLNALPLSTEEIENLLELTFAKFMNLSVKAMRKLLPYLQGGEGMTYDKACTAAGYDFKAEGEEHKSKLLKGEQVTEIINEIPNPVVKRSVSQTVKVINAIIQKYGSPQAVYIELAREMSRNFKDRKDIEKKNKAREADNEKAKKQIQEYGILSPTGQDIIKFRLWQEQDGICMYSGKRMSIENLFGKNSSCDIDHILPYSQTFDDSYRNKVLVLSSENRQKGNRTPYEYMGQDEERWSEFVARVSSMVKDGKKRDRFFKEHITDEDKKQFKERNLNDTKYITTIVYNLIRQNLEFAPYNVPALKEGKKKHVKAVNGAITAYLRKRWGLPHKDRSTDTHHAMDAVTIACCTEGMIQKISRSMQILELRYMHNGRMFDEETGEIYDRENYTLQEWKDKFGVHIPRPWEEFKNELDVRMGEDPLNFLDIHPDVAKALDYPEYYYPDSASNWKGFIHPIFVSRMPNHKVTGQANKDTVRSPRLFKEGYVISKVPLTSLKLKDDEIVNYYNKESDMLLYNALKRQLQLYSNDAEKAFAQPFHKPKADGTQGPVVKKVKVIDKQSSGVYVHEGKGITANGDMIRIDIFRENGKYYFVPIYAADVVKKVLPNKSPSRGKSGWIEMKDENFVFSLYPKDLIHVKTKKEDGLKLNLVNGGQIKAQEAVVYYTGADVSKGSIDCSASDKKFKLRGLGIQSLIIFEKCQVDVLGNISVVKHEKRMDFSAKKR

SEQ ID NO: 16229 - protein, 1128 aa, unidentified
  REGION 1..1128: note = Cas Enzyme sequence
MDEKMDYRIGLDIGIASVGWAVLQNNSDDEPVRIVDLGVRIFDTAEIPKTGESLAGPRRAARTTRRRLRRRKHRLDRIKWLFENQGLINIDDFLKRYNMAGLPDVYQLRYEALDRKLTDEELAQVLLHIAKHRGFRSTRKAETAAKENGAVLKATDENQKRMQEKGYRTVGEMIYLDEAFRTGCSWSEKGYILTPRNKAENYQHTMLRAMLVEEVKEIFSSQRRLGNEKATEELEEKYLEIMTSQRSFDLGPGMQPDGKPSPYAMEGFSDRVGKCTFLGDQGELRGAKGTYTAEYFVALQKINHTKLVNQDGETRNFTEEERRALTLLLFTQKEVKYAAVRKKLGLPEDILFYNLNYKKAATKEEQQKENQNTEKAKFIGMPYYHDYKKCLEERVKYLTENEVRDLFDEIGTILTCYKNDDSRTERLAKLGLVPIEMEGLLAYTPTKFQHLSMKAMRNIIPFLEKGMTYDKACEEAGYDFKADSKGIKQKLLTGEKVNQTINEITNPVVKRSVSQTVKVINAIIRTYGSPQAINIELAREMSKTFEERRKIKGDMEKRQKNNEDVKKQIQELGKLSPTGQDILKYRLWQEQQGICMYSGKTIPLEELFKPGYDIDHILPYSITFDDSFRNKVLVTSQENRQKGNRTPYEYMGNDEQRWNEFETRVKTTIRDYKKQQKLLKKHFSEEERSEFKERNLTDTKYITTVIYNMIRQNLEMAPLNRPEKKKQVRAVNGAITAYLRKRWGLPQKNRETDTHHAMDAVVIACCTDGMIQKISRYTKVRERCYSKGTEFVDAETGEIFRPEDYSRAEWDEIFGVHIPKPWETFRAELDVRMGDDPKGFLDTHSDVALELDYPEYIYENLRPIFVSRMPNHKVTGAAHADTIRSPRHFKDEGIVLTKTALTDLKLDKDGEIDGYYNPQSDLLLYEALKKQLLLYGNDAKKAFAQDFHKPKADGTEGPVVRKVKIQKKQTMGVFVDSGNGIAENGGMVRIDVFHVNGKYYFVPVYTADVVKKVLPNRAATAHKPYGEWKVMEDKDFLFSLYSRDLIHIKSKKDIPIKMVNGGMEGIKETYAYYIGADISAANIQGIAHDSRYKFRGLGIQSLDVLEKCQIDVLGHVSVVRSEKRMGFS

SEQ ID NO: 16230 - protein, 1128 aa, unidentified
  REGION 1..1128: note = Cas Enzyme sequence
MDEKMDYRIGLDIGIASVGWAVLQNNSDDEPVRIVDLGVRIFDTAEIPKTGESLAGPRRAARTTRRRLRRRKHRLDRIKWLFENQGLINIDDFLKRYNMAGLPDVYQLRYEALDRKLTDEELAQVLLHIAKHRGFRSTRKAETAAKENGAVLKATDENQKRMQEKGYRTVGEMIYLDEAFRIGCSWSEKGYILTPRNKAENYQHTMLRAMLVEEVKEIFSSQRRLGNEKATEELEEKYLEIMTSQRSFDLGPGMQPDGKPSPYAMEGFSDRVGKCTFLGDQGELRGAKGTYTAEYFVALQKINHTKLVNQDGETRNFTEEERRALTLLLFTQKEVKYAAVRKKLGLPEDILFYNLNYKKAATKEEQQKENQNTEKAKFIGMPYYHDYKKCLEERVKYLTENEVRDLFDEIGMILTCYKNDDSRTERLAKLGLVPIEMEGLLAYTPTKFQHLSMKAMRNIIPFLEKGMTYDKACEEAGYDFKADSKGTKQKLLTGENVNQTINEITNPVVKRSVSQTVKVINAIIRTYGSPQAINIELAREMSKTFEERRKIKGDMEKRQKNNEDVKKQIQELGKLSPTGQDILKYRLWQEQQGICMYSGKTIPLEELFKPGYDIDHILPYSITFDDSFRNKVLVTSQENRQKGNRTPYEYMGNDEQRWNEFETRVKTTIRDYKKQQKLLKKHFSEEERSEFKERNLTDTKYITTVIYNMIRQNLEMAPLNRPEKKKQVRAVNGAITAYLRKRWGLPQKNRETDTHHAMDAVVIACCTDGMIQKISRYTKVRERCYSKGTEFVDAETGEIFRPEDYSRAEWDEIFGVHIPKPWETFRAELDVRMGDDPKGFLDTHSDVALELDYPEYIYENLRPIFVSRMPNHKVTGAAHADTIRSPRHFKDEGIVLTKTALTDLKLDKDGEIDGYYNPQSDLLLYEALKKQLLLYGNDAKKAFAQDFHKPKADGTEGPVVRKVKIQKKQTMGVFVDSGNGIAENGGMVRIDVYRVNGKYYFVPVYTADVVKKVLPNRAATAHKPYGEWKVMEDKDFLFSLYSRDLIHIKSKKDIPIKMVNGGMEGIKETYAYYIGADISAANIQGIAHDSRYKFRGLGIQSLDVLEKCQIDVLGHVSVVRSEKRMGFS

SEQ ID NO: 16231 - protein, 1128 aa, unidentified
  REGION 1..1128: note = Cas Enzyme sequence
MDEKMDYRIGLDIGIASVGWAVLQNNSDDEPVRIVDLGVRIFDTAEIPKTGESLAGPRRAARTTRRRLRRRKHRLDRIKWLFENQGLINIDDFLKRYNMAGLPDVYQLRYEALDRKLTDEELAQVLLHIAKHRGFRSTRKAETAAKENGAVLKATDENQKRMQEKGYRTVGEMIYLDEAFRIGCSWSEKGYILTPRNKAENYQHTMLRAMLVEEVKEIFSSQRRLGNEKATEELEEKYLEIMTSQRSFDLGPGMQPDGKPSPYAMEGFSDRVGKCTFLGDQGELRGAKGTYTAEYFVALQKINHTKLVNQDGETRNFTEEERRALTLLLFTQKEVKYAAVRKKLGLPEDILFYNLNYKKAATKEEQQKENQNTEKAKFIGMPYYHDYKKCLEERVKYLTENEVRDLFDEIGMILTCYKNDDSRTERLAKLGLVPIEMEGLLAYTPTKFQHLSMKAMRNIIPFLEKGMTYDKACEEAGYDFKADSKGTKQKLLTGENVNQTINEITNPVVKRSVSQTVKVINAIIRTYGSPQAINIELAREMSKTFEERRKIKGDMEKRQKNNEDVKKQIQELGKLSPTGQDILKYRLWQEQQGICMYSGKTIPLEELFKPGYDIDHILPYSITFDDSFRNKVLVTSQENRQKGNRTPYEYMGNDEQRWNEFETRVKTTIRDYKKQQKLLKKHFSEEERSEFKERNLTDTKYITTVIYNMIRQNLEMAPLNRPEKKKQVRAVNGAITAYLRKRWGLPQKNRETDTHHAMDAVVIACCTDGMIQKISRYTKVRERCYSKGTEFVDAETGEIFRPEDYSRAEWDEIFGVHIPKPWELFRTELDVRMGDDPKGFLDTHSDVALELDYPEYDYENLRPIFVSRMPNHKVTGAAHADTIRSPRHFKDEGIVLTKTALTDLKLDKDGEIDGYYNPQSDLLLYEALKKQLLLYGNDAKKAFAQDFHKPKADGTEGPVVRKVKIQKKQTMGVFVDSGNGIAENGGMVRIDVFHVNGKYYFVPVYTADVVKKVLPNRAATAHKPYGEWKVMEDKDFLFSLYSRDLIHIKSKKDIPIKMVNGGMEGIKETYAYYIGADISAANIQGIAHDSRYKFRGLGIQSLDVLEKCQIDVLGHVSVVRSEKRMGFS

SEQ ID NO: 16232 - protein, 1128 aa, unidentified
  REGION 1..1128: note = Cas Enzyme sequence
MDEKMDYRIGLDIGIASVGWAVLQNNSDDEPVRIVDLGVRIFDTAEIPKTGESLAGPRRAARTTRRRLRRRKHRLDRIKWLFENQGLINIDDFLKRYNMAGLPDVYQLRYEALDRKLTDEELAQVLLHIAKHRGFRSTRKAETAAKENGAVLKATDENQKRMQEKGYRTVGEMIYLDEAFRTGCSWSEKGYILTPRNKAENYQHTMLRAMLVEEVKEIFSSQRRLGNEKATEELEEKYLEIMTSQRSFDLGPGMQPDGKPSPYAMEGFSDRVGKCTFLGDQGELRGAKGTYTAEYFVALQKINHTKLVNQDGETRNFTEEERRALTLLLFTQKEVKYAAVRKKLGLPEDILFYNLNYKKAATKEEQQKENQNTEKAKFIGMPYYHDYKKCLEERVKYLTENEVRDLFDEIGMILTCYKNDDSRTERLAKLGLVPIEMEGLLAYTPTKFQHLSMKAMRNIIPFLEKGMTYDKACEEAGYDFKADSKGIKQKLLTGEKVNQTINEITNPVVKRSVSQTVKVINAIIRTYGSPQAINIELAREMSKTFEERRKIKGDMEKRQKNNEDVKKQIQELGKLSPTGQDILKYRLWQEQQGICMYSGKTIPLEELFKPGYDIDHILPYSITFDDSFRNKVLVTSQENRQKGNRTPYEYMGNDEQRWNEFETRVKTTIRDYKKQQKLLKKHFSEEERSEFKERNLTDTKYITTVIYNMIRQNLEIAPLNRPEKKKQVRAVNGAITAYLRKRWGLPQKNRETDTHHAMDAVVIACCTDGMIQKISRYTKVRERCYSKGTEFVDAETGEIFRPEDYSRAEWDEIFGVHIPKPWETFRAELDVRMGDDPKGFLDTHSDVALELDYPEYIYENLRPIFVSRMPNHKVTGAAHADTIRSPRHFKDEGIVLTKTALTDLKLDKDGEIDGYYNPQSDLLLYEALKKQLLLYGNDAKKAFAQDFHKPKADGTEGPVVRKVKIQKKQTMGVFVDSGNGIAENGGMVRIDVYHVNGKYYFVPVYTADVVKKVLPDRASTANKPYSEWRTMEDKDFLFSLYSRDLVHIKSKKGIPIKNVDGSLGESKEVYAYYIGADISGAKIEGKAHDSRYTFRGIGVQKLELIEKCQVDILGHISTVKNEKRMGFS

SEQ ID NO: 16233 - protein, 1128 aa, unidentified
  REGION 1..1128: note = Cas Enzyme sequence
MDEKMDYRIGLDIGIASVGWAVLQNNSDDEPVRIVDLGVRIFDTAEIPKTGESLAGPRRAARTTRRRLRRRKHRLDRIKWLFENQGLINIDDFLKRYNMAGLPDVYQLRYEALDRKLTDEELAQVLLHIAKHRGFRSTRKAETAAKENGAVLKATDENQKRMQEKGYRTVGEMIYLDEAFRTGCSWSEKGYILTPRNKAENYQHTMLRAMLVEEVKEIFSSQRRLGNEKATEELEEKYLEIMTSQRSFDLGPGMQPDGKPSPYAMEGFSDRVGKCTFLGDQGELCGAKGTYTAEYFVALQKINHTKLVNQDGETRNFTEEERRALTLLLFTQKEVKYAAVRKKLGLPEDILFYNLNYKKAATKEEQQKENQNTEKAKFIGMPYYHDYKKCLEERVKYLTENEVRDLFDEIGTILTCYKNDDSRTERLAKLGLVPIEMEGLLAYTPTKFQHLSMKAMRNIIPFLEKGMTYDKACEEAGYDFKADSKGIKQKLLTGEKVNQTINEITNPVVKRSVSQTVKVINAIIRTYGSPQAINIELAREMSKTFEERRKIKGDMEKRQKNNEDVKKQIQELGKLSPTGQDILKYRLWQEQQGICMYSGKTIPLEELFKPGYDIDHILPYSITFDDSFRNKVLVTSQENRQKGNRTPYEYMGNDEQRWNEFETRVKTTIRDYKKQQKLLKKHFSEEERSEFKERNLTDTKYITTVIYNMIRQNLEMAPLNRPEKKKQVRAVNGAITAYLRKRWGLPQKNRETDTHHAMDAVVIACCTDGMIQKISRYTKVRERCYSKGTEFVDAETGEIFRPEDYSRAEWDEIFGVHIPKPWETFRAELDVRMGDDPKGFLDTHSDVALELDYPEYIYENLRPIFVSRMPNHKVTGAAHADTIRSPRHFKDEGIVLTKTALTDLKLDKDGEIDGYYNPQSDLLLYEALKKQLLLYGNDAKKAFAQDFHKPKADGTEGPVVRKVKIQKKQTMGVFVDSGNGIAENGGMVRIGVYRVNGKYYFVPVYTADVVKKVLPDRASTANKPYSEWRTMEDKDFLFSLYSRDLVHIKSKKGIPIKNVDGSLGESKEVYAYYIGADISGAKIEGKAHDSRYTFRGIGVQKLELIEKCQVDILGHISTVKNEKRMGFS

SEQ ID NO: 16234 - protein, 1128 aa, unidentified
  REGION 1..1128: note = Cas Enzyme sequence
MDEKMDYRIGLDIGIASVGWAVLQNNSDDEPVRIVDLGVRIFDTAEIPKTGESLAGPRRAARTTRRRLRRRKHRLDRIKWLFENQGLINIDDFLKRYNMAGLPDVYQLRYEALDRKLTDEELAQVLLHIAKHRGFRSTRKAETAAKENGAVLKATDENQKRMQEKGYRTVGEMIYLDEAFRTGCSWSEKGYILTPRNKAENYQHTMLRAMLVEEVKEIFSSQRRLGNEKATEELEEKYLEIMTSQRSFDLGPGMQPDGKPSPYAMEGFSDRVGKCTFLGDQGELRGAKGTYTAEYFVALQKINHTKLVNQDGETRNFTEEERRALTLLLFTQKEVKYAAVRKKLGLPEDILFYNLNYKKAATKEEQQKENQNTEKAKFIGMPYYHDYKKCLEERVKYLTENEVRDLFDEIGMILTCYKNDDSRTERLAKLGLVPIEMEGLLAYTPTKFQHLSMKAMRNIIPFLEKGMTYDKACEEAGYDFKADSKGIKQKLLTGEKVNQTINEITNPVVKRSVSQTVKVINAIIRTYGSPQAINIELAREMSKTFEERRKIKGDMEKRQKNNEDVKKQIQELGKLSPTGQDILKYRLWQEQQGICMYSGKTIPLEELFKPGYDIDHILPYSITFDDSFRNKVLVTSQENRQKGNRTPYEYMGNDEQRWNEFETRVKTTIRDYKKQQKLLKKHFSEEERSEFKERNLTDTKYITTVIYNMIRQNLEMAPLNRPEKKKQVRAVNGAITAYLRKRWGLPQKNRETDTHHAMDAVVIACCTDGMIQKISRYTKVRERCYSKGTEFVDAETGEIFRPEDYSRAEWDEIFGVHIPKPWETFRAELDVRMGDDPKGFLDTHSDVALELDYPEYIYENLRPIFVSRMPNHKVTGAAHADTIRSPRHFKDEGIVLTKTALTDLKLDKHGEIDGYYNPQSDLLLYEALKKQLLLYGNDAKKAFAQDFHKPKADGTEGPVVRKVKIQKKQTMGVFVDSGNGIAENGGMVRIDVFRVNGKYYFVPVYTADVVKKVLPNRAATAHKPYGEWKVMEDKDFLFSLYSRDLIHIKSKKDIPIKMVNGGMEGIKETYAYYIGADISAANIQGIAHDSRYKFRGLGIQSLDVLEKCQIDVLGHVSVVRSEKRMGFS

SEQ ID NO: 16235 - protein, 1128 aa, unidentified
  REGION 1..1128: note = Cas Enzyme sequence
MDEKMDYRIGLDIGIASVGWAVLQNNSDDEPVRIVDLGVRIFDTAEIPKTGESLAGPRRAARTTRRRLRRRKHRLDRIKWLFENQGLINIDDFLKRYNMAGLPDVYQLRYEALDRKLTDEELAQVLLHIAKHRGFRSTRKAETAAKENGAVLKATDENQKRMQEKGYRTVGEMIYLDEAFRTGCSWSEKGYILTPRNKAENYQHTMLRAMLVEEVKEIFSSQRRLGNEKATEELEEKYLEIMTSQRSFDLGPGMQPDGKPSPYAMEGFSDRVGKCTFLGDQGELRGAKGTYTAEYFVALQKINHTKLVNQDGETRNFTEEERRALTLLLFTQKEVKYAAVRKKLGLPEDILFYNLNYKKAATKEEQQKENQNTEKAKFIGMPYYHDYKKCLEERVKYLTENEVRDLFDEIGMILTCYKNDDSRTERLAKLGLVPIEMEGLLAYTPTKFQHLSMKAMRNIIPFLEKGMTYDKACEEAGYDFKADSKGIKQKLLTGEKVNQTINEITNPVVKRSVSQTVKVINAIIRTYGSPQAINIELAREMSKTFEERRKIKGDMEKRQKNNEDVKKQIQELGKLSPTGQDILKYRLWQEQQGICMYSGKTIPLEELFKPGYDIDHILPYSITFDDSFRNKVLVTSQENRQKGNRTPYEYMGNDEQRWNEFETRVKTTIRDYKKQQKLLKKHFSEEERSEFKERNLTDTKYITTVIYNMIRQNLEMAPLNRPEKKKQVRAVNGAITAYLRKRWGLPQKNRETDTHHAMDAVVIACCTDGMIQKISRYTKVRERCYSKGTEFVDAETGEIFRPEDYSRAEWDEIFGVHIPKPWETFRAELDVRMGDDPKGFLDTHSDVALELDYPEYIYENLRPIFVSRMPNHKVTGAAHADTIRSPRHFKDEGIVLTKTALTDLKLDKHGEIDGYYNPQSDLLLYEALKKQLLLYGNDAKKAFAQDFHKPKADGTEGPVVRKVKIQKKQTMGVFVDSGNGIAEDGGMVRIDVYRVNGKYYFVPVYTADVVKKVLPDRASTANKPYSEWRTMEDKDFLFSLYSRDLVHIKSKKGIPIKNVDGSLGESKEVYAYYIGADISGAKIEGKAHDSRYTFRGIGVQKLELIEKCQVDILGHISTVKNEKRMGFS

SEQ ID NO: 16236 - protein, 1128 aa, unidentified
  REGION 1..1128: note = Cas Enzyme sequence
MDEKMDYRIGLDIGIASVGWAVLQNNSDDEPVRIVDLGVRIFDTAEIPKTGESLAGPRRAARTTRRRLRRRKHRLDRIKWLFENQGLINIDDFLKRYNMAGLPDVYQLRYEALDRKLTDEELAQVLLHIAKHRGFRSTRKAETAAKENGAVLKATDENQKRMQEKGYRTVGEMIYLDEAFRTGCSWSEKGYILTPRNKAENYQHTMLRAMLVEEVKEIFSSQRRLGNEKATEELEEKYLEIMTSQRSFDLGPGMQPDGKPSPYAMEGFSDRVGKCTFLGDQGELRGAKGTYTAEYFVALQKINHTKLVNQDGETRNFTEEERRALTLLLFTQKEVKYAAVRKKLGLPEDILFYNLNYKKAATKEEQQKENQNTEKAKFIGMPYYHDYKKCLEERVKYLTENEVRDLFDEIGMILTCYKNDDSRTERLAKLGLVPIEMEGLLAYTPTKFQHLSMKAMRNIIPFLEKGMTYDKACEEAGYDFKADSKGIKQKLLTGEKVNQTINEITNPVVKRSVSQTVKVINAIIRTYGSPQAINIELAREMSKTFEERRKIKGDMEKRQKNNEDVKKQIQELGKLSPTGQDILKYRLWQEQQGICMYSGKTIPLEELFKPGYDIDHILPYSITFDDSFRNKVLVTSQENRQKGNRTPYEYMGNDEQRWNEFETRVKTTIRDYKKQQKLLKKHFSEEERSEFKERNLTDTKYITTVIYNMIRQNLEMAPLNRPEKKKQVRAVNGAITAYLRKRWGLPQKNRETDTHHAMDAVVIACCTDGMIQKISRYTKVRERCYSKGTEFVDAETGEIFRPEDYSRAEWDEIFGVHIPKPWETFRAELDVRMGDDPKGFLDTHSDVALELDYPEYIYENLRPIFVSRMPNHKVTGAAHADTIRSPRHFKDEGIVLTKTALTDLKLDKHGEIDGYYNPQSDLLLYEALKKQLLLYGNDAKKAFAQDFHKPKADGTEGPVVRKVKIQKKQTMGVFVDSGNGIAENGGMVRIDVYRVNGKYYFVPVYTADVVKKVLPDRASTANKPYSEWRTMEDKDFLFSLYSRDLVHIKSKKGIPIKNVDGSLGESKEVYAYYIGADISGAKIEGKAHDSRYTFRGIGVQKLELIEKCQVDILGHISTVKNEKRMGFS

SEQ ID NO: 16237 - protein, 1128 aa, unidentified
  REGION 1..1128: note = Cas Enzyme sequence
MDEKMDYRIGLDIGIASVGWAVLQNNSDDEPVRIVDLGVRIFDTAEIPKTGESLAGPRRAARTTRRRLRRRKHRLDRIKWLFENQGLINIDDFLKRYNMAGLPDVYQLRYEALDRKLTDEELAQVLLHIAKHRGFRSTRKAETAAKENGAVLKATDENQKRMQEKGYRTVGEMIYLDEAFRIGCSWSEKGYILTPRNKAENYQHTMLRAMLVEEVKEIFSSQRRLGNKKATEELEEKYLEIMTSQRSFDLGPGMQPDGKPSPYAMEGFSDRVGKCTFLGDQGELRGAKGTYTAEYFVALQKINHTKLVNQDGETRNFTEEERRALTLLLFTQKEVKYAAVRKKLGLPEDILFYNLNYKKAATKEEQQKENQNTEKAKFIGMPYYHDYKKCLEERVKYLTENEVRDLFDEIGMILTCYKNDDSRTERLAKLGLVPIEMEGLLAYTPTKFQHLSMKAMRNIIPFLEKGMTYDKACEEAGYDFKADSKGTKQKLLTGENVNQTINEITNPVVKRSVSQTVKVINAIIRTYGSPQAINIELAREMSKTFEERRKIKGDMEKRQKNNEDVKKQIQELGKLSPTGQDILKYRLWQEQQGICMYSGKTIPLEELFKPGYDIDHILPYSITFDDSFRNKVLVTSQENRQKGNRTPYEYMGNDEQRWNEFETRVKTTIRDYKKQQKLLKKHFSEEERSEFKERNLTDTKYITTVIYNMIRQNLEMAPLNRPEKKKQVRAVNGAITAYLRKRWGLPQKNRETDTHHAMDAVVIACCTDGMIQKISRYTKVRERCYSKGTEFVDAETGEIFRPEDYSRAEWDEIFGVHIPKPWETFRAELDVRMGDDPKGFLDTHSDVALELDYPEYIYENLRPIFVSRMPNHKVTGAAHADTIRSPRHFKDEGIVLTKTALTDLKLDKDGEIDGYYNPQSDLLLYEALKKQLLLYGNDAKKAFAQDFHKPKADGTEGPVVRKVKIQKKQTMGVFVDSGNGIAENGGMVRIDVFRVNGKYYFVPVYTADVVKKVLPNRASTANKPYSEWRTMEDKDFLFSLYSRDLVHIKSKKGIPIKNVDGSLGESKEVYAYYIGADISGAKIEGKAHDSRYTFRGIGVQKLELIEKCQVDILGHISTVKNEKRMGFS

SEQ ID NO: 16238 - protein, 1128 aa, unidentified
  REGION 1..1128: note = Cas Enzyme sequence
MDEKMDYRIGLDIGIASVGWAVLQNNSDDEPVRIVDLGVRIFDTAEIPKTGESLAGPRRAARTTRRRLRRRKHRLDRIKWLFENQGLINIDDFLKRYNMAGLPDVYQLRYEALDRKLTDEELAQVLLHIAKHRGFRSTRKAETAAKENGAVLKATDENQKRMQEKGYRTVGEMIYLDEAFRTGCSWSEKGYILTPRNKAENYQHTMLRAMLVEEVKEIFSSQRRLGNEKATEELEEKYLEIMTSQRSFDLGPGMQPDGKPSPYAMEGFSDRVGKCTFLGDQGELRGAKGTYTAEYFVALQKINHTKLVNQDGETRNFTEEERRALTLLLFTQKEVKYAAVRKKLGLPEDILFYNLNYKKAATKEEQQKENQNTEKAKFIGMPYYHDYKKCLEERVKYLTENEVRDLFDEIGTILTCYKNDDSRTERLAKLGLVPEDMEGLLAYTPTKFQHLSMKAMRNIIPFLEKGMTYDKACEEAGYDFKADSKGIKQKLLTGEKVNQTINEITNPVVKRSVSQTVKVINAIIRTYGSPQAINIELAREMSKTFEERRKIKGDMEKRQKNNEDVKKQIQELGKLSPTGQDILKYRLWQEQQGICMYSGKTIPLEELFKPGYDIDHILPYSITFDDSFRNKVLVTSQENRQKGNRTPYEYMGNDEQRWNEFETRVKTTIRDYKKQQKLLKKHFSEEERSEFKERNLTDTKYITTVIYNMIRQNLEMAPLNRPEKKKQVRAVNGAITAYLRKRWGLPQKNRETDTHHAMDAVVIACCTDGMIQKISRYTKVRERCYSKGTEFVDAETGEIYRPEDYSRAEWDEIFGVHIPKPWELFRTELDVRMGDDPKGFLDTHSDVALELDYPEYDYENLRPIFVSRMPNHKVTGAAHADTIRSPRHFKDEGIVLTKTALTDLKLDKDGEIDGYYNPQSDLLLYEALKKQLLLYGNDAKKAFAQDFHKPKADGTEGPVVRKVKIQKKQTMGVFVDSGNGIAENGGMVRIDVFHVNGKYYFVPVYTADVVKKVLPNRAATAHKPYGEWKVMEDKDFLFSLYSRDLIHIKSKKDIPIKMVNGGMEGIKETYAYYIGADISAANIQGIAHDSRYKFRGLGIQSLDVLEKCQIDVLGHVSVVRSEKRMGFS

SEQ ID NO: 16239 - protein, 1128 aa, unidentified
  REGION 1..1128: note = Cas Enzyme sequence
MDEKMDYRIGLDIGIASVGWAVLQNNSDDEPVRIVDLGVRIFDTAEIPKTGESLAGPRRAARTTRRRLRRRKHRLDRIKWLFENQGLINIDDFLKRYNMAGLPDVYQLRYEALDRKLTDEELAQVLLHIAKHRGFRSTRKAETAAKENGAVLKATDENQKRMQEKGYRTVGEMIYLDEAFRTGCSWSEKGYILTPRNKAENYQHTMLRAMLVEEVKEIFSSQRRLGNEKATEELEEKYLEIMTSQRSFDLGPGMQPDGKPSPYAMEGFSDRVGKCTFLGDQGELRGAKGTYTAEYFVALQKINHTKLVNQDGETRNFTEEERRALTLLLFTQKEVKYAAVRKKLGLPEDILFYNLNYKKAATKEEQQKENQNTEKAKFIGMPYYHDYKKCLEERVKYLTENEVRDLFDEIGMILTCYKNDDSRTERLAKLGLVPIEMEGLLAYTPTKFQHLSMKAMRNIIPFLEKGMTYDKACEEAGYDFKADSKGIKQKLLTGEKVNQTINEITNPVVKRSVSQTVKVINAIIRTYGSPQAINIELAREMSKTFEERRKIKGDMEKRQKNNEDVKKQIQELGKLSPTGQDILKYRLWQEQQGICMYSGKTIPLEELFKPGYDIDHILPYSITFDDSFRNKVLVTSQENRQKGNRTPYEYMGNDEQRWNEFETRVKTTIRDYKKQQKLLKKHFSEEERSEFKERNLTDTKYITTVIYNMIRQNLEMAPLNRPEKKKQVRAVNGAITAYLRKRWGLPQKNRETDTHHAMDAVVIACCTDGMIQKISRYTKVRERCYSKGTEFVDAETGEIFRPEDYSRAEWDEIFGVHIPKLWETFRAELDVRMGDDPKGFLDTHSDVALELDYPEYIYENLRPIFVSRMPNHKVTGAAHADTIRSPRHFKDEGIVLTKTALTDLKLDKHGEIDGYYNPQSDLLLYEALKKQLLLYGNDAKKAFAQDFHKPKADGTEGPVVRKVKIQKKQTMGVFVDSGNGIAENGGMVRIDVYRVNGKYYFVPVYTADVVKKVLPDRASTANKPYSEWRTMEDKDFLFSLYSRDLVHIKSKKGIPIKNVDGSLGESKEVYAYYIGADISGAKIEGKAHDSRYTFRGIGVQKLELIEKCQVDILGHISTVKNEKRMGFS

SEQ ID NO: 16240 - protein, 1128 aa, unidentified; identical to SEQ ID NO: 16232
  REGION 1..1128: note = Cas Enzyme sequence

SEQ ID NO: 16241 - protein, 1128 aa, unidentified
  REGION 1..1128: note = Cas Enzyme sequence
MDEKMDYRIGLDIGIASVGWAVLQNNSDDEPVRIVDLGVRIFDTAEIPKTGESLAGPRRAARTTRRRLRRRKHRLDRIKWLFENQGLINIDDFLKRYNMAGLPDVYQLRYEALDRKLTDEELAQVLLHIAKHRGFRSTRKAETAAKENGAVLKATDENQKRMQEKGYRTVGEMIYLDEAFRIGCSWSEKGYILTPRNKAENYQHTMLRAMLVEEVKEIFSSQRRLGNEKATEELEEKYLEIMTSQRSFDLGPGMQPDGKPSPYAMEGFSDRVGKCTFLGDQGELRGAKGTYTAEYFVALQKINHTKLVNQDGETRNFTEEERRALTLLLFTQKEVKYAAVRKKLGLPEDILFYNLNYKKAATKEEQQKENQNTEKAKFIGMPYYHDYKKCLEERVKYLTENEVRDLFDEIGMILTCYKNDDSRTERLAKLGLVPIEMEGLLAYTPTKFQHLSMKAMRNIIPFLEKGMTYDKACEEAGYDFKADSKGTKQKLLTGENVNQTINEITNPVVKRSVSQTVKVINAIIRTYGSPQAINIELAREMSKTFEERRKIKGDMEKRQKNNEDVKKQIQELGKLSPTGQDILKYRLWQEQQGICMYSGKTIPLEELFKPGYDIDHILPYSITFDDSFRNKVLVTSQENRQKGNRTPYEYMGNDEQRWNEFETRVKTTIRDYKKQQKLLKKHFSEEERSEFKERNLTDTKYITTVIYNMIRQNLEMAPLNRPEKKKQVRAVNGAITAYLRKRWGLPQKNRETDTHHAMDAVVIACCTDGMIQKISRYTKVRERCYSKGTEFVDAETGEIFRPEDYSRAEWDEIFGVHIPKPWETFRAELDVRMGDDPKGFLDTHSDVALELDYPEYIYENLRPIFVSRMPNHKVTGAAHADTIRSPRHFKDEGIVLTKTALTDLKLDKDGEIDGYYNPQSDLLLYEALKKQLLLYGNDAKKAFAQDFHKPKADGTEGPVVRKVKIQKKQTMGVFVDSGNGIAENGGMVRIDVFRVNGKYYFVPVYTADVVKKVLPNRAATAHKPYGEWKVMEDKDFLFSLYSRDLIHIKSKKDIPIKMVNGGMEGIKETYAYYIGADISAANIQGIAHDSRYKFRGLGIQSLDVLEKCQIDVLGHVSVVRSEKRMGFS

SEQ ID NO: 16242 - protein, 1128 aa, unidentified
  REGION 1..1128: note = Cas Enzyme sequence
MDEKMDYRIGLDIGIASVGWAVLQNNSDDEPVRIVDLGVRIFDTAEIPKTGESLAGPRRAARTTRRRLRRRKHRLDRIKWLFENQGLINIDDFLKRYNMAGLPDVYQLRYEALDRKLTDEELAQVLLHIAKHRGFRSTRKAETAAKENGAVLKATDENQKRMQEKGYRTVGEMIYLDEAFRTGCSWSEKGYILTPRNKAENYQHTMLRAMLVEEVKEIFSSQRRLGNEKATEELEEKYLEIMTSQRSFDLGPGMQPDGKPSPYAMEGFSDRVGKCTFLGDQGELRGAKGTYTAEYFVALQKINHTKLVNQDGETRNFTEEERRALTLLLFTQKEVKYAAVRKKLGLPEDILFYNLNYKKAATKEEQQKENQNTEKAKFIGMPYYHDYKKCLEERVKYLTENEVRDLFDEIGTILTCYKNDDSRTERLAKLGLVPIEMEGLLAYTPTKFQHLSMKAMQNIIPFLEKGMTYDKACEEAGYDFKADSKGIKQKLLTGEKVNQTINEITNPVVKRSVSQTVKVINAIIRTYGSPQAINIELAREMSKTFEERRKIKGDMEKRQKNNEDVKKQIQELGKLSPTGQDILKYRLWQEQQGICMYSGKTIPLEELFKPGYDIDHILPYSITFDDSFRNKVLVTSQENRQKGNRTPYEYMGNDEQRWNEFETRVKTTIRDYKKQQKLLKKHFSEEERSEFKERNLTDTKYITTVIYNMIRQNLEMAPLNRPEKKKQVRAVNGAITAYLRKRWGLPRKNRETDTHHAMDAVVIACCTDGMIKKISRYTKVRERCYSKGTEFVDAETGEIFRPEDYSRAEWDEIFGVHIPKPWETFRAELDVRMGDDPKGFLDTHSDVALELDYPEYIYENLRPIFVSRMPNHKVTGAAHADTIRSPRHFKDEGIVLTKTALTDLKLDKHGEIDGYYNPQSDLLLYEALKKQLLLYGNDAKKAFAQDFHKPKADGTEGPVVRKVKIQKKQTMGVFVDSGNGIAENGGMVRIDVFRVNGKYYFVPVYTADVVKKVLPDRASTANKPYSEWRTMEDKDFLFSLYSRDLVHIKSKKGIPIKNVDGSLGESKEVYAYYIGADISGAKIEGKAHDSRYTFRGIGVQKLELIEKCQVDILGHISTVKNEKRMGFS

SEQ ID NO: 16243 - protein, 1128 aa, unidentified
  REGION 1..1128: note = Cas Enzyme sequence
MDEKMDYRIGLDIGIASVGWAVLQNNSDDEPVRIVDLGVRIFDTAEIPKTGESLAGPRRAARTTRRRLRRRKHRLDRIKWLFENQGLINIDDFLKRYNMAGLPDVYQLRYEALDRKLTDEELAQVLLHIAKHRGFRSTRKAETAAKENGAVLKATDENQKRMQEKGYRTVGEMIYLDEAFRTGCSWSEKGYILTPRNKAENYQHTMLRAMLVEEVKEIFSSQRRLGNEKATEELEEKYLEIMTSQRSFDLGPGMQPDGKPSPYAMEGFSDRVGKCTFLGDQGELRGAKGTYTAEYFVALQKINHTKLVNQDGETRNFTEEERRALTLLLFTQKEVKYAAVRKKLGLPEDILFYNLNYKKAATKEEQQKENQNTEKAKFIGMPYYHDYKKCLEERVKYLTENEVRDLFDEIGTILTCYKNDDSRTERLAKLGLVPIEMEGLLAYTPTKFQHLSMKAMRNIIPFLEKGMTYDKACEEAGYDFKADSKGIKQKLLTGEKVNQTINEITNPVVKRSVSQTVKVINAIIRTYGSPQAINIELAREMSKTFEERRKIKGDMEKRQKNNEDVKKQIQELGKLSPTGQDILKYRLWQEQQGICMYSGKTIPLEELFKPGYDIDHILPYSITFDDSFRNKVLVTSQENRQKGNRTPYEYMGNDEQRWNEFETRVKTTIRDYKKQQKLLKKHFSEEERSEFKERNLTDTKYITTVIYNMIRQNLEMAPLNRPEKKKQVRAVNGAITAYLRKRWGLPQKNRETDTHHAMDAVVIACCTDGMIQKISRYTKVRERCYSKGTEFVDAETGEIFRPEDYSRAEWDEIFGVHIPKPWELFRTELDVRMGDDPKGFLDTHSDVALELDYPEYDYENLRPIFVSRMPNHKVTGAAHADTIRSPRHFKDEGIVLTKTALTDLKLDKDGEIDGYYNPQSDLLLYEALKKQLLLYGNDAKKAFAQDFHKPKADGTEGPVVRKVKIQKKQTMGVFVDSGNGIAENGGMVRIDVFHVNGKYYFVPVYTADVVKKVLPNRAATAHKPYGEWKVMEDKDFLFSLYSRDLIHIKSKKDIPIKMVNGGMEGIKETYAYYIGADISAANIQGIAHDSRYKFRGLGIQSLDVLEKCQIDVLGHVSVVRSEKRMGFS

SEQ ID NO: 16244 - protein, 1128 aa, unidentified
  REGION 1..1128: note = Cas Enzyme sequence
MDEKMDYRIGLDIGIASVGWAVLQNNSDDEPVRIVDLGVRIFDTAEIPKTGESLAGPRRAARTTRRRLRRRKHRLDRIKWLFENQGLINIDDFLKRYNMAGLPDVYQLRYEALDRKLTDEELAQVLLHIAKHRGFRSTRKAETAAKENGAVLKATDENQKRMQEKGYRTVGEMIYLDEAFRTGCSWSEKGYILTPRNKAENYQHTMLRAMLVEEVKEIFSSQRRLGNEKATEELEEKYLEIMTSQRSFDLGPGMQPDGKPSPYAMEGFSDRVGKCTFLGDQGELRGAKGTYTAEYFVALQKINHTKLVNQDGETRNFTEEERRALTLLLFTQKEVKYAAVRKKLGLPEDILFYNLNYKKAATKEEQQKENQNTEKAKFIGMPYYHDYKKCLEERVKYLTENEVRDLFDEIGTILTCYKNDDSRTERLAKLGLVPEDMEGLLAYTPTKFQHLSMKAMRNIIPFLEKGMTYDKACEEAGYDFKADSKGIKQKLLTGENVNQTINEITNPVVKRSVSQTVKVINAIIRTYGSPQAINIELAREMSKTFEERRKIKGDMEKRQKNNEDVKKQIQELGKLSPTGQDILKYRLWQEQQGICMYSGKTILLEELFKPGYDIDHILPYSITFDDSFRNKVLVTSQENRQKGNRTPYEYMGNDEQRWNEFETRVKTTIRDYKKQQKLLKKHFSEEERSEFKERNLTDTKYITTVIYNMIRQNLEMAPLNRPEKKKQVRAVNGAITAYLRKRWGLPQKNRETDTHHAMDAVVIACCTDGMIQKISRYTKVRERCYSKGTEFVDAETGEIFRPEDYSRAEWDEIFGVHIPKPWELFRTELDVRMGDDPKGFLDTHSDVALELDYPEYIYENLRPIFVSRMPNHKVTGAAHADTIRSPRHFKDEGIVLTKTALTDLKLDKHGEIDGYYNPQSDLLLYEALKKQLLLYGNDAKKAFAQDFHKPKADGTEGPVVRKVKIQKKQTMGVFVDSGNGIAENGGMVRIDVFRVNGKYYFVPVYTADVVKKVLPNRAATAHKPYGEWKVMEDKDFLFSLYSRDLIHIKSKKDIPIKMVNGGMEGIKETYAYYIGADISAANIQGIAHDSRYKFRGLGIQSLDVLEKCQIDVLGHVSVVRSEKRMGFS

SEQ ID NO: 16245 - protein, 1131 aa, unidentified
  REGION 1..1131: note = Cas Enzyme sequence
  REGION 321..324: note = misc_feature - Xaa can be any naturally occurring amino acid
MDEKMDYRIGLDIGIASVGWAVLQNNSDDEPVRIVDLGVRIFDTAEIPKTGESLAGPRRAARTTRRRLRRRKHRLDRIKWLFENQGLINIDDFLKRYNMAGLPDVYQLRYEALDRKLTDEELAQVLLHIAKHRGFRSTRKAETAAKENGAVLKATDENQKRMQEKGYRTVGEMIYLDEAFRTGCSWSEKGYILTPRNKAENYQHTMLRAMLVEEVKEIFSSQRRLGNEKATEELEEKYLEIMTSQRSFDLGPGMQPDGKPSPYAMEGFSDRVGKCTFLGDQGELRGAKGTYTAEYFVALQKINHTKLVNQDGETRNFTEEXXXXRRALTLLLFTQKEVKYAAVRKKLGLPEDILFYNLNYKKAATKEEQQKENQNTEKAKFIGMPYYHDYKKCLEERVKYLTENEVRDLFDEIGMILTCYKNDDSRTERLAKLGLVPIEMEGLLAYTPTKFQHLSMKAMRNIIPFLEKGMTYDKACEEAGYDFKADSKGIKQKLLTGEKVNQTINEITNPVVKRSVSQTVKVINAIIRTYGSPQAINIELAREMSKTFEERRKIKGDMEKRQKNNEDVKKQIQELGKLSPTGQDILKYRLWQEQQGICMYSGKTIPLEELFKPGYDIDHILPYSITFDDSFRNKVLVTSQENRQKGNRTPYEYMGNDEQRWNEFETRVKTTIRDYKKQQKLLKKHFSEEERSEFKERNLTDTKYITTVIYNMIRQNLEMAPLNRPEKKKQVRAVNGAITAYLRKRWGLPQKNRETDTHHAMDAVVIACCTDGMIQKISRYTKVRERCYSKGTEFVDAETGEIFRPEDYSRAEWDEIFGVHIPKPWETFRAELDVRMGDDPKGFLDTHSDVALELDYPEYIYENLRPIFVSRMPNHKVTGAAHADTIRSPRHFKDEGIVLTKTALTDLKLDKHGEIDGYYNPQSDLLLYEALKKQLLLYGNDAKKAFAQDFHKPKADGTEGPVVRKVKIQKKQTMGVFVDSGNGIAENGGMVRIDVYRVNGKYYFVPVYTADVVKKVLPDRASTANKPYSEWRTMEDKDFLFSLYSRDLVHIKSKKGIPIKNVDGSLGESKEVYAYYIGADISGAKIEGKAHDSRYTFRGIGVQKLELIEKCQVDILGHISTVKNEKRMGFS

SEQ ID NO: 16246 - protein, 1124 aa, unidentified
  REGION 1..1124: note = Cas Enzyme sequence
MDEKMDYRIGLDIGIASVGWAVLQNNSDDEPVRIVDLGVRIFDTAEIPKTGESLAGPRRAARTTRRRLRRRKHRLDRIKWLFENQGLINIDDFLKRYNMAGLPDVYQLRYEALDRKLTDEELAQVLLHIAKHRGFRSTRKAETAAKENGAVLKATDENQKRMQEKGYRTVGEMIYLDEAFRTGCSWSEKGYILTPRNKAENYQHTMLRAMLVEEVKEIFSSQRRLGNEKATEELEEKYLEIMTSQRSFDLGPGMQPDGKPSPYAMEGFSDRVGKCTFLGDQGELRGAKGTYTAEYFVALQKINHTKLVNQDGETRNFTEEERRALTLLLFTQKEVKYAAVRKKLGLPEDILFYNLNYKKAATKEEQQKENQNTEKAKFIGMPYYHDYKKCLEERVKYLTENEVRDLFDEIGMILTCYKNDDSRTERLAKLGLVPIEMEGLLAYTPTKFQHLSMKAMRNIIPFLEKGMTYDKACEEAGYDFKADSKGIKQKLLTGEKVNQTINEITNPVVKRSVSQTVKVINAIIRTYGSPQAINIELAREMSKTFEERRKIKGDMEKRQKNNEDVKKQIQELGKLSPTGQDILKYRLWQEQQGICMYSGKTIPLEELFKPGYDIDHILPYSITFDDSFRNKVLVTSQENRQKGNRTPYEYMGNDEQRWNEFETRVKTTIRDYKKQQKLLKKHFSEEERSEFKERNLTVTTVIYNMIRQNLEIAPLNRPEKKKQVRAVNGAITAYLRKRWGLPQKNRETDTHHAMDAVVIACCTDGMIQKISRYTKVRERCYSKGTEFVDAETGEIFRPEDYSRAEWDEIFGVHIPKPWETFRAELDVRMGDDPKGFLDTHSDVALELDYPEYIYENLRPIFVSRMPNHKVTGAAHADTIRSPRHFKDEGIVLTKTALTDLKLDKDGEIDGYYNPQSDLLLYEALKKQLLLYGNDAKKAFAQDFHKPKADGTEGPVVRKVKIQKKQTMGVFVDSGNGIAENGGMVRIDVYHVNGKYYFVPVYTADVVKKVLPDRASTANKPYSEWRTMEDKDFLFSLYSRDLVHIKSKKGIPIKNVDGSLGESKEVYAYYIGADISGAKIEGKAHDSRYTFRGIGVQKLELIEKCQVDILGHISTVKNEKRMGFS

SEQ ID NO: 16247 - protein, 1128 aa, unidentified
  REGION 1..1128: note = Cas Enzyme sequence
MDEKMDYRIGLDIGIASVGWAVLQNNSDDEPVRIVDLGVRIFDTAEIPKTGESLAGPRRAARTTRRRLRRRKHRLDRIKWLFENQGLINIDDFLKRYNMAGLPDVYQLRYEALDRKLTDEELAQVLLHIAKHRGFRSTRKAETAAKENGAVLKATDENQKRMQEKGYRTVGEMIYLDEAFRTGCSWSEKGYILTPRNKAENYQHTMLRAMLVEEVKEIFSSQRRLGNEKATEELEEKYLEIMTSQRSFDLGPGMQPDGKPSPYAMEGFSDRVGKCTFLGDQGELRGAKGTYTAEYFVALQKINHTKLVNQDGETRNFTEEERRALTLLLFTQKEVKYAAVRKKLGLPEDILFYNLNYKKAATKEEQQKENQNTEKAKFIGMPYYHDYKKCLEERVKYLTENEVRDLFDEIGMILTCYKNDDSRTERLAKLGLVPIEMEGLLAYTPTKFQHLSMKAMRNIIPFLEKGMTYDKACEEAGYDFKADSKGIKQKLLTGEKVNQTINEITNPVVKRSVSQTVKVINAIIRTYGSPQAINIELAREMSKTFEERRKIKGDMEKRQKNNEDVKKQIQELGKLSPTGQDILKYRLWQEQQGICMYSGKTIPLEELFKPGYDIDHILPYSITFDDSFRNKVLVTSQENRQKGNRTPYEYMGNDEQRWNEFETRVKTTIRDYKKQQKLLKKHFSEEERSEFKERNLTDTKYITTVIYNMIRQNLEMAPLNRPEKKKQVRAVNGAITAYLRKRWGLPQKNRETDTHHAMDAVVIACCTDGMIQKISRYTKVRERCYSKGTEFVDAETGEIFRPEDYSRAEWDEIFGVHIPKPWETFRAELDVRMGDDPKEFLDTHSDVALELDYPEYIYENLRPIFVSRMPNHKVTGAAHADTIRSPRHFKDEGIVLTKTALTDLKLDKHGEIDGYYNPQSDLLLYEALKKQLLLYGNDAKKAFAQDFHKPKADGTEGPVVRKVKIQKKQTMGVFVDSGNGIAENGGMVRIDVYRVNGKYYFVPVYTADVVKKVLPDRASTANKPYSEWRTMEDKDFLFSLYSRDLVHIKSKKGIPIKNVDGSLGESKEVYAYYIGADISGAKIEGKAHDSRYTFRGIGVQKLELIEKCQVDILGHISTVKNEKRMGFS

SEQ ID NO: 16248 - protein, 1128 aa, unidentified
  REGION 1..1128: note = Cas Enzyme sequence
MDEKMDYRIGLDIGIASVGWAVLQNNSDDEPVRIVDLGVRIFDTAEIPKTGESLAGPRRAARTTRRRLRRRKHRLDRIKWLFENQGLINIDDFLKRYNMAGLPDVYQLRYEALDRKLTDEELAQVLLHIAKHRGFRSTRKAETAAKENGAVLKATDENQKRMQEKGYRTVGEMIYLDEAFRIGCSWSEKGYILTPRNKAENYQHTMLRAMLVEEVKEIFSSQRRLGNEKATEELEEKYLEIMTSQRSFDLGPGMQPDGKPSPYAMEGFSDRVGKCTFLGDQGELRGAKGTYTAEYFVALQKINHTKLVNQDGETRNFTEEERRALTLLLFTQKEVKYAAVRKKLGLPEDILFYNLNYKKAATKEEQQKENQNTEKAKFIGMPYYHDYKKCLEERVKYLTENEVRDLFDEIGTILTCYKNDDSRTERLAKLGLVPIEMEGLLAYTPTKFQHLSMKAMRNIIPFLEKGMTYDKACEEAGYDFKADSKGIKQKLLTGEKVNQTINEITNPVVKRSVSQTVKVINAIIRTYGSPQAINIELAREMSKTFEERRKIKGDMEKRQKNNEDVKKQIQELGKLSPTGQDILKYRLWQEQQGICMYSGKTIPLEELFKPGYDIDHILPYSITFDDSFRNKVLVTSQENRQKGNRTPYEYMGNDEQRWNEFETRVKTTIRDYKKQQKLLKKHFSEEERSEFKERNLTDTKYITTVIYNMIRQNLEMAPLNRPEKKKQVRAVNGAITAYLRKRWGLPQKNRETDTHHAMDAVVIACCTDGMIQKISRYTKVRERCYSKGTEFVDAETGEIFRPEDYSRAEWDEIFGVHIPKPWETFRAELDVRMGDDPKGFLDTHSDVALELDYPEYDYENLRPIFVSRMPNHKVTGAAHADTIRSPRHFKDEGIVLTKTALTDLKLDKDGEIDGYYNPQSDLLLYEALKKQLLLYGNDAKKAFAQDFHKPKADGTEGPVVRKVKIQKKQTMGVFVDSGNGIAENGGMVRIDVFHVNGKYYFVPVYTADVVKKVLPNRAATAHKPYGEWKVMEDKDFLFSLYSRDLIHIKSKKDIPIKMVNGGMEGIKETYAYYIGADISAANIQGIAHDSRYKFRGLGIQSLDVLEKCQIDVLGHVSVVRSEKRMGFS

SEQ ID NO: 16249 - protein, 1128 aa, unidentified; identical to SEQ ID NO: 16234
  REGION 1..1128: note = Cas Enzyme sequence

SEQ ID NO: 16250 - protein, 1128 aa, unidentified
  REGION 1..1128: note = Cas Enzyme sequence
MDEKMDYRIGLDIGIASVGWAVLQNNSDDEPVRIVDLGVRIFDTAEIPKTGESLAGPRRAARTTRRRLRRRKHRLDRIKWLFENQGLINIDDFLKRYNMAGLPDVYQLRYEALDRKLTDEELAQVLLHIAKHRGFRSTRKAETAAKENGAVLKATDENQKRMQEKGYRTVGEMIYLDEAFRTGCSWSEKGYILTPRNKAENYQHTMLRAMLVEEVKEIFSSQRRLGNEKATEELEEKYLEIMTSQRSFDLGPGMQPDGKPSPYAMEGFSDRVGKCTFLGDQGELRGAKGTYTAEYFVALQKINHTKLVNQDGETRNFTEEERRALTLLLFTQKEVKYAAVRKKLGLPEDILFYNLNYKKAATKEEQQKENQNTEKAKFIGMPYYHDYKKCLEERVKYLTENEVRDLFDEIGTILTCYKNDDSRTERLAKLGLVPIEMEGLLAYTPTKFQHLSMKAMRNIIPFLEKGMTYDKACEEAGYDFKADSKGIKQKLLTGEKVNQTINEITNPVVKRSVSQTVKVINAIIRTYGSPQAINIELAREMSKTFEERRKIKGDMEKRQKNNEDVKKQIQELGKLSPTGQDILKYRLWQEQQGICMYSGKTIPLEELFKPGYDIDHILPYSITFDDSFRNKVLVTSQENRQKGNRTPYEYMGNDEQRWNEFETRVKTTIRDYKKQQKLLKKHFSEEERSEFKERNLTDTKYITTVIYNMIRQNLEMAPLNRPEKKKQVRAVNGAITAYLRKRWGLPQKNRETDTHHAMDAVVIACCTDGMIQKISRYTKVRERCYSKGTEFVDAETGEIFRPEDYSRAEWDEIFGVHIPKPWETFRAELDVRMGDDPKGFLDTHSDVALELDYPEYIYENLRPIFVSRMPNHKVTGAAHADTIRSPRHFKDEGIVLTKTALTDLKLDKDGEIDGYYNPQSDLLLYEALKKQLLLYGNDAKKAFAQDFHKPKADGTEGPVVRKVKIQKKQTMGVFVDSGNGIAENGGMVRIDVFRVNGKYYFVPVYTADVVKKVLPNRASTAHKPYGEWKVMEDKDFLFSLYSRDLIHIKSKKDIPIKMVNGGMEGIKETYAYYIGADISAANIQGIAHDSRYKFRGLGIQSLDVLEKCQIDVLGHVSVVRSEKRMGFS

SEQ ID NO: 16251 - protein, 1128 aa, unidentified
  REGION 1..1128: note = Cas Enzyme sequence
MDEKMDYRIGLDIGIASVGWAVLQNNSDDEPVRIVDLGVRIFDTAEIPKTGESLAGPRRAARTTRRRLRRRKHRLDRIKWLFENQGLINIDDFLKRYNMAGLPDVYQLRYEALDRKLTDEELAQVLLHIAKHRGFRSTRKAETAAKENGAVLKATDENQKRMQEKGYRTVGEMIYLDEAFRTGCSWSEKGYILTPRNKAENYQHTMLRAMLVEEVKEIFSSQRRLGNEKATEELEEKYLEIMTSQRSFDLGPGMQPDGKPSPYAMEGFSDRVGKCTFLGDQGELRGAKGTYTAEYFVALQKINHTKLVNQDGETRNFTEEERRALTLLLFTQKEVKYAAVRKKLGLPEDILFYNLNYKKAATKEEQQKENQNTEKAKFIGMPYYHDYKKCLEERVKYLTENEVRDLFDEIGTILTCYKNDDSRTERLAKLGLVPIEMEGLLAYTPTKFQHLSMKAMRNIIPFLEKGMTYDKACEEAGYDFKADSKGIKQKLLTGEKVNQTINEITNPVVKRSVSQTVKVINAIIRTYGSPQAINIELAREMSKTFEERRKIKGDMEKRQKNNEDVKKQIQELGKLSPTGQDILKYRLWQEQQGICMYSGKTIPLEELFKPGYDIDHILPYSITFDDSFRNKVLVTSQENRQKGNRTPYEYMGNDEQRWNEFETRVKTTIRDYKKQQKLLKKHFSEEERSEFKERNLTDTKYITTVIYNMIRQNLEMAPLNRPEKKKQVRAVNGAITAYLRKRWGLPQKNRETDTHHAMDAVVIACCTDGMIQKISRYTKVRERCYSKGTEFVDAETGEIFRPEDYSRAEWDEIFGVHIPKPWETFRAELDVRMGDDPKGFLDTHSDVALELDYPEYDYENLRPIFVSRMPNHKVTGAAHADTIRSPRHFKDEGIVLTKTALTDLKLDKDGEIDGYYNPQSDLLLYEALKKQLLLYGNDAKKAFAQDFHKPKADGTEGPVVRKVKIQKKQTMGVFVDSGNGIAENGGMVRIDVFHVNGKYYFVPVYTADVVKKVLPNRAATAHKPYGEWKVMEDKDFLFSLYSRDLIHIKSKKDIPIKMVNGGMEGIKETYAYYIGADISAANIQGIAHDSRYKFRGLGIQSLDVLEKCQIDVLGHVSVVRSEKRMGFS

SEQ ID NO: 16252 - protein, 1083 aa, unidentified
  REGION 1..1083: note = Cas Enzyme sequence
VGRYLFNRKEKNMRYSIGLDIGIASIGFAVMELGEDDRPIKIVRIGSRVFDKPENPKDGASLALPRREARGMRRRIRRRSHRKQRIWHLIESEGILSNLQREALYNGKLSNIYELRCNALERLVSNEEFARILIHMSQRRGFKSNRRKEVKDTEAGKLLKSVEANKMDMESAGYRTVGEMLHKAPRYNDYKRNKEGSYLNTVSRDMVLEEVKKIFQAQRNFGNLFANEIIEEKYVQILAGQRSFDEGPGEGSPYAGNQIERMLGDCTLEKGEKRAPKASYSFELSNLLQKINNIRLTESGHSFALTPEDRHILCAEAHKTEKLTYKSIRTRLGIPTTQRFNHVRYDRYKISEPEILEQEAKTKFEYLKAYHEMRKALKPISPERINEIPIPQRNEIARIFSLYKNDGKLKAALDATSLTALDKEALLSNLGSFSKFGNLSVKALDNIIPYLEKGLTYDKACEAAGYDFKGREGAYKSQIISLRHLAEETENTITSPVVRRSLSQCAKVVNAIIREMNNTSPVYINIELAREMARTFEERGKQEKSMLENQARNERAKNQIKEYGKFDPKGLDIVKLKLWEEQGGICPYSLKSIQIERLFEVGYAEIDHIIPYSKCFNDGYNNKVCVLAAENQQKGNLLPLQYLTGKKRDEFIVWVNNQHLPRNKKLALLKEEITAEDEDEDGFIQRNLTDTQTISSFMYNYLTDFLQFNDFVTGRKKHVTAVNGAVTALVRKRLGITKLREDGDTHHAVDAAVIACITDGMIRDITNFSKYKETRYQNPATAIGKDEHFPQPYPEFVRDLDRNLKSVFVSRAPSRKVTGAAHKKKIKGVATNGNLIKKVALSTLKLDSDGEIKDYYRPQDDNLLYDAIKNRLIQHGNDPKKAFATPLHKPKKDGTDGPLVKGVKIVEKSTLNVPVHGGKGRAGNDSMVRVDVFFVEGKGGGYYLVPIYVADTLKKELPNRAINGIKPYEQWKVMDDADFLFSLYPKDLILMRHKQLLPLNLNKKHKKASSLSQKIERQEEYLYYVATNISGGDVTAINHDNSYHFESKVKGLLALEKWQVDTLGNITKVGRETRKGFSQPKRG

SEQ ID NO: 16253 - protein, 1002 aa, unidentified
  REGION 1..1002: note = Cas Enzyme sequence
KADLYELMEKNGLPGKAEIEQAVQAGHLPDVYALRVQALDGPVTALDFARILLHLMQRRGFRSNRKADDAQKDGKLLQAIDANTRRMEANRYRTVGEMMYRDPVFAEHKRNKAENYLSTVKRDQIIDEARLIFTAQRQYGATWASPEMEAEYLCILTRQRSFAEGPGKGSPYSGSNRVGTCTLEGKSEQRAAKAAFSFEYFTLLQKINHIRIAENGTSRTLTPAERQVLLSVCCQTDKLDFARIRKALALPEEARFNMVRYRGEQTAEACEKKEKITALPCYHKMRKALNTLRKDHIRNISREQLDAAGAALTNPENEDKLREALKQAEFEPLEIEALLTLPSFAGYGHISVKACRKLIPYLEQGMNYNDACQAAGYDFQGRQNGEKAQFLPASTEEMEDITSPVVRRAVAQTIKVVNAIIREQGESPVSIHLELAREMNKNFQQRSELDKAMRDNSAENERLMKELNELFPGRTVTGQDLVKYRLWKEQDGRCAYSIQPLELDKVITVSGYAEVDHIVPYSISFDDRRTNKVLVLASENRQKGNRLPLQYLQGKRRDDFIVYTKANVKNFRKRQNLLKERLSEEDGKGFIQRNLQDTQYIAAFMLNYIRNHLAFADCSGAGKRRVVAVNGAVTAFLRKRWGLSKVRADGDLHHAVDAAVIACTTQGMIKRVSDFCKRAETTAVRNEHFPEPWPHFRDELTQRLSACPQEDLMKINPVYYATVDISSIQPVFVSRMPRHKVTGAAHEETIRSQVNEKYTAVRKSITELSLDKDGKIKDYFKPSSDTLLYEALKKRLTEFGGNAKKAFAEPFYKPRADGTPGAQVRKVKVIAKMSNTIPVRSGGGVAKGGNMIRIDVYYVPGDGYYWVPIYVADTVRPELPNKAVLRGKSMEDWKEMKEENFLFSLYDNDLILVEREEPINFSLVNSDSTLPNKFSVKKVLVYYKSGNISNAAIKVETHDGAYVFEGMTFGTVRKIQKYQVDILGNYVPVKKEKRQTFPAQRR

SEQ ID NO: 16254 - protein, 1100 aa, unidentified
  REGION 1..1100: note = Cas Enzyme sequence
MKYTIGLDIGTSSVGWGVIDTERNRIQDLGVRLFESAENQKDGESLAKPRRDARSMRRRLARRGSRLERVKSIFEKAKFLTRGQMGITHARPNDPYRLRAEGLDRLLSNEDLFIAVYHLAKRRGYKSNRKNVLEGDGEDVREGKAVLDGVAQNKKLMAFRGYRTVGEMFFKDSVFTEAKRNKAGSYKHCVLREMLEDELGKILHAQRSLGNTLVTDSFISKLLEKKTGVFVYQRPFASGNQILKLVGPCTFEPEEIRAAKATYSFQYFNVLQRLNNLTIKNTDTGTERKLTSEERAKMIAFIFSHKDVQYAQIRLELKLSDVDRFNMVNYFVQRKELETKTAEELRREIEKKTKFPSLSDYYTIRKTVSEIDSAFWIQIEKQHDVIDAIGEIFTLYKTDEDIIAQLNTRIPSIPRPVVSALLGLSFTKFGHLSLKALRKIIPHLENGDTYDVACAKADPKYTDRAKTRARKLRPLDKEDHSITNPVARRAIAQTIKVVNAIIDKYDSPSEVHIELGRDLAKNFKERMKIQKEQKQNQEGNERAIAKIHELYKLENPRGQDIIKFRLWNEQNGQCMYSGERIDEIRLFDNGYTEIDHIIPFSRSFNDSYSNKVLVLKMRNQEKMNKTPYEYMGGDADTWQRFENLVNSMHNIGPRKKQNLLLKKYVADDLTLRTLNDTRFIARYMKNYIENTLLFTEGPQKQRVYTVNGQATAYLRKRWVLHKDRTENNRHHAQDAVVVAVATPSLVQGIMRHAKMGEIVDYLHSQKFAPNVTDIETGKPFESADIQSAKERIIAKHEHRLRIPEPWEGFSDELDARMGDDVVEKLSLRKSNIHGYKTTSDFSQIHPIFVSRMPKRKTTGRAHQETLRSPRRFKEFQESVVRTPLSSINLKKLEEMSGKNSDKLLYDILRKRLLAHGDDPKKAFTEPVHKPRKDGTQGPLVRSIKMVSEGQRSGILVNNEQALVDQDSMIRIDIFSKPNKKGKDEYYIIPVYAYHFAQKELPNKVITAKAEADWRTIDDTFAFEFSLYPNDLVKLTKGDDIRFGYYSGCNRALAAIHILPHDQNMPLVNNGIKTLDKIDKYVVDILGEYHKVGKETRQQIQ

SEQ ID NO: 16255 - protein, 1121 aa, unidentified
  REGION 1..1121: note = Cas Enzyme sequence
MKYTIGLDLGITSVGWSVVNDDKKRIEDLGVRIFTKAENPKSGASLAEPRRVARSMRRRLRRRNGRLQAVKRIFIEAGLPPDVIVSAHAKPNNPYLIRAEALDRVLTPQELFILVYQITKRRGYKSNRKKIDQVSDDKEKQAVLGGIQNMKALLEQGGFTTVGQILHSKLVEQRNLHSFGTGVRNHAGSYENSVSREMLEAELKEIFLTQRKHGNTFVTDDLERAVIGYDELGKATGAFNRQRHYVTGDILKKMVGICTFENESGKGEMRAAKATYSFQYFNLLQKLNNLKIDDLAEPLLPPRGLSLEEKQHLISYFHTVQEPSYHSVRTQLKLKPTERFNISYFAKRPKNNEPLPTEAEIQSQTEKTKFSNLKDYIHLKKIISETNQAFWNEIDSKKYIIDEIATILTLYRTDEDVLAKLDMIVDGERVVIPDDVKQALLGISFAKFGHLSLRALRKLIPHLENGLRYDEAVTAAGYGSKLAKRHKKLPPLSKDDNSITNPVVKRTVAQTIKVINAIIDRYGSPFAVHIELGRELSKSHKERGDIEKQQKENASKNERARQTIKETFRVLEPKGQDIIKYRLWEEQENKCAYSGVSIDEKRLFEDGYVEIDHIIPFSRSWDDSFNNKVLVMKRENQQKGNRTPYEYLGGEGDRWRDFEVLVESYKRMHYGKRRKLLLKKYTEDELTTRALNDTRYISRYIKNYIENSLEFSNLEDKRKKRVITINGMATAYLRKRWTFNKSRETDIHHAQDAVIVAVIDDSMVQQVAKHSKMGEVKEYLQLHKRAEGLVGISESEETEAKQQLADKQVRHSKLFPLPWEGFREELNARLSSDPQFELEACKDKIPWYKNCTLEELPSLRPIFVSRMPKRKVTGRAHEDTLRSPKWFKQQKPQSSVRTPLTSLTLEKLRGEQALYLDPKLKMALITQLDLHNGDAKKAFAEPFYKTMKNGERGPQVRSVKLIETGQKSGLLIHNGNALVDRASMIRVDIFVKQNKKDKDEFYFIPIYAHHVVEKNLPVRACTAGKRETEWEKIDDSFSFKFSLYPGDLIRIIKEGEKRFWYYVKAGISTNSFTVESHDGSETIPSMGIKTLDKIDKYVVDVLGNYHQVSREPRLSLQSKAE

SEQ ID NO: 16256 - protein, 1103 aa, unidentified
  REGION 1..1103: note = Cas Enzyme sequence
MDTKELKYVVGLDIGITSVGWATLLLDSQDEPVRILDLNSRIFDKAEVPKTGASLAAPRRMARGVRRRLRRRKFRLHRVRQYILRHHILDKAGLECLYKPKTDIDIFALRTAGLDRLLEPEEWARILLYMAKHRGFKSNRKSASDASDDGDMLDAIRKNKEVLSKYRSVGEMFDKDEKFSDHKRNKGGSYEFTVARSMLEDEIKLLFEKQRDFGLAFAEKDAEEEYIELFSAQRNFDEGPGGDSPYGGNQIEKMIGLCTFEGKNGEKRAPKASYAFMATNLWQKINQIRIIEKGTERPLTAEEAGKIDEKAWKKEAMTYKDIRSEIGLGDEASFKGLPYKWTETDKEETESKAKFSWVKEYHTLRKVLDKVEKNRILQLSHDDIDNIAYIFSVYKNDDKIREALEGTDLDSKDIDVLIENLGTFSKFGHLSLKACYKILPYLEQGMVYSDACTAAGYDFRKSAQGSIADIPNPVVKRAISQAMKVLKAIKQKYGCPPVEIHIEMARELAKSFDERQKMTKSIEENQSHNERIKERLQKEFNVPYPSGQDIVKLKLYEEQNETCAYSQKHIDAAKLFHDPNYAEVDHIIPYSRSFDDTYNNKVLVLTAENRQKGNRTPMEYLSGDEARKKQFVAWVKSDIKKPRKRENLLREKFTADAENDWKVRHLQDTQYISRFMLNYLQNNYELTPGNTDRKRRIIPVNGAVTAYVRKRLGISKIRENGDLHHAVDAAVIAAVTQGVVNSVSKYSKRHELQYHVDEHGNCVDLVTGELMGDAFKENHKIKGFPEPWPQFRAELEARVSENAAEAIRILKLPTYSPDEEIKTPFVSRMVRHKTTGQAHEDTVRGKSNVADNVYVKKVALTELKLKDGEIEGYYNPSSDRLLYEALKKRLEQFGGKGKDAFKEPFYKPKSDGSLGPIVKKCKVIDKISLAVPVHGGKGATANANGSMIRVDIFRVKEKNNKHSYYAVPIYVADTVKDKLPNKAIVAKKNYDEWLEMKKEDFVFSLYPNSAVYIGGKDIKMNVISGCTLELEKTMRDTILYYKGLDISPGALKIINHDGTYQQRGLGIKSLPFIEKYEVSVLGDLVKATYRPRETFNHKAQRSK

SEQ ID NO: 16257 - protein, 1019 aa, unidentified
  REGION 1..1019: note = Cas Enzyme sequence
HHILDKAGLECLYKPKTDIDIFALRTAGLDRQLKPEEWARILLYMAKHRGFKSNRKSAAVAGGDDGVMLKAIQQNKEVLSKYRSVGEMFDKDEKFSDHKRNKGGSYEFTVARSMLVDEIKLLFEKQRDFGSAFAEKDAEEGYIDLFSAQRNFDEGPGGDSPYGGNQIEKMIGLCTFEGKNGEKRAPKASYAFMATNLWQKINQIRIIEKGTERPLTAEEAGKIDEKAWKKEAMTYKDIRSEISLGDEASFKGLPYKWTETDKEETESKAKFSWVKEYHTLRKVLDKVEKNRILQLSHDDIDNIAYIFSVYKNDDKIREALEGTDLDSKDIDVLIENLGTFSKFGHLSLKACYKILPYLEQGMVYSDACTAAGYDFRKSAQGSIADIPNPVVKRAISQTMKVLKAIKQKYGCPPVEIHIEMARELAKSFDERQKMTKSIEENQSHNERIKERLQKEFNVPYPSGQDIVKLKLYEEQNETCAYSQKHIDAAKLFHDPNYAEVDHIIPYSRSFDDTYNNKVLVLTAENRQKGNRTPMEYLSGDEARKKQFVAWVKSDIKKPRKRENLLREKFTADAENDWKIRHLQDTQYISRFMLNYLQNNYELTPGNTDRRRRIIPVNGAVTAYVRKRLGISKIRENGDLHHAVDAAVIAAVTQGVVNSVSKYSKRHELQYHVDEHGNCVDLVTGELMGDAFKENHKIKGFPEPWPQFRAELEARVSENAAEAIRILKLPTYSPDEEIKTPFVSRMVRHKTTGQAHEDTVRGKSNVADNVYVKKVALTELKLKDGEIEGYYNPSSDRLLYEALKKRLEQFGGKGKDAFKEPFHKPKADGSPGPIVKKCKVIDKISLAVPVHGGKGATANANGSMIRVDIFRVKEKNNKHSYYAVPIYVADTVKDKLPNKAIVAKKNYDEWLEMKKEDFVFSLYPNSAVYIGGKDIKMNVMSGCTLELEKTMRDTILYYKGLDISPGALKIINHDGTYQQRGLGIKSLPFIEKYEVSVLGDLVKATYRPRETFNHKAQRSK

SEQ ID NO: 16258 - protein, 935 aa, unidentified
  REGION 1..935: note = Cas Enzyme sequence
MFDKDEKFSDHKRNKGGSYEFTVARSMLVDEIKLLFEKQRDFGSAFAEKDAEEEYIDLFSAQRNFDEGPGGDSPYGGNQIEKMIGLCTFEGKNGEKRAPKASYAFMASNLWQKINQIRIIEKGTERPLTAEEAGKIDEKAWKKEAMTYKDIRSEISLGDEASFKGLPYKWTETDKEETESKAKFSWVKEYHTLRKVLDKVEKNRILQLSHDDIDNIAYIFSVYKNDDKIREALEGTDLDSKDIDVLIENLGTFSKFGHLSLKACYKILPYLEQGMVYSDACTAAGYDFRESAQSIADIPNPVVKRAISQTMKALKAIKQKYGCPPVEIHIEMARELAKSFDERQKMTKSIEENQSHNERIKERLQKEFNVPYPSGQDIVKLKLYEEQNETCAYSQKHIDAAKLFHDPNYAEVDHIIPYSRSFDDTYNNKVLVLTAENRQKGNRTPMEYLSGDEARKKQFVAWVKSDIKKPRKRENLLREKFTTDAENDWKIRHLQDTQYISRFMLNYLQNNYELTPGNTDRKRRIIPVNGAVTAYVRKRLGISKIRENGDLHHAVDAAVIAAVTQGVVNSVSKYSKRHELQYHVDEHGNCVDLVTGELMGDAFKENHKIKGFPEPWPQFRAELEARVSENATEAIRILNLPTYSPDEEMKTPFVSRMVRHKTTGQAHEDTVRGKSNVADNVYVKKVALTELKLKDGEIEGYYNPSSDRLLYEALKKRLEQFGGKGKDAFKEPFHKPKSDGSPGPIVKKCKVLDKINLAVQVHGGNGATSNANGSMIRVDIFKVQEKNGKHSYYSVPIYVADTVKAELPKKAVYRRPYDEWPEMKEADFAFSLYPNDVVYIGGKEIKMNVMPGCTLESEKSMRDEVLYFKGLDIATGTIRVVNHDGTYKQKSLGIKQLPIIEKYEVSVLGDLVKAMYSPRETFKHKAQRTKDQVNV

SEQ ID NO: 16259 - protein, 1043 aa, unidentified
  REGION 1..1043: note = Cas Enzyme sequence
MGENKTIWAFDLGTGSIGEAVRDGTKFLHKASLLIPDNFAETKTAAGRRRMWRTRLAHLAREAWLDEVMLKAGIEPLKGRRTVKIDGKWQAAPETEDGKRNHERLEREFAEPGDATCYTSCLLRIKLMRGEKLEPWQVYKALHSAIQRRGYDPHIPWKTRIRNKAKAADSNDDEAGTQVRMEEFERQLEEMTPGKPEFQFPCYFDAWKMGLWNPSDPMQLKSRIDCRAESTRNQIVPRKRVEKEIRALVDAAAKYYPTLGGKADYLLYGPAKTAYASFDGKLRKQHNLKESGANDWQGVVGQKIPRFDNRIIGKCVLIPRLNVCKVRTGEKGDLHPQSRIAAETVFLMRLKNMRFQTADGQRGLTAQEINTVFNDPKRRKLALTETAWKRLCLRFGGKPLLGQFQEIKEPSFSGRSRFCRPSLEILKRLILSGDAPQVAHEKEMARLRGNTDPLKGLVQEDLNFLLQMGTTWDGIYIPNQKLDALAHSTGDAHEAIRELIGTQNNPVVRHRLTLFAERLDKLAEKFGVPESVVLEFVREDFMGKKARMEYFKFQRDRAAQRTKAREQARTFGAEERSSGLKMELLTAQVGECLYTGEKLIPEELDQYVIDHVVPRAKGGPDSVLNYILTTRRANDDKGDRTPFEWLSAKGGWDAYVNRVKGRIGTLRNKKVQLLISAEAENLVQRYTSLAETAWISKLAQTIIGLRFGWPGGISSGERKVTVVSGGLTGRIRRKYKLNSLLNPESKSEEEAEMKNRKDHRHHALDAMVISFIPGWARNAKFSGFFRFPDGVDRELFGREIADVTPQALCFEKTTLAETIYGARGEGASKVIVQRAEVVNFAQKPIAPDKTKFDLAYAQKQIESIRDAHIKKELAEFLSTKPSELAWNAFCQSFCLRQKDGSCGSPIKFVRVNVGEATEYKDLSKDGTGAFRKAVKGHKGQIVFLDKKGKLRVRPIYAFESVRTVQRDLTASCDCQAVKGFFQSGCLIELASPIAHRSTPLAPGRYKLNTMRTDGYVTLTDSAGKISLPISLEKMIAAGFTRLD

SEQ ID NO: 16260 - protein, 1028 aa, unidentified
  REGION 1..1028: note = Cas Enzyme sequence
MNAERILGLDITKKRIGWSLVEHNPNDSSENLLVDCGGFDFNAGEIPKTGESPNLPRRNARLARRTIKKRRRRKLAIRKLLLDSGLIDTTDTQELFHGKNLISPWDLRTEALDRKLSDNELARVLYHIVSHRGYQFTRAEEMDMNDGESGKMKEGGRALVAGMEERGSRTIGEYVATLERKRNTLLVVFDKNGDQIIDKKTKLPKTESTYDRSIHRSLLRKEIEAIFVAQQCFGNNKATNELRKVFEDIAFFTPDPQSTERLLGKCTFYPEETRAVKASKDAEEFVALTRFINCVLEMPGTGTEKKLTSFIGLDKLMAMAYEKPAITHTDIRKLLNLGDEWIFKGIKYDSKTKKASKKAAKEKSGLFDGSDEPQEEIVLDLTKGEKKALVEMKAYHVLNGILSEDVNFSQKGVYAEFGSIRQAYNDIAFALTVERGDNAIKVRLNKLFLEEATIQKLIDAADPKVFKETIMLSHKALTTILPQMREGKRYDEAVAELGMPTFDKSRFLPALEKTNIDVNNPIVLRVVAKLRTVVNEIIRHHGSFHKVHIELGRDMNTKSEQKMIDSAQRERETQKKIAAKRIEELFGDTVKQSRRNIEKMMLWAQQNEMCLYTGKHIELERLYEDGYAVVDYVLPRSRSFDESFGNMVLTFAQEKIEKEDMTPFEWFGDNGDKWESFKSLLSSPAFIYKLGRGKVHRLIKENFNDQSAIDAASKRLENSRAYAAKVIKELFEDYLDMPKSPLGGKIQVFTRNAWLTAELRRQWIGYEAQHEYDDRISVLNAILVAFSTQDMIQNLSQHFKWKETKWTKEWLQNKRDAGEEVQSWEKEKKQLPLPYPSFRTDVAELLKHDQSHFDKNGVWRRRMLIAKTPRKKTTGPAHDAGVSSAKQFSNAKGVLVRQGTAIAAHKSMLRLDVFKNGAKNAFIPIYVSDMRKPLSNEALTGSNSATGQMQDENFKFTIWPDDLVGVVSKGRESIGYFAGFDRSRIGFEITNARPGVGMAEIIKYSVNPLGFFSPIKSEPRLLTKAKRK

SEQ ID NO: 16261 - protein, 960 aa, unidentified
  REGION 1..960: note = Cas Enzyme sequence
GDIKAAGARKEYFDKLDAALAAADGGADAAMLPYRLRAKALDEALSPHEIGRALYHICQRRGYKSNRKDLSDDRRDKEKEESKKVESGIADLRAKMAEAGARTLGEYLSKLDPAAERLRSRYTHRDMYSDEFEAIWSAQAPRHPGAMTDEAKKEIHRAIFFQRPLKSQKNLRGRCELETGCPRAPIALMVSQRFRLLQKVNDLKFRYTDTKTGEIFDGPLDAAQRELLAAALDGKGEMTFGAIRKLLGLKGHQKFNFEEEGKGGKGLIGNKTASRLASVFGPERWAAFSDSEKDEIVQTVRGMRDETALAAAGARRWGLAPDAAARFGSVSLEDGYCALSQRALKKILPLMRQGAPYSTAVKEVYGAVRSEKVHDTLPPLQYSPMPTITNPTVRRALTELRKVVNAIIAKHGKPEYIRVELARDIKKSKKEREEIWKKNIANRKEREKAVSEMLKETGGREPSGRDIEKWLLAEECDWTCPYTGDHISRDSLIGPNPAFDIEHIIPFHRSFDNSFMNKTLCRADENRNVKRNRTPYETYGGTDEWEAILQRVRRFKGNAAKAKLEKFMKEKVDDLDGFCSRQMNDTRYASLLAVRYLGLLYGAGAQGIDAEGKRRVQAGRGGVTAHIRDSLGLNAILGDGRGKNRDDHRHHAVDAICAALSDAGIVKRMSDAAEESARGGRRGRFEHVAPPWDGFQRDARDAVRSIVVSHRPRRRVNSALHEQTTYSKTFIDPSGSECVHIRKRVESLSGKEDIVDPAVRKAVESKLAELGVSEPSKAFKDPANLPYLTTRDGRRVPIRKVRIRVKTTIKRIGDGASARNIKTGSNHHVEIFEVTDKKGNPKWEGRVVTTIEAMTRRRNSQPVIDRTHPDGGKFLFSLCGGDVIALKEDEGDNERLFVVRTIKKSSGNARLEYVSITDARKKEQIISNKNWYSGMMEPLRKKGCRKMNVTPLGEVIPAND

SEQ ID NO: 16262 - protein, 1128 aa, unidentified
  REGION 1..1128: note = Cas Enzyme sequence
MIFMNDKNQRYRLGLDLGTNSIGWCIYSLDGNNKPEALIDMGVRIFSDGRDPKTKEPLAVERRTARGLRRILHRRKQRRKQMFCLLQEQGLMPNDAVQATALKSLNPYELRVRALDAKLEPYELGRVLFNLSVRRGFKSNRKEAVQEKEKDSQNDTKSQNEKCEQLAKAIKDSGFRTLGEFLWKHKNTETPQMENDAGDIGMRFVPGRSNYYPTRRMYAEEFDTIRKVQEPYYSGVNWDALYEKLFYQRPLRAQERGKCRYMPDKERTFKAMPCSQKIRILQEVYNMDYIDALGKAFPIGNAQTDMLIALLDKKEKLSFAAMKKELGLDESCTFNLERGGREYLQGNITAVKLRNKNRFGELWDSLSLAEQDRIVEKLITADEDAEIISILEQYDLTDEQKKNIVATVLPSGTSMLCKEVTEMLVQKMEQNKIPLTVAVQMLGYTYADQSVHEEGELPYYGVILTGSTMGAHPEADESKPELKYGKISNPTVHVALNQTRTVVNTLIKAYGKPQQIVVELSRDLKASREAKARIQKTITMNQKRNERDNKNITEITKNPYPNREDRLKYRLWEELGSDSFSRKCLYCGKPISGSEIFTKDIEIEHILPFGRTLFDGETNKTIAHTSCNAFKKDRSPFEAFGSSPNGYNWHDIRARANSLKNPAKRALFAENAMEKFEKDSSFIQRQLIDNAYLSRSALRYLRCICKDVWSVNGCMTKLLRDKWNIDSILKREIGDTEIAHFELKNEQIGQYKKNRYDHRHHALDASVIALIDRAIVQEISRLNQIRLKNRIEAPQMPVLRSELIEKVKHITVSFKPDHGRQGKLSKETLLGKIKKIEKVDIDSIQTDDIASIKDDAIRTRFETKRRELGDITKAKAALKTEFPKLDVFKTYYVSRTPIVSLTEKNIDSIVDEKIKEKLKTFIKEHADLSFAEQLQKFTETEWIGKPSVDGKPGKKYRIVKVRCINRVQTPIPITSSAVPRYLCPEDYLAAVVWQMPAKKKDAEPEYQATYLRRDEFDVNNKPKKLEKPHDAAKYICLLYKDDYLEFTEKGVAYLCRIAGFSATQNKIDIRPIYAVSDCKDWIIATSDNMLESCWKPQKGQNHVSVNVLFGKRKAHSVTVSPIGRVFRK

SEQ ID NO: 16263 - protein, 1096 aa, unidentified
  REGION 1..1096: note = Cas Enzyme sequence
VDIFSKYFVQRREAMNYVLGLDVGIASVGWAVLELNEEDNPIRIEGLGARIFDKAEVPKTGASLAAPRRMSRGIRRVIRRRRFRLQRVRSYLKRHNILPAEKVDHLYDVPSAIDIYELRKRALTEKVTAEEWARLLIFFAKHRGFKSNRKKASGDADEGEMLKAIAANAEILKNYRTVGEMLCDNEKFRKRKRNRDGAYNFTVSRAMLMEEINTLFEIQRNLGQKFADEKLEEEYVILFASQRKFDEGPGENSPYAGNQIEKMIGSCTLEGKKEKRAPKASYVFMAFNLWQKINHLKVNRRGSERFLTEEERRRIADLAWKKEKLTYGSLRKVLSLDPEDRFVGLRYDLKKGKAENLEEPVSEAEKRSFSWVKDYHSIRKALDKVEKNRILKLSHEQLDTIATAFSVYKNEETIERYLEEGGIGKADREALLERLSGFSKFGHLSLKACYKLLPFLEKGEVYSRACELAGYDFSKSSLENIDDIPNPVVKRSISQTLKVINAIILRYGNPVEVHIELARELARSFRDRKKMEKGMQENQAKNEKIRQRLISEFGVLRPKGMDIVKFKLCEEQNGECAYSQKHFDMEKLLKDPSYAEVDHIIPYSRSFDDSYNNKVLVLTKENREKRNRIPMEYLADAPERKNRFIHWVKSTIRNSRKRENLLRTDYTATTENEWKRRNLQDTQYISKYLYNYLRHHLVLAKGYTERKRRIIPVNGAVTAYFRKRLGINKIRENGDLHHAVDAVIIACATQGIVNKVSRYSKSRELWDYEVDMETGEVLQKKNKNTKDVFPEPWLNFRYELEQKVRVRPLDIPETADITEMEEPFVSHMPNRKIHGPAHKESIRSGRLKEEGYTISKTALIDLKLTGDKEEIKGYYNKESDRLLYEALKKQLQRYGGKAKEAFKEPFHKPKADGTPGPIVNKVKIMEKSTMLIPVNDGKGLASNGNMVRIDVFRVEEKGKKKYYFIPVYVADTVKEELPNRAVLAHKPYEAWKIMKEEDFIFSLYPNDLIFVDAGKEIPFKAALKGSTLDPEKKVSRFLMYYKGADIATGSISGVNHDETYKARGVGIQSLREIKKCCIDVLGNISFASKEKRQTFR

SEQ ID NO: 16264 - protein, 1096 aa, unidentified
  REGION 1..1096: note = Cas Enzyme sequence
VDIFSKYFVQRREAMNYVLGLDVGIASVGWAVLELNEEDNPIRIEGLGARIFDKAEVPKTGASLAAPRRMSRGIRRVIRRRRFRLQRVRSYLKRHNILPAEKVDHLYDVPSAIDIYELRKRALTEKVTAEEWARLLIFFAKHRGFKSNRKKASGDADEGEMLKAIAANAEILKNYRTVGEMLCDNEKFRKRKRNRDGAYNFTVSRAMLMEEIHTLFEIQRNLGQKFADEKLEEEYVILFASQRKFDEGPGENSPYAGNQIEKMIGSCTLEGKKEKRAPKASYVFMAFNLWQKINHLKVNRRGSERFLTEEERRRIADLAWKKEKLTYGSLRKVLSLDPEDRFVGLRYDLKKGKAENLEEPVSEAEKRSFSWVKDYHSIRKALDKVEKNRILKLSHEQLDTIATAFSVYKNEETIERYLEEGGIGKADREALLERLSGFSKFGHLSLKACYKLLPFLEKGEVYSRACELAGYDFSKSSLENIDDIPNPVVKRSISQTLKVINAIILRYGNPVEVHIELARELARNFRDRKKMEKGMQENQAKNEKIRQRLISEFGVLRPKGMDIVKFKLCEEQNGECAYSQKHFDMEKLLKDPSYAEVDHIIPYSRSFDDSYNNKVLVLTKENREKRNRIPMEYLADAPERKNRFIHWVKSTIRNSRKRENLLRTDYTATTENEWKRRNLQDTQYISKYLYNYLRHHLVLAKGYTERKRRIIPVNGAVTAYFRKRLGINKIRENGDLHHAVDAVIIACATQGIVNKVSRYSKSRELWDYEVDMETGEVLQKKNKNTKDVFPEPWLNFRYELEQKVRVRPLDIPETADITEMEEPFVSHMPNRKIHGPAHKESIRSGRLKEEGYTISKTALIDLKLTGDKEEIKGYYNKESDRLLYEALKKQLQRYGGKAKEAFKEPFHKPKADGTPGPIVNKVKIMEKSTMLIPVNDGKGLASNGNMVRIDVFRVEEKGKKKYYFIPVYVADTVKEELPNRAVLAHKPYEAWKIMKEEDFIFSLYPNDLIFVDAGKEIPFKAALKGSTLDPEKKVSRFLMYYKGADIATGSISGVNHDETYKARGVGIQSLREIKKCCIDVLGNISFASKEKRQTFR

SEQ ID NO: 16265 - protein, 1080 aa, unidentified
  REGION 1..1080: note = Cas Enzyme sequence
MNYVLGLDVGIASVGWAVLELNEEDNPIRIEGLGARIFDKAEVPKTGASLAAPRRMSRGIRRVIRRRRFRLQRVRSYLKRHNILPAEKVDHLYDVPSAIDIYELRKRALTEKVTAEEWARLLIFFAKHRGFKSNRKKASGDADEGEMLKAIAANAELLKNYRTVGEMLCDNEKFRKRKRNRDGAYNFTVSRAMLIEEIHTLFEIQRNLGQKFADERLEEEYVILFVAQRKFDEGPGENSPYAGNQIEKMIGSCTLEGKKEKRAPKASYAFMAFNLWQKINHLKINRRGSERFLTEEERRRIADLAWKKEKLTYGSLREVLFLDPEDRFVGLRYDLKKEKEEDLEEPVSEAEKMSFSWVKDYHSIRKALDKVEKNRILKLSHEQLDTIATAFSVYKNEETIEKYLEEGGIEKADREALLERLSSFSKFGHLSLKACYKILPFLEKGEVYSRACERAGYDFRKSSLENINDIPNPVVKRSISQTLKVINAIILRYGNPVEVHIELARELAKNFRDRKKMEKGMQENQAKNEKIRQRLMSEFGVLCPKGMDIVKFKLCEEQNGECAYSQKHFDMEKLLKDPSYAEVDHIIPYSRSFDDSYNNKVLVLTKENREKRNRIPMEYLADAPEQKNRFIHWVKSTIRNSRKRENLLRTDYTAATENEWKRRNLQDTQYISKYLYNYLLENLELAKGYTERKRRIIPVNGAVTAYIRKRLGINKIRENGDLHHAVDAVIIACATQGIVNKVSRYSKSRELWDYEVDKETGEILQKKNKNTKDVFPEPWLNFRYELEQKVRIRPLDIPETADITKMEEPFVSHMPNRKIHGPAHKETIRSGRLKEEGYTISKTALTDLKLTEDKEEIKGYYNKESDRLLYEALKKQLRRYGGKAKEAFKEPFHKPKADGTPGPIVNKVKIMEKSTMPVPVNGGKGIASNGNMVRIDVFRVEEKGKKKYYFIPVYVADTVKEELPNRAVLAHKPYEAWKIMKEEDFIFSLYPNDLIFVDAGKEIPFKAALKGSTLDPEKKASRFLMYYKGADIAGGTINGVNHDSTYGIRIGLQRLKGIRKCRIDVLGNISLVGKEKRKTF

SEQ ID NO: 16266 - protein, 1082 aa, unidentified
  REGION 1..1082: note = Cas Enzyme sequence
MNYVLGLDVGIASVGWAVLELNEEDNPIRIEGLGARIFEKAEVPKTGASLAAPRRMSRGIRRVIRRRRFRLQRVRSYLKRHNILPAEKVDHLYDVPSAIDIYELRKRALTEKVTAEEWARLLIFFAKHRGFKSNRKKASGDADEGEMLKAIAANAEILKNYRTVGEMLCDNEKFRKRKRNRDGAYNFTVSRAMLMEEIHTLFEIQRNLGQKFADEKIEEEYVILFAAQRKFDEGPGENSPYAGNQIEKMIGSCTLEGKKEKRAPKASYAFMAFNLWQKINHLKINRRGSERFLTEEERRRIADLAWKKEKLTYGSLREVLFLDPEDRFVGLRYDLKKEKEEDLEEPVSEAEKMSFSWVKDYHSIRKALDKVEKNRILKLSHEQLDTIATAFSVYKNEETIEKYLEEGGIEKADREALLERLSGFSKFGHLSLKACYKILPFLEKGEVYSRACERAGYDFSKSSLENIDDIPNPVVKRSISQTLKVINAIILRYGNPVEVHIELARELARNFRDRKKMEKGMQENQAKNEKIRQRLISEFGVLRPKGMDIVKFKLCEEQNGECAYSQKHFDMEKLLRDPSYAEVDHIIPYSRSFDDSYNNKVLVLTKENREKRNRIPMEYLADAPERKNRFIHWVKSTIRNSRKRENLLRIDYTETTENEWKRRNLQDTQYISKYLYNYLRHHLVLAKGYTERKRRIIPVNGAVTAYFRKRLGINKIRENGDLHHAVDAVIIACATQGIVNKVSRYSKSRELWDYEVDMETGEVLQKKNKNTKDVFPEPWLNFRYELEQKVRIRPLDIPKTADITEMEEPFVSHMPNRKIHGPAHKETIRSGRLKEEGYTISKTALIDLKLTEDKEEIKGYYNKESDRLLYEALKKQLQRYGGKAKEAFKEPFHKPKADGTPGPIVNKVKIMEKSTMLIPVNGGKGLASNGNMVRIDVFRVEEKGKKKYYFIPVYVADTVKEELPNRAVLAHKPYEAWKIMKEEDFIFSLYPNDLIFVDAGKGIPFKAALKGSTLDPEKKASRFLMYYKGADIATGSISGVNHDETYKARGIGIQSLREIKKCCIDVLGNISFASKEKRQTFR

SEQ ID NO: 16267 - protein, 1082 aa, unidentified
  REGION 1..1082: note = Cas Enzyme sequence
MNYVLGLDVGIASVGWAVLELNEEDNPIRIEGLGARIFDKAEVPKTGASLAAPRRMSRGIRRVIRRRRFRLQRVRSYLKRHNILPAEKVDHLYDVPSAIDIYELRKRALTEKVTAEEWARLLIFFAKHRGFKSNRKKASGDADEGEMLKAIAANAEILKNYRTVGEMLCDNEKFRKRKRNRDGAYNFTVSRAMLMEEIHTLFEIQRNLGQKFADEKIEEEYVILFAAQRKFDEGPGENSPYAGNQIEKMIGSCTLEGKKEKRAPKASYAFMAFNLWQKINHLKINRRGSERFLTEEERRRIADLAWKKEKLTYGSLREVLFLDPEDRFVGLRYDLKKEKEEDLEEPVSEAEKMSFSWVKDYHSIRKALDKVEKNRILKLSHEQLDTIATAFSVYKNEETIEKYLEEGGIEKADREALLERLSGFSKFGHLSLKACYKILPFLEKGEVYSRACERAGYDFSKSSLENIDDIPNPVVKRSISQTLKVINAIILRYGNPVEVHIELARELARNFRDRKKMEKGMQENQAKNEKIRQRLISEFGVLRPKGMDIVKFKLCEEQNGECAYSQKHFDMEKLLRDPSYAEVDHIIPYSRSFDDSYNNKVLVLTKENREKRNRIPMEYLADAPERKNRFIHWVKSTIRNSRKRENLLRIDYMETTENEWKRRNLQDTQYISKYLYNYLRHHLVLAKGYTERKRRIIPMNGAVTAYFRKRLGINKIRENGDLHHAVDAVIIACATQDIVNKVSRYSKSRELWDYEVDMETGEVLQKKNKNTKDVFPEPWLNFRYELEQKVRIRPLDIPKTADITEMEEPFVSHMPNRKIHGPAHKETIRSGRLKEEGYTISKTALIDLKLTEDKEEIKGYYNKESDRLLYEALKKQLQRYGGKAKEAFKEPFHKPKADGTPGPIVNKVKIMEKSTMLIPVNGGKGLASNGNMVRIDVFRVEEKGKKKYYFIPVYVADTVKEELPNRAVLAHKPYEAWKIMKEEDFIFSLYPNDLIFVDAGKGIPFKAALKGSTLDPEKKASRFLMYYKGADIATGSISGVNHDETYKARGIGIQSLREIKKCCIDVLGNISFASKEKRQTFR

SEQ ID NO: 16268 - protein, 1082 aa, unidentified
  REGION 1..1082: note = Cas Enzyme sequence
MNYVLGLDVGIASVGWAVLELNEEDNPIRIEGLGARIFDKAEVPKTGASLAAPRRMSRGIRRVIRRRRFRLQRVRSYLKRHNILPAEKVDHLYDVPSAIDIYELRKRALTEKVTAEEWARLLIFFAKHRGFKSNRKKASGDADEGEMLKAIAANAEILKNYRTVGEMLCDNEKFRKRKRNRDGAYNFTVSRAMLMEEIHTLFEIQRNLGQKFADEKLEEEYVILFAAQRKFDEGPGENSPYAGNQIEKMIGSCTLEGKKEKRAPKASYAFMAFNLWQKINHLKVNRRGSERFLTEEERRRIADLAWKKEKLTYGSLREVLFLDPEDRFVGLRYDLKKEKEEDLEEPVSEAEKMSFSWVKDYHSIRKALDKVEKNRILKLSHEQLDTIATAFSVYKNEETIEKYLKEGGIEKADREALLERLSGFSKFGHLSLKACYKILPFLEKGEVYSRACERAGYDFSKSSLENINDIPNPVVKRSISQTLKVINAIILQYGNPVEVHIELARELAKNFRDRKKMEKGMQENQAKNEKIRQRLMSEFGVLRPKGMDIVKFKLCEEQNGECAYSQKHFDMEKLLRDPSYAEVDHIIPYSRSFDDSYNNKVLVLTKENREKRNRIPMEYLADATERKNRFIHWVKSTIRNSRKRENLLRTDYTATTENEWKRRNLQDTQYISKYLYNYLRHHLVLAKGYTERKRRIIPVNGAVTAYIRKRLGINKIRENGDLHHAVDAVIIACATQGIVNKVSRYSKSRELWDYEVDMETGEVLQKKNENRKDIFPEPWLNFRYELEQKVRVRPLDIPETADITEMEEPFVSHMPNRKIHGPAHKETIRSGRLKEEGYTISKTALTDLKLTEDKEEIKGYYNKESDRLLYEALKKQLQRYSGKAKEAFKEPFHKPKADGTPGPIVNKVKIMEKSTMPVPVNGGKGLASNGNMVRIDVFRVEEKGKKKYYFIPVYVADTVKEELPNRAVLAHKPYEAWKIMKEEDFIFSLYPNDLIFVDAGKEIPFKAALKGSTLDPEKKASRFLMYYKGADIATGSISGVNHDETYKARGVGIQSLREIKKCCIDVLGNISFASKEKRQTFR

SEQ ID NO: 16269 - protein, 1080 aa, unidentified
  REGION 1..1080: note = Cas Enzyme sequence
MNYVLGLDVGIASVGWAVLELNEEDNPIRIEGLGARIFDKAEVPKTGASLAAPRRMSRGIRRVIRRRRFRLQRVRSYLKRHNILPAEKVDHLYDVPSAIDIYELRKRALTEKVTAEEWARLLIFFAKHRGFKSNRKKASGDADEGEMLKAIAANAEILKNYRTVGEMLCDNEKFRKRKRNRDGAYNFTVSRAMLMEEIHTLFEIQRNLGQKFADEKIEEEYVILFAAQRKFDEGPGENSPYAGNQIEKMIGSCTLEGKKEKRAPKASYAFMAFNLWQKINHLKINRRGSERFLTEEERRRIADLAWKKEKLTYGSLREVLFLDPEDRFVGLRYDLKKEKEEDLEEPVSEAEKMSFSWVKDYHSIRKALDKVEKNRILKLSHEQLDTIATAFSVYKNEETIEKYLEEGGIEKADREALLERLSGFSKFGHLSLKACYKILPFLEKGEVYSRACERAGYDFSKSSLENIDDIPNPVVKRSISQTLKVINAIILRYGNPVEVHIELARELARNFRDRKKMEKGMQENQAKNEKIRQRLISEFGVLRPKGMDIVKFKLCEEQNGECAYSQKHFDMEKLLRDPSYAEVDHIIPYSRSFDDSYNNKVLVLTKENREKRNRIPMEYLADAPERKNRLIHWVKSTIRNSRKRENLLRIDYTETTENEWKRRNLQDTQYISKYLYNYLRHHLVLAKGYTERKRRIIPVNGAVTAYFRKRLGINKIRENGDLHHAVDAVIIACATQGIVNKVSRYSKSRELWDYEVDMETGEVLQKKNENRKDIFPEPWLNFRYELEQKVRVRPLDIPETADITEMEEPFVSHMPNRKIHGPAHKETIRSGRLKEEGYTISKTALTDLKLTEDKEEIKGYYNKESDRLLYEALKKQLQRYSGKAKEAFKEPFHKPKADGTPGPIVNKVKIMEKSTMPVPVNGGKGLASNGNMVRIDVFRVEEKGKKKYYFIPVYVADTVKEELPNRAVLAHKPYEAWKIMKEEDFIFSLYPNDLIFVDAGKEIPFKAALKGSTLDPEKKASRFLMYYKGADIAGGTINGVNHDSTYGIRIGLQRLKGIRKCRIDVLGNISLVGKEKRKTF

SEQ ID NO: 16270 - protein, 1080 aa, unidentified
  REGION 1..1080: note = Cas Enzyme sequence
MNYVLGLDVGIASVGWAVLELNEEDNPIRIEGLGARIFEKAEVPKTGASLAAPRRMSRGIRRVIRRRRFRLQRVRSYLKRHNILPAEKVDHLYDVPSAIDIYELRKRALTEKVTAEEWARLLIFFAKHRGFKSNRKKASGDADEGEMLKAIAANAEILKNYRTVGEMLCDNEKFRKRKRNRDGAYNFTVSRAMLMEEIHTLFEIQRNLGQKFADEKIEEEYVILFAAQRKFDEGPGENSPYAGNQIEKMIGSCTLEGKKEKRAPKASYAFMAFNLWQKINHLKINRRGSERFLTEEERRRIADLAWKKEKLTYGSLREVLFLDPEDRFVGLRYDLKKEKEENLEEPVSEAEKMSFSWVKDYHSIRKALDKVEKNRILKLSHEQLDTIATAFSVYKNEETIEKYLEEGGIEKADREALLERLSGFSKFGHLSLKACYKILPFLEKGEVYSRACERAGYDFRKSSLENINDIPNPVVKRSISQTLKVINAIILRYGNPVEVHIELARELAKNFRDRKKMEKGMQENQAKNEKIRQRLMSEFGVLRPKGMDIVKFKLCEEQNGECAYSQKHFDMEKLLRDPSYAEVDHIIPYSRSFDDSYNNKVLVLTKENREKRNRIPMEYLADATERKNRFIHWVKSTIRNSRKRENLLRTDYTETTENEWKRRNLQDTQYISKYLYNYLRHHLVPAKGYTERKRRIIPVNGAVTAYIRKRLGINKIRENGDLHHAVDAVIIACATQGIVNKVSRYSKSRELWDYEVDMETGEVLQKKNENRKDIFPEPWLNFRYELEQKVRVRPLDIPETADITEMEEPFVSHMPNRKIHGPAHKETIRSGRLKEEGYTISKTALTDLKLTEDKEEIKGYYNKESDRLLYEALKKQLQRYSGKAKEAFKEPFHKPKADGTPGPIVNKVKIMEKSTMPVPVNGGKGLASNGNMVRIDVFRVEEKGKKKYYFIPVYVADTVKEELPNRAVLAHKPYEAWKIMKEEDFIFSLYPNDLIFVDAGKEIPFKAALKGSTLDPEKKASRFLMYYKGADIAGGTINGVNHDSTYGIRIGLQRLKGIRKCRIDVLGNISLVGKEKRKTF

SEQ ID NO: 16271 - protein, 1020 aa, unidentified
  REGION 1..1020: note = Cas Enzyme sequence
LRHHILDKVGLECLYKPKTDIDIFALRTAGLDRLLEPEEWARILLYMAKHRGFKSNRKSAAVAGGDDGVMLDAIRKNKEVLSKYRSVGEMFDKDEKFSAHKRNKGGSYEFTVARSMLEDEIKLLFEKQRDFGLAFAEKDAEEEYIELFSAQRNFDEGPGGDSPYGGNQIEKMIGLCTFEGKNGEKRAPKASYAFMATNLWQKINQIRIIEKGTERPLTAEEAGEKKEKGWGKRSTTHKDIRSEISLGDEAYFKGLSYKWTETDKEETESKVKFSLVKEYHTLRKVLDKVEKNRILQLSHDDIDNIAYIFSVYKNDDKIREALEETDLDSKDIDVLIEHLGTFSKFGHLSLKACYKILPYLEQGMVYSDACTAAGYDFRKSAQGSIADIPNPVVKRAISQTMKVLKAIKQKYGCPPVEIHIEMARELAKSFDERQKMTKSIEENQSHNERIKERLQKEFNVPYPSGQDIVKLKLYEEQNETCAYSQKHIDAAKLFHDPNYAEVDHIIPYSRSFDDTYNNKVLVLTAENRQKGNRTPMEYLSGDEARKKQFVAWVKSDIKKQRKRENLLREKFTADAENDWKARHLQDTQYISRFMLNYLQNNYELTPGNTDRKRRIIPVNGAVTAYVRKRLGISKIRENGDLHHAVDATVIAAVTQGVVNSVSKYSKRHELQYHVDEHGNCVDLVTGKLMGDAFKENHKIKGFPEPWPQFRAELEARVSENAAEAIRTLNLPTYSSDEEIKTPFVSRMVRHKTTGQAHEDTVRGKSNVADNEYVKKVALTELKLKDGEIEGYYNRPSDRLLYEALKKRLEQFGGKGKDAFKEPFYKPKSDGSPGPIVKKCKILDKINLAVQVHGGKGATANANGSMIRVDIFKAKEKNGKYSYYAVPIYVADTVKEELPNKAVCNKEYNRWPKMKEEDFAFSLYPNDVVYIGGKEIKMNAAPGCTLETTRSIQDVNLYFRGMDISTGAIRVVNHDGTYKQKSLGIKQLPLIEKYEVSVLGDLVKAIYKPRETFKHKVRRSK

SEQ ID NO: 16272 - protein, 1131 aa, unidentified
  REGION 1..1131: note = Cas Enzyme sequence
MNYSLGLDIGTTSCGWSVINLDKKRIEDLGVRIFEGAENPKNGQSLATPRREKRGMRKRLHRRRIRLNFLKQFFIQQKILSSQQIESLLAPHKNQIDPYTVREKALSEKLTPEELFIALYHIAKRRGYKSNSRAESNGDADENKKTLSAITANQAFLKEYQTVGEALNHAEKFKSHKRNKPNDYSNSFARADFEDEIKKILNKQSEFYPVLNEEKIQELLYSENFGILFQRRFMTPELIEKMRGKCQFEKEKPRAQRASYSFELFRLASDLVHLTYNMGNKLTIDEIASCIEKAKELSVLKYSHIQKILSENTSYEINFDYIRGLKRKDLIKDEAEAKKKALEQKFGELKFYHAIKKALKDQPAEWKEIESNIELFDNIGFVLTANKEDDSVREELNKLGLKPSVIDGIYNIKQSFAGFGHLSLEALRKITPFILQGETYDKAVVDAGYIFTAKLSGNSNRLPALSKEENNQITNPVVKRAISQSIKVVNAITLKYGAPTRLHIECASELAKSFDKRNDIIKIQDENRENNEKLVARLKEEFHILSPTALQITKFKLYEQQDGKCLYSGSPIDLNRLFSDEHYCEIDHIIPISRCGNDGMINKVLVLNQENQEKRNQTPFEAWGSDEKRWQSFVARVESNPKIFAKKRARLLAKTPPKEDWNVRALNDTRYITRFLANYFKQNLKFADHTEGKKVVYTPTGNITSYLRHVWHIGKKDRSKNLHHAVDAVITALVTDEVIRQCALMNKMIELGAKYRTKGINLANYQNGMLAATDPVTGEIVDLAKYEEVRESVLPWPNFDHEVRFRTTPLACFITEDKEDKKKTESGQLSEEAKTHLQNASINTLAEWRDQFREIYKDQDEEFRSSIHPIFVSCMPKRKGIGSLHDDTIRSPKGILIDEKTGVISANPNRSSFIRKRLQDVKIADLENSILKQSDKVLYQQLKNLLEANGDDPKKAFKEPVYKNNVKFDKNGHPLSPVTTIKVNDDKSVKSGISLNHGTQFVNNGSMVRLDVYQKDIKGEKKLFYVPIYTHQVRKGSNRILPTTCGYDFIDNTFAKLCSVYPNDYLIMKKGDEILQGYYIKYNVNNSAIAYTSNVKEGRSDFVTATGRALSELYRLDISVLGDNYHWERMY

SEQ ID NO: 16273 - protein, 1131 aa, unidentified
  REGION 1..1131: note = Cas Enzyme sequence
MNYSLGLDIGTTSCGWSVINLDKKRIEDLGVRIFEGAENPKNGQSLATPRREKRGMRKRLHRRRIRLDFLKQFFIQQKILSSQQIESLLAPHKNQIDPYTVREKALSEKLTPEELFVALYHISKRRGYKSNSRAESSGDADENKKTLSAITANQVFLKEYQTVGEALNHAEKFKSHKRNKPNDYSNSFARADFEDEIKKILNKQSEFYPVLNEEKIQELLYSENFGVLFQRRFMTPELIEKMRGKCQFEKEKPRAQRASYSFELFRLASDLVHLTYNMGNKLTIDEIASCIEKAKELSVLKYSHIQKILDEDMEDEINFDYVRGLKRKDLLKDEVEAKKKALEQKFGELKFYHAIKKALKDQPTEWAEIESNIELFDNIGFVLTANKEDDSVREELEKLGLKPQVIDSISNIKQSFSGFGHLSLEALRKITPFILQGETYDKAVVDAGYVFKAKLAGGLNRLPALSKEENNQITNPVVKRAISQSIKVVNAIILKYGAPTRLHIECASELAKSFNKRNDIIKIQDENRENNEKLVARLKEEFHILSPTALQITKFKLYEQQDGKCLYSGKPIDLNRLFSDEHYCEIDHIIPISHCGNDGMINKVLVLNQENQEKRNQTPFEAWGSDEKRWQSFVARVESNPKIFAKKRARLLAKTPPKEDWNVRALNDTRYITRFLANYFKQNLKFADHTEGKKVVYTPTGNITSYLRHVWHIGKKDRSKNLHHAVDAVITALVTDEVIRQCALMNKMIELGAKYRTKGINLANYQNGMLAATDPVTGEIVDLAKYEEVRESVLPWPNFDHEVRFRTTPLACFITEEKEDKKKTESGQLSEEAKTHLQNASINTLAEWRDQFREIYKDQDEEFRSSIHPIFVSRMPKRKGIGSLHDDTIRSPKGILIDEKTGVISANPNRSSFIRKRLQDVKIADLENSILKQSDKVLYQQLKNLLEANGDDPKKAFKEPVYKNNVKFDKNGHPLSPVTTIKVNDDKSVKSGISLNHGTQFVNNGSMVRLDVYQKDIKGEKKLFYVPIYTHQVRKGSNRILPTTCGYDFIDNTFAKLCSVYPNDYLIMKKGDEILQGYYIKYNVNNSAIAYTSNVKEGRSDFVTATGRALSELYRLDISVLGDNYHWERMY

SEQ ID NO: 16274 - protein, 997 aa, unidentified
  REGION 1..997: note = Cas Enzyme sequence
MKRYVMVERILGIDLGISSLGWAVVEYDKDNDENNKIIDCGVRLFTAAETPKEKESPNKARREARGLRRVIKRRRVRMNTIKHLLVTHKLIDKSILNEETGMFHSQSNRADVWQLRHDALYQLLSGDELARVLIHIAKHRGYKFLGDDENDEESGKVKTAGTELKKKFLEAGCQSVGEWLWKERGLHGKKRNKSGDYEISIPRDFLVEEIYRIFETQQTLGSTLATSELQKAYTYIAFYVKPMQSIEHTVGKCTYFPNEPRAPKASPTAEQFVALGKFYATVVIDKENKEQKISELKTIQELMNFATSKEKLAYKELRKFLALDEEHIFKELAYKGKPKKVKKGEEGKPQEWEFDKTEAEKKIWISLKGHAKFKEILGEERFSELLKTPDLADEIAKVLTYHKDERDKKEALSKLVLETSIIEKLSTISFTDFNQLCLKAMKALLPEMIQGKRYDEAIGILGKPSHEKSIFLPPLKETNIAILNPTVIRSFAQFRKVANALVLKYGSFDKVHFELAREVNTKEDRKRWEQDRDKNEKMHRQITEKLIEEGIKPNYKNILKSKLRSEQKDTCPYCQKNLHYPMIFQDGYAEIDHILPLSRSQDDSYVNKVLVHSVCNQNKKNRTPFEWLQDEKRDWETFKNYILMESTLGKRKRSYLVKENFSDPQSQNEFIARNLNDTRYMSKAIKTYCENHWKLSSDDDKLRIQVRSGKLTSTLRHQWGLDNKNRETHTHHAMDAIMIAFSTPSMVKKLSDYFARKERKDEKDKPILKTPIKQFKEAVDKAIEIEHQERIQTKTGETIILNRLLISRPPRASVTGAAHKETIKSPKEYKGRGVKVNEGKGMCDNGDMPRVDVFSKEGKYYLVPIYVADFAKEELPIITAYGEELLENATFLFSLYKDEIIGITTKATANKPSKEVKGYFAQLIGPSILLNSFDNGEAEFFRYDNVKKKFVCQLNVLSAIAVKKYTIDPLGYYHEVKSEKRLGTIPQEAKKHPKYRK

SEQ ID NO: 16275 - protein, 1071 aa, unidentified
  REGION 1..1071: note = Cas Enzyme sequence
MFFYRLGIDIGETSIGWFILKLNERMEVCDIVDGGVYIFPDGREAKSREPLSVSRRMARGIRRNNDRKKSRKRRLIRLLVETGIWSKSVEEQKKLESLDPFVLRQKAVNEKISLPELGRALFHLNQGRGFKSNRKSDGKESESGKIKQAVQALESQLAEQGCLTYGEYLYRRHEKRVSTKVRPTADSKGYEFYPTREMSEAEFDLIMARQQQYYPELTTEVVAALRDTIFFQRSLRPQAVGKCEFELQEYRASVWHPLFQRFRMLQEVNNLDLVKATKEEVGLTAEQKKKILLMLEDGACLNSKGILLFSKIRKKLDIPSTRKFNLQSDKRDGLQGDWAVWKLADEGCFGKSWFKMLPEKQLEVLELLQGAEDNVELKQKLIEQFGLDDSHAEKVTQVNLPDGYASLSLKAIKNILPYLEQGKVYSEACALAGYNHSDRRTGEIYDYLPYYGRILKSAVIGGRFEGEEPDVDEDIGLQEVYFGKINNPTVHVGLNQLRKVVNEIISRYGKPQQVVVELARELKLGVEGVRKLEKRQKENQKDNERIAEELACAGIPNTYQNRMMYKIWERLSENPAQRCCPFSGKLISATDLFSGAFEIEHLIPFSKSFDDSINNKVIAFRDANRFKAERTPYEAFGSSPGDYKWEEIVARSENLPREMQWRFSPNAMEKFADESGCLARMLTDTQYFARCALQYLEVICEDQSKDRKMAWGVPGQLTAMLRDKWGLNSLINPADRKDRSDHRHHAIDAFVVACTSRSLLKKMADAARLYEKTDEGEYKQIREKREKLIENMPLPFENFNREKLQQWVDGLVIAFKPDHGVQGQLHRDTCYGRIGKGSKKGSSVFAVTKDLLAVVEGSAKDGNKKINEIADVVIRGKLLDLLQGVEDKKQRQQLTEKFIAETGIRCVRCHIEKSDSVMIPVKDNDGRAYKYYESGNNSRADIYCATKGKDAGKWKCEIISTYYANQKDFVPEWRRKDPHAKLIMKLHINDMVAYDILNEETGLVERVIARVKKMTKGLVFLRGHLIAKEEGDKLSWGASANQMQEKNLRKVYVDAMGKVKDPMVKNERKVS

SEQ ID NO: 16276 - protein, 1055 aa, unidentified
  REGION 1..1055: note = Cas Enzyme sequence
LVFLQLDKKLEICDIVDGGVYIFPDGREAKSRDPLSVSRRTARGIRRNLDRKNNRKRRLIRLLEETGIWPDGIAEQKKLEALDPFVLRQKAVNEKISLPELGRALFHLNQRRGFKSNRKSDGKESESGKIKLAVQALETQLAEQGCRTYGEYLCRRHEKRISTKVRPMADSKGYEFYPTREMAEHEFDLIMSRQQQYHPELTSEVTEALRDVIFFQRSLRPQAVGKCELEPQENRAPVWHPLFQRFRILQEVNNLDLVKSTPDEIGLTAEQKKKILLMLQEGTGLNKQGLLLFTKIKSKLNIPTKRKFNLQSDKRPGLQGDWAAWKLSDDNCLGKGWFKMSPGRQVELLELLHNAEDDGKLKQDLIDLFGLNEEQAENVAKLNLPEGYASLSLKAIKNILPYLEQGKVYSEACTLAGYNHSDRRTGEIYDYLPYYGRILKSAVIGGRFEGEEPDVDEDIGLQEVYFGKINNPTVHVGLNQLRKVVNEIISRYGKPQQVVVELARELKLGVEGVRELEKRQKENQKDNEKIAEELERAGQPNTYQNRMMYKIWKRLAENPSQRCCPFSGRPISVSDLFSGAFEIEHLIPFSRSFDDSINNKVISSRDANRFKAERTPYEAFGSSPGNYKWEEIVARSENLPREMQWRFSADAMEKFAEEDGCLARMLTDTQYFARCALQYLEAICENQSKDRKMAWGIPGQLTAMLRDKWGLNSLINPADRKDRSDHRHHAVDAFVVACTSRSLLKKMADAARLYEKTDEGEYKQIREKREKLIENMPLPFENFDREKLQQWVNGLVIAFKPDHGVQGQLHRDTCYGYIEKGSNKGSSVFAVRKDLRAVVEGSAKDGNKKINEIADVAIRSKLLDLLQNVEDKKQRQQLTEEFMAETGIRRVRCHIEKSDSVMIPVRDNGGQIYKYYESGNNSRADIYCATKGKDAGKWKCEIISTYSANQKDFVPEWRRRDPHAKLIMKLHINDMVAYDELNKGTGQTERVIARVKKMTSGLVFLRGHLIAKEEGDKLSWGASANQMQEKNLRKVYVDAMGKVKDPMFKNERKVS

SEQ ID NO: 16277 - protein, 1054 aa, unidentified
  REGION 1..1054: note = Cas Enzyme sequence
MENKNLHYILGLDLGIASVGWSVVEIDEKENPLRLIDVGVRTFERAEVPKTGESLALSRRLARSARRLTQRRIARLKKAKRLLKSENILLSTDERLPHQVWQLRVEGLDRKLERQEWAAVLLHLIKHRGYLSQRKNESKSENKELGELLSGVASNHELLQQATYRTPAELAVKKFEVEEGHIRNQQGAYTHTFSRLDLLAEMELLFSRQQHFGNPFASEKLLENLTALLMWQKPALSGEAILKMLGKCTFEDEYKAAKNTYTAERFVWITKLNNLRIQENGLERALSDNERLALMEQPYDKNRLFYSQVRSILKLSDEAIFKGLRYSGEDKKAIETKAVLMEMKAYHQIRKVLEGNNLKAEWAELKANPTLLDEIGTAFSLYKTDEDISAYLAGKLSQPVLNALLENLSFDKFIQLSLKALYKLLPLMQQGLRYDEACREIYGDHYGKKTEENHHFLPQIPADEIRNPVVLRTLTQARKVINGVVRLYGSPARIHIETGREVGKSYKDRRELEKRQEENRKQRENAIKEFKEYFPHFAGEPKAKDILKMRLYKQQNAKCLYSGKPIELHRLLEKDYVEVDHALPFSRTWDDSFNNKVLVLANENQNKGNLTPFEWLDGKHNSERWRAFKALVETSAFPYAKKQRILSQKLDEKGFIERNLNDTRYVARFLCNFIADNMHLTGEGKRKVFASNGQITALLRSRWGLAKSREDNDRHHALDAVVVACSTVAMQQKITRFVRFEAGDVFTGERIDRETGEIIPLHFPTPWQFFKQEVEIRIFSDNPKLELENRLPDRPQANHEFVQPLFVSRMPTRKMTGQGHMETVKSAKRLNEGISVIKMPLTKLKLKDLELMVNREREKDLYDTLKARLEAFNDDPAKAFAEPFIKKGGAIVKSVRVEQIQKSGVLVREGNGVADNASMVRVDVFTKGGKYFLVPIYTWQVAKGILPNKAATQYKDEEDWEVMDNSATFKFSLHPNDLVKLVTKKKTILGYFNGLNRATGNIDIKEHDLDKSKGKQGIFEGVGIKLALSFEKYQVDELGKNIRLCKPSKRQPVR

SEQ ID NO: 16278 - protein, 1055 aa, unidentified
  REGION 1..1055: note = Cas Enzyme sequence
MENKNLHYILGLDLGIASVGWAVVEIDKKENPLRLIDVGVRTFERAETQKGESLALSRRSARSARRLTQRRVARLKKAKRLLKSENILLSTDERLPHQVWQLRVEGLDRKLERQEWAAVLLHLIKHRGYLSQRKNESKSENKELGALLSGVASNHELLQQATYRTPAELAVKKFEVEEGHIRNQQGAYTHTFSRLDLLAEMELLFSRQQHFGNPFASEKLLENLTALLMWQKPALSGEAILKMLGKCTFEDEYKAAKNTYTAERFVWITKLNNLRIQENGLERVLNDNERLMLIEQPYEKAKLTYAQVRSILNLSDEAIFKGLRYSGEDKKAIETKTTLMEMKAYHQIRKVLEGNNLKAEWVALKANPTLLDEIGTAFSLYKTDEDISAYLAGKLSQPVLNALLENLSFDKFIQLSLKALYKLLPLMQQGLRYDEACREIYGDHYGKKTEETHHFLPQIPADEIRNPVVLRTLTQARKVINGVVRLYGSPARIHIETGREVGKSYKDRHELKKRQEENRKQREKTISEIKTLFPNFSGEPKGKDILKMRLYYQQNAKCLYSGKPLELHRLFEQKYVEVDHALPLSRTWDDSFNNKVLVLANENQNKGNLTPFEWLDGKHNSERWRAFKALVETTAFSYAKKQRILSQKLDEKGFIERNLNDTRYVARFLCNFIADNMHLTGEGKRKIFASNGQITALLRSRWGLAKSREDNERHHALDAVVVACSTVAMQQKITRFVRFEAGDVFTGERIDRETGEIIPLYFPTPWQFFKQEVEIRIFSDNPKLDLENRLPDRPQANHEFVQPLFVSRMPTRKMTGQGHMETVKSAKRLNEGISVIKMPLTKLKLKDLELMVNREREKDLYDALKARLEAFNDDPAKAFAEPFIKKGGAIVKSVRVEQVQKSGVLVHAGNGVADNASGSIVRVDVFIKDRKYFLVPIYTWQVAKGILPNRAVIADTDENEWEMMDENSTFQFSLHPNDLIRVKTKKDEFWGYFNRLNRHTGGINIRTHDLEKSKGKQGIFEGIGVKIALSFEKYQVDELGKNIRLCKPSKRQAVR

SEQ ID NO: 16279 - protein, 925 aa, unidentified
  REGION 1..925: note = Cas Enzyme sequence
GYLSQRKNESKSENKELGALLSGVDNNHKLLQQATYRSPAELAVKKFEVEEGHIRNQQGAYTHTFSRLDLLAEMELLFSRQQHFGNPFASEKLLENLTALFMWQKPALSGEAILKMLGKCTFEDEYKAAKNTYTAERFVWITKLNNLRIQENGLERALSDNERLMLIEQPYEKAKLTYAQVRSILNLSDEAIFKGLRYSGEDKKAIETKTTLMEMKAYHQIRKVLEGNNLKAEWAELKTNPTLLDEIGTAFSLYKTDEDISDYLAGKLSQPVLNALLENLSFDKFIQLSLKALYKLLPLMQQGLHYDEACREIYGDHYGKKTKENHHFLPQIPADEIRNPVVLRTLTQARKVINGIVRLYGSPARIHIETGREVGKSYKDRRELEKRQEENRKQRENAIQEFKEYFPHFAGEPKAKDILKMRLYKQQNAKCLYSGKPIELHRLLEKGYVEVDHALPFSRTWDDSFSNKVLVLANENQNKGNLTPFEWLDGKHNSERWRAFKALVETSAFPYAKKQRILSQKLDEKGFIERNLNDTRYVARFLCNFIADNMHLTGEGKRKVFASNGQITALLRGRWGLAKSREDNDRHHALDAVVVACSTVAMQQKITRFVRFEAGDVFTGERIDRETGEIIPLHFPTPWQFFKQEVEIRIFSDNPKLELENRLPDRPQANHEFVQPLFVSRMPTRKMTGQGHMETVKSAKRLNEGISMIKMPLTKLKLKDLELMVNREREKDLYDALKARLEAFNDDPAKAFAEPFMKKGGAIVKSVRVEQVQKSGVLVREGNGVADNASMARVDVFTKDGKYFLVPIYTWQVAKGILPNKAVIQGKDEEDWADMSDATFKFSLHQNDLVKLVTKKKTIFGYFNGLDRATGSIAIKEPDLEKTKAKGGIYQSAGIKLALSFEKFQVDELGKNIRLCKPSKRQAVR

SEQ ID NO: 16280 - protein, 1052 aa, unidentified
  REGION 1..1052: note = Cas Enzyme sequence
MENKNLHYILGLDLGIASVGWAVVEIDKKENPLRLIDVGVRTFERAETQKGESLALSRRSARSARRLTQRRVARLKKAKRLLKSENILLSTDERLPHQVWQLRVEGLDRKLERQEWAAVLLHLIKHRGYLSQRKNESKSENKELGALLSGVASNHELLQQATYRTPAELAVKKFEVEEGHIRNQQGAYTHTFSRLDLLAEMELLFSRQQHFGNPFASEKLLENLTALLMWQKPALSGEAILKMLGKCTFEDEYKAAKNTYTAERFVWITKLNNLRIQENGLERVLNDNERLMLIEQPYEKAKLTYAQVRSILNLSDEAIFKGLRYSGEDKKAIETKTTLMEMKAYHQIRKVLEGNNLKAEWVALKANPTLLDEIGTAFSLYKTDEDISAYLAGKLSQPVLNALLENLSFDKFIQLSLKALYKLLPLMQQGLRYDEACREIYGDHYGKKTEETHHFLPQIPADEIRNPVVLRTLTQARKVINGVVRLYGSPARIHIETGREVGKSYKDRHELKKRQEENRKQREKTISEIKTLFPNFSGEPKGKDILKMRLYYQQNAKCLYSGKPLELHRLFEQKYVEVDHALPLSRTWDDSFNNKVLVLANENQNKGNLTPFEWLDGKNNSERWRTFKALVETSAFPYAKKQRILSQKLDEKGFIERNLNDTRYVARFLCNFIADNMHLTGEGKRKVFASNGQITALLRRRWGLAKSREDNDRHHALDAVLVACSTVSMQQKITRFVRFEEGNVFTGERVDRETGEIIPLYFPAPWELFREEVEIRIFSDDPKQDLENRLSDRPQANHEFVQPLFVSRMPTRKMTGQGHMETVKSAKRLNEGISVIKMPLTKLKLKDLESMVNREREKDLYDALKARLEAFNDDPAKAFAEPFMKKGGAIVKSVRVEQVQKSGVLVREGNGVADNASMVRVDVFTKGGKYFLVPIYTWQVAKGILPNKAVIQGKDEEDWEEIDDATFQFSLHPNDLISVKTKKDEFLGYFTGLNRHTGGINIRTHDLEKSKGKQGIFEGIGVKIALSFEKYQIDELGKNIRLCKPSKRQPVR

SEQ ID NO: 16281 - protein, 1056 aa, unidentified
  REGION 1..1056: note = Cas Enzyme sequence
MENKNLHYILGLDLGIASVGWAVVEIDEKENPLRLIDVGVRTFERAEVPKTGESLALSRRLARSARRLTQRRVARLKKAKRLLKSENILLSTDERLPHQVWQLRVEGLDRKLERQEWAAVLLHLIKHRGYLSQRKNESKSENKELGALLSGVASNHELLQQATYRTPAELAVKKFEVEEGHIRNQQGAYTHTFSRLDLLAEMELLFSRQQHFGNPFASEKLLENLTSLLMWQKPALSGEAILKMLGKCTFEDEYKAAKNTYSAERFVWITKLNNLRIQENGLERALNDNERLMLINQPYEKAKLNYAQVRSRLNLSDEAIFKGVRYSGEDKKAIETKTTLMEMKTYHQIRKVLEGNNLKAEWAELKANPTLLDEIGTAFSLYKTDEDISGYLAGKLSQPVLDVLLENLSFDKFIQLSLKALYKLLPLMQQGLRYDEACREIYGDHYGKKTEENHHFLPQIPADEIRNPVVLRTLTQARKVINGVVRLYGSPARIHIETGREVGKSYKDRRELEKRQEENRKQRENAIKEFKEYFPHFAGEPKTKDILKMRLYKQQNAKCLYSGKPIELHRLLEKGYVEVDHALPFSRTWDNSFSNKVLVLANENQNKGNSTPFEWLDGKHNSERWRAFKALIETSAFPYAKKQRILSQKLDEKGFIERNLNDTRYVARFLCNFIADNMHLTGEGKRKVFASNGQITALLRSRWELAKSREDNDRHHALDAVVVACSTVAMQQKITRFVRFEEGNVFTGERRDRETGEIIPLHFPAPWQFFKQEVEIRIFSDNPKLELENRLSDRPQANHEFVQPLFVSRMPTRKMTGQGHMETVKSAKRLNEGISVIKIPLTKLKLKDLELMVNREREKDLYKSLKARLEAFNDDPAKAFTESFVKNGWAIVKSIRVEKVQKSGVLVHAGNGVADNASGSIVRVDVFIKDRKYFLVPIYTWQVAKGILPNRAVIADTDENEWEMMDENSTFQFSLHPNDLIRVKTKKDEFWGYFNGLNRHTGGINIRTHDLEKSKGKQGIFEGIGVKIALSFEKYQVDELGKNIRLCKPSKRQPVR

SEQ ID NO: 16282 - protein, 1055 aa, unidentified
  REGION 1..1055: note = Cas Enzyme sequence
MENKNLHYILGLDLGIASVGWAVVEIDEKENPLRLIDVGVRTFERAEVPKTGESLALSRRLARSARRLTQRRVARLKKAKRLLKSENILLFTDERLPHQVWQLRVEGLDRKLERQEWAAVLLHLIKHRGYLSQRKNESKSENKELGALLNGVDNNHKLLQQATYRTPAELAVKKFEIEEGHIRNQQGAYTHTFSRLDLLAEMELLFSRQQHFGNPFASEKLLENLTALLMWQKPALSGDAILKRLGKCTFEDEYKAAKNTYTAERFVWITKLNNLRIQENGLERALSDNERLMLIEQPYEKAKLTYAQVRSILNLSDEAIFKGVRYFGEDKKAIEIKTILMEMKGYHQICNALKGNNLKAEWAELKENPALLDEIGTAFSLYKTDEDISAYLAGKLSQPVLNALLLKNLSFDKFIQLSLKALYKLLPLMQQGLRYDEACCEIYGDHYGKKTEETHHFLPQIPADEIRNPVVLRTLTQARKVINGVVRLYGSPARIHIETGREVGKSYKDRRELEKRQEENRKQRENAIKEFKEYFPHFAGEPKAKDILKMRLYKQQNAKCLYSGKPIELHRLLEKGYVEVDHALPFSRTWDDSFNNKVLVLANENQNKGNLTPFEWLDGKHNSERWRAFKALVETSAFPYAKKQRILSQKLDEKGFIERNLNDTRYVARFLCNFIADNMRLTGEGKRKVFASNGQITALLRGRWGLAKSREDNDRHHALDAVVVACSTVAMQQKITRFVRFEAGDVFTGERIDRETGEIIPLHFPTPWQFFKQEVEIRIFSDNPKLELKNKLPDRPQANHEFVQPLFVSRMPTRKMTGQGHMETVKSAKRLNEGISVIKMPLTKLKLKDLELMVNREREKDLYDALKARLEAFNDDPAKAFAEPFMKKGGAIVKSVRVEQVQKSGVLVREGNGVADNASMVRVDVFTKDGKYFLVPIYTWQVAKGILPNKAIVALKDENEWIEIDNNYIFLFSLYQNDLIKVKTKKDKFWGYFNGLNRHTGGINIRTHDLEKSKGTHGIFEGIGVKTALSFEKYQVDELGKNIRLCKPSKRQAVR

SEQ ID NO: 16283 - protein, 1056 aa, unidentified
  REGION 1..1056: note = Cas Enzyme sequence
MENKNLHYILGLDLGIASVGWAVVEIDEKENPLRLIDVGVRTFERAEVPKTGESLALSRRLARSARRLTQRRVARLKKAKRLLKSENILLSTDERLPHQVWQLRVEGLDRKLERQEWAAVLLHLIKHRGYLSQRKNESKSENKELGALLSGVASNHELLQQATYRTPAELAVKKFEVEEGHIRNQQGAYTHTFSRLDLLAEMELLFSRQQHFGNPFASEKLLENLTSLLMWQKPALSGEAILKMLGKCTFEDEYKAAKNTYSAERFVWITKLNNLRIQENGLERALNDNERLMLINQPYEKAKLNYAQVRSRLNLSDEAIFKGVRYSGEDKKAIETKTTLMEMKTYHQIRKVLEGNNLKAEWAELKANPTLLDEIGTAFSLYKTDEDISGYLAGKLSQPVLDVLLENLSFDKFIQLSLKALYKLLPLMQQGLRYDEACREIYGDHYGKKTEENHRFLPQIPADEIRNPVVLRTLTQARKVINGVVRLYGSPARIHIETGREVGKSYKDRRELEKRQEENRKQRENAIKEFKEYFPHFAGEPKTKDILKMRLYKQQNAKCLYSGKPIELHRLLEKGYVEVDHALPFSRTWDNSFSNKVLVLANENQNKGNSTPFEWLDGKHNSERWRAFKALIETSAFPYAKKQRILSQKLDEKGFIERNLNDTRYVARFLCNFIADNMHLTGEGKRKVFASNGQITALLRSRWGLAKSREDNDRHHALDAVVVACSTVAMQQKITRFVRFEEGNVFTGERRDRETGEIIPLHFPAPWQFFKQEVEIRIFSDNPKLELENRLSDRPQANHEFVQPLFVSRMPTRKMTGQGHMETVKSAKRLNEGISVIKIPLTKLKLKDLELMVNREREKDLYKSLKARLEAFNDDPAKAFTESFVKNGWAIVKSIRVEKVQKSGVLVHAGNGVADNASGSIVRVDVFIKDRKYFLVPIYTWQVAKGILPNRAVIADTDENEWEMMDENSTFQFSLHPNDLIRVKTKKDEFWGYFNGLNRHTGGINIRTHDLEKSKGKQGIFEGIGVKIALSFEKYQVDELGKNIRLCKPSKRQPVR

SEQ ID NO: 16284 - protein, 1054 aa, unidentified
  REGION 1..1054: note = Cas Enzyme sequence
MENKNLHYILGLDLGIASVGWAVVEIDEKENPLRLIDVGVRTFERAEVPKTGESLALSRRLARSARRLTQRRVARLKKAKRLLKSENILLSTDERLPHQVWQLRVEGLDRKLERQEWAAVLLHLIKHRGYLSQRKNESKSENKELGALLSGVASNHELLQQTTYRTPAELAVKKFESEEGHIRNQQGAYTHTFSRLDLLAEMELLFSRQQHFGNPFASKKLLENLTALLMWQKPALSGEAILKMLGKCTFEDEYKAAKNTYTAERFVWITKLNNLRIQENGLERALSDNERLMLIEQPYEKAKLTYAQVRSILNLSDEAIFKGVRYSGEDKKAIETKTTLMEMKAYHQIRKVLEGNNLKAEWAELKANPTLLDEIGTAFSLYKTDEDISAYLVDKLSQPVLNALLENLNFDKFIQLSLKALYKLLPLTQQGLRYDEACREIYGDHYGKKTEENHHFLPQIPADEIRNPVVLRTLTQARKVINGVVRLYGSPARIHIETGREVGKSYKDRRELEKRQEENRKQRENAINEFKEYFPHFTGEPKAKDILKMRLYKQQNAKCLYSGKPIELHRLLEKGYVEVDHALPFSRTWDDSFNNKVLVLANENQNKGNLTPFEWLDGKHNSERWRAFKALIETSAFPYAKKQRILSQKLDEKGFIERNLNDTRYVARFLCNFIADNMHLTGEGKRKVFASNGQITALLRSRWGLAKSREDNDRHHALDAVVVACSTVAMQQKITRFVRFEAGDVFTGERIDRETGEIIPLHFPTPWQFFKQEVEIRIFSDNPKLELENRLPDRPQANHAFVQPLFVSRMPTRKMTGQGHMETVKSAKRLNEGISMIKMPLTKLKLKDLELMVNREREKDLYDTLKARLEAFNDDPAKAFAEPFMKKGGAIVKSVRVEQVQKSGVLVREGNGIADNASMVRVDVFTKDGKYFLVPIYTWQVAKGILPNKAIVALKDENEWIEIDNNHIFLFSLYQNDLIKVKTKKDELFGYFNSLNRATAAIDIKVHDLDKSKGKNGIYQSVGVKLALSFEKYQIDELGKNIRLCKPSKRQPVR

SEQ ID NO: 16285 - protein, 931 aa, unidentified
  REGION 1..931: note = Cas Enzyme sequence
  REGION 2..5: note = misc_feature - Xaa can be any naturally occurring amino acid
VXXXXLSQRKNESKSENKELGALLSGVASNHELLQQATYRTPAELAVKKFEVEEGHIRNQQGAYTHTFSRLDLLAEMELLFSRQQHFGNPFASEKLLENLTSLLMWQKPALSGEAILKMLGKCTFEDEYKAAKNTYSAERFVWITKLNNLRIQENGLERALNDNERLMLINQPYEKAKLNYAQVRSRLNLSDEAIFKGVRYSGEDKKAIETKTTLMEMKTYHQIRKVLEGNNLKAEWAELKANPTLLDEIGTAFSLYKTDEDISGYLAGKLSQPVLDVLLENLSFDKFIQLSLKALYKLLPLMQQGLRYDEACREIYGDHYGKKTEENHHFLPQIPADEIRNPVVLRTLTQARKVINGVVRLYGSPARIHIETGREVGKSYKDRRELEKRQEENRKQRENAIKEFKEYFPHFAGEPKTKDILKMRLYKQQNAKCLYSGKPIELHRLLEKGYVEVDHALPFSRTWDNSFSNKVLVLANENQNKGNSTPFEWLDGKHNSERWRAFKALIETSAFPYAKKQRILSQKLDEKGFIERNLNDTRYVARFLCNFIADNMHLTGEGKRKVFASNGQITALLRSRWELAKSREDNDRHHALDAVVVACSTVAMQQKITRFVRFEEGNVFTGERRDRETGEIIPLHFPAPWQFFKQEVEIRIFSDNPKLELENRLSDRPQANHEFVQPLFVSRMPTRKMTGQGHMETVKSAKRLNEGISVIKIPLTKLKLKDLELMVNREREKDLYKSLKARLEAFNDDPAKAFTESFVKNGWAIVKSIRVEKVQKSGVLVHAGNGVADNASGSIVRVDVFIKDRKYFLVPIYTWQVAKGILPNRAVIADTDENEWEMMDENSTFQFSLHPNDLIRVKTKKDEFWGYFNGLNRHTGGINIRTHDLEKSKGKQGIFEGIGVKIALSFEKYQVDELGKNIRLCKPSKRQPVR

SEQ ID NO: 16286 - protein, 1008 aa, unidentified
  REGION 1..1008: note = Cas Enzyme sequence
VPKTGESLALSRRLARSARRLTQRRVARLKKAKRLLKSENILLFTDERLPHQVWQLRVEGLDRKLERQEWAAVLLHLIKHRGYLSQRKNESKSENKELGALLNGVDNNHKLLQQATYRTPAELAVKKFEIEEGHIRNQQGAYTHTFSRLDLLAEMELLFSRQQHFGNPFASEKLLENLTALLMWQKPALSGDAILKRLGKCTFEDEYKAAKNTYTAERFVWITKLNNLRIQENGLERALSDNERLMLIEQPYEKAKLTYAQVRSILNLSDEAIFKGVRYFGEDKKAIEIKTILMEMKGYHQICNALKGNNLKAEWAELKENPALLDEIGTAFSLYKTDEDISAYLAGKLSQPVLNALLLKNLSFDKFIQLSLKALYKLLPLMQQGLRYDEACCEIYGDHYGKKTEEPHHFLPQIPADEIRNPVVLRTLTQARKVINGVVRLYGSPARIHIETGREVGKSYKDRRELEKRQEENRKQRENAIKEFKEYFPHFAGEPKAKDILKMRLYKQQNAKCLYSGKPIELHRLLEKGYVEVDHALPFSRTWDDSFNNKVLVLANENQNKGNLTPFEWLDGKHNSERWRAFKALVETSAFPYAKKQRILSQKLDEKGFIERNLNDTRYVARFLCNFIADNMRLTGEGKRKVFASNGQITALLRGRWGLAKSREDNDRHHALDAVVVACSTVAMQQKITRFVRFEAGDVFTGERIDRETGEIIPLHFPTPWQFFKQEVEIRIFSDNPKLELKNKLPDRPQANHEFVQPLFVSRMPTRKMTGQGHMETVKSAKRLNEGISVIKMPLTKLKLKDLELMVNREREKDLYDALKARLEAFNDDPAKAFAEPFMKKGGAIVKSVRVEQVQKSGVLVREGNGVADNASMVRVDVFTKDGKYFLVPIYTWQVAKGILPNKAIVALKDENEWIEIDNNYIFLFSLYQNDLIKVKTKKDKFWGYFNGLNRHTGGINIRTHDLEKSKGKQGIFEGIGVKTALSFEKYQVDELGKNIRLCKPSKRQAVR

SEQ ID NO: 16287 - protein, 1053 aa, unidentified
  REGION 1..1053: note = Cas Enzyme sequence
MENKNLHYILGLDLGIASVGWAVVEIDEKENPLRLIDVGVRTFERAEVPKTGESLALSRRLARSARRLTQRRVARLKKAKRLLKSENILLSTDERLPHQVWQLRVEGLDRKLERQEWAAVLLHLIKHRGYLSQRKNESKSENKELGALLSGVDNNHKLLQQATYRSPAELAVKKFEVEEGHIRNQQGAYTHTFSRLDLLAEMELLFSRQQHFGNPFASEKLLENLTALFMWQKPALSGEAILKMLGKCTFEDEYKAAKNTYTAERFVWITKLNNLRIQENGLERALSDNERLMLIEQPYEKAKLTYAQVRSILNLSDEAIFKGLRYSGEDKKAIETKTTLMEMKAYHQIRKVLEGNNLKAEWAELKTNPTLLDEIGTAFSLYKTDEDISDYLAGKLSQPVLNALLENLSFDKFIQLSLKALYKLLPLMQQGLHYDEACREIYGDHYGKKTKENHHFLPQIPADEIRNPVVLRTLTQARKVINGIVRLYGSPARIHIETGREVGKSYKDRRELEKRQEENRKQRENAIQEFKEYFPHFAGEPKAKDILKMRLYKQQNAKCLYSGKPIELHRLLEKGYVEVDHALPFSRTWDDSFSNKVLVLANENQNKGNLTPFEWLDGKHNSERWRAFKALVETSAFPYAKKQRILSQKLDEKGFIERNLNDTRYVARFLCNFIADNMHLTGEGKRKVFASNGQITALLRGRWGLAKSREDNDRHHALDAVVVACSTVAMQQKITRFVRFEAGDVFTGERIDRETGEIIPLHFPTPWQFFKQEVEIRIFSDNPKLELENRLPDRPQANHEFVQPLFVSRMPTRKMTGQGHMETVKSAKRLNEGISMIKMPLTKLKLKDLELMVNREREKDLYDALKARLEAFNDDPAKAFAEPFMKKGGAIVKSVRVEQVQKSGVLVREGNGVADNASMARVDVFTKDGKYFLVPIYTWQVAKGILPNKAVIQGKDEEDWADMSDATFKFSLHQNDLVKLVTKKKTIFGYFNGLDRATGSIAIKEPDLEKTKAKGGIYQSVGIKLALSFEKFQVDELGKNIRLCKPSKRQAVR

SEQ ID NO: 16288 - protein, 1052 aa, unidentified
  REGION 1..1052: note = Cas Enzyme sequence
MENKNLHYILGLDLGIASVGWAVVEIDKKENPLRLIDVGVRTFERAETQKGESLALSRRSARSARRLTQRRVARLKKAKRLLKSENILLSTDERLPHQVWQLRVEGLDRKLERQEWAAVLLHLIKHRGYLSQRKNESKSENKELGALLSGVASNHELLQQATYRTPAELAVKKFEVEEGHIRNQQGAYTHTFSRLDLLAEMELLFSRQQHFGNPFASEKLLENLTALLMWQKRALSGEDILKMLGKCTFEDEYKAAKNTYTAERFVWITKLNNLRIQENGLERALSDNERLMLIEQPYEKAKLTYAQVRSILNLSDDAIFKGVRYSGEDKKAIETKTTLMEMKAYHQIRKVLEGNNLKAEWVALKANPTLLDEIGTAFSLYKTDEDISAYLAGKLSQPVLNALLENLSFDKFIQLSLKALYKLLPLMQQGLRYDEACREIYGDHYGKKTEETHHFLPQIPADEIRNPVVLRTLTQARKVINGVVRLYGSPARIHIETGREVGKSYKDRHELKKRQEENRKQREKTISEIKTLFPNFSGEPKGKDILKMRLYYQQNAKCLYSGKPLELHRLFEQKYVEVDHALPLSRTWDDSFNNKVLVLANENQNKGNLTPFEWLDGKNNSERWRTFKALVETSAFPYAKKQHILSQKLDEKGFIERNLNDTRYVARFLCNFIADNMHLTGEGKRKVFASNGQITALLRRRWGLAKSREDNDRHHALDAVLVACSTVAMQQKITRFIRFEAGDVFTGERIDRETGEIIPLHFPTPWQFFKQEVEIRIFSDNPKLELENRLPDRPQANHEFVQPLFVSRMPTRKMTGQGHMETVKSAKRLNEGISMIKMPLTKLKLKDLELMVNREREKDLYDALKTRLEAFNNDPAKAFAEPFMKKGGAIVKSVRVEQVQKSGVLVRQGNGVADNASMVRVDVFTKDGKYFLVPIYTWQVAKGILPNKAVIQGKDEEDWEDIDDATFQFSLHPNDLISVKTKKDEFLGYFNGLNRHTGGINIRTHDLEKSKGKQGIFEGIGVKIALSFEKYQIDELGKNIRLCKPSKRQPVR

SEQ ID NO: 16289 - protein, 1049 aa, unidentified
  REGION 1..1049: note = Cas Enzyme sequence
MENKNLHYILGLDLGIASVGWAVVEIDKKENPLRLIDVGVRTFERAEVPKTGESLALSRRLARSARRLTQRRVTRLKKAKRLLKSENILLSTDERLPHQVWQLRVEGLDRKLERQEWAAVLLHLIKHRGYLSQRKNESKSENKELGALLSGVASNHELLQQATYRTPAELAVKKFEVEEGHIRNQQGAYTHTFSRLDLLAEMELLFSRQQHFGNPFASEKLLENLTALLMWQKPTLSGEDILKMLGKCTFEDEYKAAKNTYTAERFVWITKLNNLRIQENGLERALSDNERLMLIEQPYEKAKLTYAQVRSILNLSDDAIFKGLRYSGEDKKAIETKTTLMEMKAYHQIRKVLEGNNLKAEWAELKANPTLLDEIGTAFSLYKTDEDISAYLAGKLSQPVLNALLENLSFDKFIQLSLKALYKLLPLMQQGLRYDEACREIYGDHYGKKTEENHHFLPQIPADEIRNPVVLRTLTQARKVINGVVRLYGSPARIHIETGREVGKSYKDRRELEKRQEENRKQRENAIKEFKEYFPHFAGEPKAKDILKMRLYKQQNAKCLYSGKPIELHRLLEKGYVEVDHALPFSRTWDDSFNNKVLVLANENQNKGNLTPFEWLDGKHNSERWRAFKALVETTAFPYAKKQRILSQKLDEKGFIERNLNDTRYVARFLCNFIADNMLLTGEGKRKVFASNGQITALLRSRWGLAKSREDNDRHHALDAVVVACSTVAMQQKITRFVRFEEGDVFTGERIDRETGEIIPLHFPTPWQFFKQEVEIRIFSDNPKLDLENSLPDRPQANHEFVQPLFVSRMPIRKMTGKAHEETLRSPKKLSEGKSIKKERLSNLKLTDLERMVNKEKEPELYQSLKEHFSKYGDYSKEKFFKKGGTEVKSIRLYKTQNKYVELNNGKTIADNGDIVRVDVFKKEKKYHAVNIYAWQVAKGILSKETSTGLFLDDNYIFQFSLFKNDLIKIPDPNNKSEYLFAYFIRPDDEPRWILKLQDNAIIPDGFSKKEKNSFRFSFKNQSFIEKYHIDELGKNINLCKRSKRQAVR

SEQ ID NO: 16290 - protein, 1058 aa, unidentified
  REGION 1..1058: note = Cas Enzyme sequence
MMERILGIDLGIASLGWSVIQYDKECDENNKIVDCGVRLFTAAETPKEKESPNKARRDARGLRRVIKRRRGRMNEVKKLCIAHGLLDENDLSLEDGIFNSDANRSDVWMLRHDALYRILNGNELARILIHISKHRGFKFIGDDETDEESGKVKTAGKNLREQFTQDNCETVGEWLWKQRGLQGKKRNKSGDYEISIPRDFQEREIKVIFEKQQNLGSTLATNELRDEWLNIALYVRPMQSIEKMVGTCTYFPNEKRAPKSAPTTERSVAVQKFFSTVITDNEENEKKIIEHKTVQELLNFATSKEKLDYKQLRKFLGLSEHQIFKGLTYKGKPKKAKKGEEDQPLEWEFDKAEAEKKVWINLKGHTKFKEALGSDKFDLLLENIDLADKIATVLTYFKDERQKKDELTKLSLESDMIDTLSKISFTDFNQLSLKAIKAILPEMMNGKRYDEAIGILGKPANEKSIFLPPLKDTDIAILNPTVIRAFAQFRKVANALVKKYGSFDKVHFELAREVNTKGDIDNIKKGIAKNTKERAEANKWITENFTGTPTTRKNILKKRLFEQQAEICPYTGERIKLELLFDEGYCEIDHILPRSRSADDSQANKVLCMSKANQDKTNRTPFEWFGHDNERWERFEARMGASSNLAKMGKGKVTRLLKKNFDENSEKEFVSRNLNDTRYMSKAIKTYCENYWLLSSDDDKLRIQVRSGKLTSALRHQWGLDTKNRDTHTHHAADAIMIAFSTQGMVQRLSQYYAAKETRYEKEKPTLKSPMENFRECVEDALALERTETIIAKDGREIQLNRLIISRPPRASVTGQAHEQTAKPYPRIKQIKNKYKRRLTPIDEDKFESFKNDKIASGNDKNFYNASTIPRVDIYKKGDKYHVVPVYLSDMAEQVIPNKSLGTNPEALDEEYFCFSVFKNDIIEVETKATPKKPAKKVMGYFRQLNGANFVLNSINNAPIDSFICSPITIDKRQKDMCKKCPEENKAIGHCPKETLEFWEAEKVKLPKKDFECDQGIKFAVTVRKYAIDPLGYYHEVRTEKRLGTIPQEAQKRKKSHK

SEQ ID NO: 16291 - protein, 1060 aa, unidentified
  REGION 1..1060: note = Cas Enzyme sequence
MDTSNNFNPYVLGLDLGSNSIGWAMIKLDENDNLCGIEKVGVRVFEAGMEGQYESGKEESRNKKRREARLVRRQIERRSRRYRKLANLLQKIGLLPDGNMNNSLERQNILDNLDKELRSKYIDANLPESEKNRLNQIFIYYLRSLAVEQELEPYALGRVLYHLGQRRGFLSNRRGQKQDDEERGKVKQGIAEIRQEMEKLGAETLGRYFAKIDPVEKRIRGRWTARDMYEQEFYAIWEHQSKYYPEILNDTNKKQVFHVIFYQRPLKSQKEKIGYCQFECIARGAQRNRRRAPWVILKAQRFRLLQKLNDLLIIENKFTKRALTEDERTLVIDYLEKNGDATFAELKKLLKLPKTIKFNLEEGGEKKIPGNRTTGAIRAVIGDLWDNMSAESKDKLVEDIYSIVSNKALKKRLINHWKFTEEQAEKLSDMGIEDGYCNLSRQAIDKFLPGLESGTPYSTLVKEIYGMDDIDTTVELLPPLESAPIGEIRNPTVTRTLSEMRKIVNELVKRYGKPKYIRIETARDLRNTKKEREKIWKNNRELEEVRAKIKKDLISKGISNPTNDDIERYMLAEECNWVCPYTGRSISFHALFEESQFDIEHIIPLSRCLDNSFKNKTLCYHEENRNRKHNRTPFEVYGTNETQWDEILRRVEKFNSRHAVEKLRRFKMQGEELDEFIDNFSSSQLNDTRYSAKEARLYCALLYGKEYRKHVFTVSGPTTAIIRRMWDLNKILGSPEKNREDHRQHAIDAIVIALTSPAMIKSISEQAEKIPKDTRKHDRWWRFITPPWNTIFNEAHEKVLNIIVSHRPERKVSGRLHEETNYSPPKPGDKNGETVVHVRKALASITKGEIEEIVDPIVRDVVKKKLEELGGDPKKAFNDPANYPLMPNKKGLHIPIRHVRVRKKLSVFPVGKNERVRYVATDENHHIEIFETKDKKGRTIWDANVVSMYTAMQRKRRGEEIIQRKLIRDGKVVEDAKFLFSLCKGDMVYMKNSDGEFEYYTVVTVSEYASGSKVMFFIQHFVAKRPKSWVGLTRYPTTLQISEAKKCSINVLGEVQIAHD

SEQ ID NO: 16292 - protein, 1070 aa, unidentified
  REGION 1..1070: note = Cas Enzyme sequence
MDYILGLDLGETSLGWCIIETKDGNPYRFENFGVRIFSDGRESKSKEPLSVARRTARGMRRRRDRYVMRRDTLMQKLIEYGFMPADKNERKALEKLDPYELRTRALDERLTSYELGRALFHINQRRGFKSNLKTDKKDADSGAMKSAISETRAKMAQAKARTLGEYLYQMNKDKTSTQNFVPVRAKSVVNKGKASYPLYPDRAMYEEEVRLILKNQNIDPVITDDLFQTIFFQRPLKMPEPGFCSFEENERRAYCALPAYQQFRLLQQINQLVLLYDDGECPLTAEERSTLYHYAAEDFSRLDKRKRLLTWSAAKKILKPFGVNPKVSFNLESEQRKGLDADSTSAWLSDETCFGKRWFSFEAQKQNEIVQLLINAQNEETLVKEIISEYGVNEEQAKNIVSAPLADGTASLSLKAINKINPFLRQGQKYHDAVGSAGYTFSLKTKGILPEHYDAFINPETGDIYTELPYYGEALPKHVIGGTYAAADRGNPEVYYGKINNPTVHIALNQVRKLINKLVNRYGHPDEIVVELARELKLGKKQKEELNKELVQNTKENERIARELERLNVKDSYDNRMKYKLWEDLSDNPLQRVCPFCGKPIGHADLFSDKFEIEHLLPFSRSYSDARTNKVISCRECNREKGNRSPWEAFHTDGVRWNEILARVENFSTKSDPKKSRAKKFREDAFEDLNDVLARMLTDTQYMAKIARQYLCFAAHPTKVRGIPGRLTAQLRHHWGLENLFPDDQKDRSDHRHHAVDAFVVACTGRGTLQRYATERRDYYVAKMPQEKAPHLPYPDFRLADIQAAFDNMAISHKPDHGNPQLAIKQGKTVAKLHEETYYGMAGEGDKKGTWKLIQRLPVSEFKTITDLDCIIDQSGTANPIRALLDGKEKSEHEGVIQKYFADRGTHKVRTYRERSKEVVVPFTDKNGKPYRYAIYGGNAYAEIYCPDRGKNAGKWQIEIIPNYCAHQKGFVPQWRHTDAHAKLIMRLHIDDMVAYEKDGKTVIARVKKMSGSRVYIRENKIAKEEADKLSWGAYPSGMQAGNMRKITVTIDGRVIDPKRPKADEHGSDN

SEQ ID NO: 16293 - protein, 1070 aa, unidentified
  REGION 1..1070: note = Cas Enzyme sequence
LEKYKICDGKIIDTGVRTFQVPQDRQKKSLALKRGLARRSRKTIRRKARRLKSLVKLAREFNLITGDFNHDNVLKPKKGDKEKKWDIWFIRKEALERKLTDKEFFRVLYHIAKHRGFYFHTKSEELKKEEKGSETGKVKAGLIRIRNKFEDSNWKTVGQMFWEEFNQINTENKRKRNAKDKYQNSIPRLLLKEEIKAIFKRQKELRNPKAKEKFKLRYIDEILMNEESIDEYRLQKMMNKCEFIKDELCAPKESYTAERFTLFNRLNTLELVDTNNKDRHLALDDTQRNKIEALSYKNTKVTFAKIRTELGLQDDLHIRFNLCSYSEKNPEYNKRIECEIKKGQLQFDQKHKVPIVHINSGEIRALDREIKKIFHSKKLWPNSKKIHVYYSDIRKQLNLSDDFRFADIIRGYTKSVSELGSEAKYIKQFEKDTFVELKGYHKIKKAVVEHDSENKWAELAADTNSLDIIAEALVYHKSDKTRTEYLEQNGFVDKDIIDAVLTINMKQLANYSIEAIRKLLVFIEKGDLFNDAKEKAGFGKIEYEKQPILKPYNDFFENNPVVARVISQTRKIVNAIVRKYNSKYPIDQIHIEIATELASSEQRKIKIQQGQNRYREDKEAASERCREAGIDPEEGQNLLMFRLAEQQNYFCPYTGTKITLYPTGAANEVYIRDCEIDHVIPMSRSFNDSLNNKVLCTQKANQDKRDRIPFEWFEEMYGKDCRKWAEYEYTVKKMYGMPYPKRINLLRKSWTDKDKEKFLSRNLNDTRYAEKHIANYLRKHFDFSKSLRDDIKDVNRIQVRSGGITAFLRHMWGLNKNRSENDLHHAIDALVVACSTYGHVYLVSNLSKAIERKGKNWYKHFGRDKFKPWTNIRDDIQDAVDNVFVSRMPRHTVTASAHKDTIISKGKANKKRIIEINSGYAEMGDMVRADMFVDKDGKNYIVPIYTIDIFSNKPLPEKYLNKNNASYDQWPSINEGKLKFRFSLFKDDLISINNQMYYVDYTRATRSKISIKKVDGSLINKMKGEKTKETGYRNVELKKYSVDMLGKYKEIKQEKRLSNRFEHQNKALQN

SEQ ID NO: 16294 - protein, 1090 aa, unidentified
  REGION 1..1090: note = Cas Enzyme sequence
MSYRPPSYSNNSFAFDVGTNSIGWCVFDLDETRQPIRVRDCGVRIFSDGRDPKSRTSLAVARREARAMARSRDRYLRRRKKTLSVLTEYGLMPADDAERKRLLAETVDHPAGSDIPKTDPYNLRLRALTGKLPLFQIGRALFHLGQRRGFKSNRKTDKKSNDKGKIDVGIGELKKQIQEAGAATLGAYLATRRSQGHVVRIRAGSEASGEADGYAFYPERSMLEDEFHKIWEAQSAFYPDVLTAGRRDHLFKVIFYQRPLKKPKIGRCSFNPNEERLAKAHPLFQEFRLYKEVNELGVRMPDMSIRKLTVEERDTLVSLLRPKRKIAFSTLRKALKLPAGVTFNKESESRKDIAGDEIYAAMSDKKLFGPQWADFSQEKQWDVIGHLREEEEPQALREWLYSNFRLDDAQVEAVADARLPEGYGRLGQSALAAMLEELKSDVIPEAKAAENCGYDHSLFNRDNEGLDKLPCYQEVLERHIPPGTGDPDDIYDIQKGRITNPTVHIGLNQLRKITNALLRKYGKPVEIAVELARDLQLSDKQKREVNSKIAENTRAARGRSEKLKELGQHDNGYNRQLLKLWEELNEKPENRICIYSGRPINIGMLFSGEVDIDHILPWSRTLDDSQANKLLCLKKYNREKGNHAPAEVTEWANKYDKIIERASCLPKNKQWRFAHDAMQRFEKEGGFLARQLTDTQYLSRMALEYLNALYPAEEPDKDGVFQRRKHVRVVPGRLTELLRRNWGLNSILADHNIANTNHLKNRSDHRHHAIDAAVVGVTSQSLLQKISSAAARPEGVDFENSIKRIVAASLPWQGFRDNLEQAINILVVSHKADHGTVSRAGYGKGEGQTAGQLHNETAYGLTGEKDEKGNTIVVRRKLFLSLKAKDIDSIRDEDLKAELYTAVAGLAEDKQFQEALLHFQKNHKRYKGIRRVRVTETLNVIPIRNAQGLIYKGYKGDANYRYDVWKTLDDKWIGEVISMFEIHQPGWKSKVHSENPTAKKVLSLHQNDMVAYDHPDDGYTIARVVKFDINKNIVFAPHFEADVDKRSRDKDDPFKYFTKTPNGLKKIHCRQVRIDPVGKVFDPGLILRNR

SEQ ID NO: 16295 - protein, 1052 aa, unidentified
  REGION 1..1052: note = Cas Enzyme sequence
MQYILGLDIGITSVGWCVLESNENLEPKRIEDLGVRLFNRAENPKTGASLALPRRMARGSRRLLKRKRTRMKQIKNLLINMGLISLEKLHSCFSNYHEPFDSPWLLRAKALDEIVSEQDFARILIHIAKRRGFKSPRKTMREDEESGKVKSAIQENRKLLEAGSYRTVGEMFYKDPKFENHKRNKGSYEFCVARSMLVEEVKEIFKHQASFGNKFASQSLLDQYLGIFTRVCEPQDEYDAVGNCTFEKNEKRAPMMCYSTELFMLYQKINNLTLLENYKPLKLNNEQRAAIIDMAFHQKDIKFSQIRKKLGLDETIIFKGLSGSKKDVQTAEKKKFVELKFWHMMKKHFENNHPELWLELCNDIDKLDVIGQGLTYFKKKESIRNFFKKNEFTDSMIEACMELDFNGVASLSLKAIKRLLPFLSHGMVYSEACAAAGYNHSIPLDGQNFRKYLPQIADDITNPVVKRALIQSRKVVNAIVKKYGSPLRINIELARELGKNFSDRKEIQKKQEESQKTKEKTVESLKENFGIIARGSDVLKQRLYEEQNSKCVYCRTPFDLHRVITEPGYVEIDHAIPFSRSFDNSYNNKVLACQKCNQEKKDRTPFEFLGHNQLIWEEFEAWVKAIYFGKLYRKGVRLLTEEFGPDQESEFKERNLVDTRYITSYFASFLRNNLTFKESSKKKKVLSVNGAITAMLRGCWGLAKSRDNHLHHALDAAVVSTTTDSLIKRITDHFKRKETWSFNNHEAIKERLPIPYECFRDELLARLSDDPVNTLKSLDLYNYEGLNLESIKPVFISRKPEKKETGAAHQETIRSKKKVATKGVSTIRKPVDENLTADMIERIVDKEGGSKWIYEQLKAKLAAAEGKSKVAFKPPVIIKKAGEDHLIRRIKIEETCKSGIEVNNGIANNGDIIRIDVFTERKPKKKGKYYVIPIYASDAIKDQLPNRAIVANKEEADWTLMDENFLFKFSLYPNELFYLKSKNYDGFGYYTGVDRATSAISFSEATPEGKTLRVSPKSADVFEKWSVDVLGNYCKAINQKRKKLRGIRNRKL

SEQ ID NO: 16296 - protein, 1058 aa, unidentified
  REGION 1..1058: note = Cas Enzyme sequence
MRYILGLDVGIASVGWAVLDPDAERIVDLGVRAFQAAESPKNGAPLAEPRRLARSARRRLRRRAGRLRRIKELFVRRGLIPQSEIEMAFQVQNGKPDPWQLRAEGLDRLLTPQELARALFHIAKYRGFKSNRKNIKDAKDGEEGKMLASVQANTQMLREKGYRTAGEMLYKDEQFQECKRNKAGSYKNTLDRAILEDEINTLFECQRKLGSQFATTELQEEYLELFRWQMPFASGDDILRKVGKCTFEPDEYRAPKSMPTVERFVLFQKLNQLTYYQNGDRQQLTAHQREAVLKEAYKRGEIKYAHIRKILNLSDDVRFCGLQYVQKKKGVTTESLECENRALCPMHGYRALKKALSEAGTWDKYSEDFETLDHLAAALTLYKTDEDLRKYLDEKGIEPALVEAIASIPSFTGFSHLSRKAILKILPHLEDGYKYHEACAKAGYNHSRPVQLDKSEKLPPINADEIRNPVVLRALTQARKVINAVIARYGSPYRVHIELARDIGRTYEERSKIAREQEENRKAREEEKQHLRELIGDPSFEPSGEDILKYRLYREQNGQCAYSQKPLEISRLPEPGYAEIDHILPYSRSFDDAYTNKVLVLGSENRQKQNRTPFEYFGSDEQRWSKFENWVHANIRNYEKREKLLRKDFDQEAEEKFIKRNLNDTRWIGRYLKNFIANTLIFADPAEKVPVVCMNGQVVALARGLWGLSKQREEDDLHHAVDAACVAALTQELVKRITEYRKLREIGRLHPGEDSVVDTRTDEVIEFVGARNFAFPQPWKLFRKELIARLSSDPVSEMEKLGLQAPEGTDLRRVIVSRAPYRKALRQLHEETIRSRKHIADTGQSTVRKPLTELTEKGLDCLLARETDPRLYSAIRERMEQYGNDAKKAFAEPLYKPTKDGKPGPLVRRVKICQTQNSGVYVRGGIADNSSMIRIDISTRHEKGKTKWRATPIYSKDVAAGNIPDVPGDFMFSLYPYDLVRIVANGKEHFGYYRGYDVNRNSIEICDPNNAKTRDRVPFSQATIFEKYTVGLLGDYHLVKREKRVGVAGNCNTESSQT

SEQ ID NO: 16297 - protein, 1063 aa, unidentified
  REGION 1..1063: note = Cas Enzyme sequence
MCKGGKIGMKYLLGLDIGITSVGWAVLNLDAKRIENLGVRAFNAAEDPQSKAPLAEPRRLARSMRRRLRRRAGRLRRAKELFVQYGLVASERDDDIFLTKEKDAPTPYEIRAKGLDHLLTGEEFARALFHIIKRRGFKSNRKKAAPDNQDDKRMLGSISENRRIMEEKGYRTVGEMLCLDEKFRDKKRNGQDSYENTFDREMMEDEIKVLFSRQRELGSQFASEEFEESILQVFNWQMPFASGDKILKLTGKCTFESDELRAPKYSYHAERFTLLQSLNNLRYTVNGDVLQLDAEQKKQIIEMAYTLKQVTYKQIRNALGLPEAARFNSLRYLHRNKDTKQMEESLDCEKSKFVEMKGYHAIKEACESAGVWDKVKNSPDLMDDIAFALTFYKTDEDISRYLEDKSVDPQVIDAVLGCGQQFSGVKHISTKAIKKLIPYMENGLRYDEACAAVGYDHSNPRSSNRSYKLPVVGDAVSTNPVVRRALSQARKVVNAIIDRYGSPYIIRIELAREMGKSAEKRNEIKRQQDENARLREERRREFIEKFGREPSGEDVLKYRLYVEQGGKCAYSLQPIDINRLFEPGYTQIDHIIPYSRSFDDSMSNKVLCLGSENQKKRDRIPYEVFGHDQKRWEEYERIVPAMFKDLKKRRNLLCKEFNEDEWKERSLSDTKWIAREFANFVREHLQFADPEVKKPVRCVNGQVVAYMRRLWGLEKHREEDDLHHALDAAVIATITDWQIQAITDYAKASENPDYLPYYVDEYTGEVIENKIRLPQPWPNFRKELLARLSEDPAAEIAKLSLSSYAGFDDVKPIMVSRMPQRKVSGPIHEETIRSVKKLGSEGKSVVKRPLLNLSKSDLDNLFDPDSNKVLYALIRERMERFDYEAKKAFAEPLYKPRKDGTPGPIVKSVKVCQTQNTGIEVRGGIADNGRMVRIDVSRKSDKHGKFKWYATPIYVSNFMRGELPDVPGEFVFSLYPYDLIRLRSKGGVFFGYYRGYNINTDSLTICEANNVQRVKSSIGIRNAYSIEKFYVDVLGDYYPIRREVRRGLENGGDFKSGEAEDSE

SEQ ID NO: 16298 - protein, 1046 aa, unidentified
  REGION 1..1046: note = Cas Enzyme sequence
MKYSLGLDIGITSVGWAVLNLDKKRVEALGVRGFNAAEDPKTWASLALPRRLARSARRRLRRRAGRLRRARDLFIKYELIQAQEIKSAFETVLGQPSPWELRAEGLDRLLTGQEFARALFHIIKRRGFKSNRKAAKSSEDGKMIAGIEANRERMREKGFRTAGEMYWSDPFFDLRKRNTTDSYINTVDRGLLEEEIKTLFKRQRELGSVFTKHEFENAILEVFSWQKPYVSGDDIIRMVGTCTFEPNELRAPRYSYHAERFLLLQKINSTTYSTNGDKERFTPEQRKVIEGLAYKNVRVTYAQIRKALDLPEEARFAGLTYLRRPEKKAELVESLECENTVFFELKGYHSIQNACSVDGMWDRVKQNPELMDNLATALTFYKTDEDIEEWLTERGVEKEIINAVSGCEFTKTANLSLVAIKKILPHLEEGLHYSEACAKAGYNHTGLSGEKKKDKLPSIPVDMIRNPVVLRALSQARKVVNAVINRYGSPYAIHIEFARDMGKSADKRKEEERRQRENLKEREELEEQFRETFDGREPNGTDMLKWRLYREQRGCCAYSLQPIDLNRLCEPGYVEVDHILPYSRSFDNSRANKVLVLISENRNKLNRTPYEYFGHNEKRWSEYEGWVRTTIRDPRKRGNLLRESFEERQEVEWKDRNLNDTRYVAREFAGFIRANLLFADPDNKLPLVCINGQVVAQARWLWGLYKDRDENDLHHAQDAAVIAALLPYQIKMITEYSKVVETRRNHIDPETGEIIEWKENERPRLPEPWKGFRKEGVEKLGSILVSRMPQRKVSGAIHADTIRSAKHISTDRVSVVKKPLNSLSENDLKNLFDTEHNKLLYSAIRQRMAEFDNKAQKAFAEPLFKPLRDGSPGPMVRSVKVCQAQYTGVNVRGGIADNGDMVRTDVFRKQNKKGKWEYYLIPVYTVDMISGKLPDKAIAAHKPYNEWPVIDNEYEFLFTLYPYDLIRVETKDGGGLYYYRSSHRANGSLIVCNVNKADTTFGIGSRTAISIEKLEMGVLGDYFPVHKEIRRGLENGSHLEPDKIES

SEQ ID NO: 16299 - protein, 1054 aa, unidentified
  REGION 1..1054: note = Cas Enzyme sequence
MSREFSYILGLDLGVASIGWAIVPENEELFHKLKLGVRIFKSAARGKYGAASAKTVEEGRDKPLNQKRRERRASRRLLDRRRRRKISLLRHLQTMGLLPECDYQSCEARNRMFDELDRELRSLNKASEHREEHLLPYILRARGVREPLTHYELGRAIYHLGQRRGFLSNRKVPMKEEDRGKVYSEIEELKEHLQAGCTLAEYFCTTDPEKECIRGRYTSRQMYLDEFQKIWEYQSGIYPEILTEEWKEKIHKTIFYQRPLKSQKDKIGVCRLEKGRKRARMASLGAQQIRYWQKILDLEYQIDDELPQPLREDEQTKLAAALEQKERMTFAEIKKLLKLPKSTKFNLERGGENSLPGNRTGCRIRGVLQERWDTMSPEKQKELADELLQFDKEEACQRRLENMGYAREDAVELSLLLFEEGYSRLSNRAISKILDRMVEKRIQYKTAEEEIYGEDRSDRRKYAFLPPLLKTEGFGDIITNPIVLRTLSEMRKVVNAIIREYGLPKRIVVELARSLKKGRKLRAKESERMNEKKRDRERIRKILVESGIAVPSQTDILKYQLAEECQWQCPYTGRRFTISNLYGPQPEFDIEHILPLSKSLDNSFRNKTLCYWKENRTVKKGNSPYEAYHKDPERYQEVRTWCKVLPPEKQKLFIKEGYDTDFSSRMLNDTAYMSRSALQYLALLYGGIIEPGKDDKKGEQKIYTSNGAITGFLRNEWGMNQILNQSSYEKTRTDHRHHAVDAVVIAFCSSRIKQELSRAAQLSESRKLNRKFISEELPHPRKNFIETVRKAVEEINVSFRCDKQVSGEMHDETFWTKPHVYRDEKGNEVEKRHKKIAVGELTLKKIEAIADGGIRRFILSELEKHGGDLDKLKAAPLVRRTSDGREIPIRHVRCVETANVEKIGKDSSVRYVATDAKHHAEVFAYVDKKGVEKWKVRIVSIWEAYKRQRAGMPVICRNFHEKTENRKKETEYVFKFSLFKDDCLLLNEDDGSQILYRVIAWEEPCRICLQKHTDARSWDDAADTRIRKNLTVLCGKVQKVTVDLLGNIHPAEAE

SEQ ID NO: 16300 - protein, 973 aa, unidentified
  REGION 1..973: note = Cas Enzyme sequence
MTEKILGLDIGISSIGWAIINYDKELTKKENYSNNKILKSGVRIFTIAENPKTGESLALPRRLARSARKTIKRKAQRLNAIKYLCINSLDLSKDDLFSKEDSIFSAKKRVDIWQLRDKALKRKLTNKEFARILIHIAKRRGYKSNRKVDELGNSEGKKVLNAIDKNKKLLNTYLTIGQAIYQSTKNNHTRRNKKDNYNHSISRKMLEEEINIIFEKQQKFNNKFSTNEFKDKYLELFLKQKDFTSVDNMVGYCTLEGKGEKRAPKTSYSAEIFITVTKLINTKIIDENGEERVFTKEELEKALELCTQSEQPTYIKLKETIKLKKNEYFKGIDFYEIDKKTGETTKKTTKFISGFKGFHKLRQLIEKALSKTHWQNISQDKNLLNEISMIFSYHKSDEKIENELKILEYKSLTQDEVKILINSLIENISFDKFLNLSIKAIDNLLVYMLTGLRYDEALEKCSYKKLEGTKDKFLRALNEDEQLELTNPVVKRAIAQTRKVINALIRKYGQFDKIHIELTREIKKSHSDRNKIKKGQNDYKEHKKILFKKFIEDYGREPKGNELLKFRLLHEQDYRCAYSGFNEQSGYIKPERLLEQGYVEIDHILPFSRSLEDGMYNKVLCLAKENQDKKNRTPYEYFTDKNRDWNKYETWIKSLKGIKKPKRDRLLKKNFDENSEKEFRKRNANDTAFISRFIKTFIEENLQLNSSDKKKVISINGSLTNMLRYNWQVGNKSRDNHLHHAVDAIIIAFATQSEIQRLSTLSAKIDGFTYTKGEEKAGKLKFTAPIENFSDEVQNSIDEIFVSFAPRRGVTGAAHKETIYSKNIEKQKGNFKVNGGLAENGEVKRVDIFKKDGKYHFIFLYPSDFLKKELPDITIKNIIVDNTYKFLFSLFKDEFIEIKQKNKNLVSGYFKFCLSDGRFAICNHLDAKFNPTNNRFSTGSLEYIKKYQVDPLGNKNEIKKEQRKETRKQSKRR

SEQ ID NO: 16301 - protein, 1067 aa, unidentified
  REGION 1..1067: note = Cas Enzyme sequence
VKDINYRIGLDVGIASVGWAVINLDKQRIEDLGVRIFEAAEHPKDGSSLALPRRLARSRRRLLRRKAYRIKRVKKLISDFGILSKEEIDNLYNEYEDIWSLRVKALNQRVTAKEWAKILINLCKRRGFKSNRKNEAKDKEAGKLISSIKINENRMLDLNAKTVAEYMYKLKEQTADKYMPIRNKNGTYNMCVSRMMIENEIKILFESQRNLGSEFANEKIEKEYLNIFNAQRPYSKFEDLEKMIGYCTFEKDNKELRAPKNCISVEEFILYDNMNKLSIINNGNKRNLTKEERNTIIENAYKKNEIKYKDLRKILSLDDNDRFSGLTYSNKTDISKTENSKFVSMKGYHEIKKSIEKNLGKEKWNNIKNDRKLLNDLAYVLTIAKTDEDIIKQLKIRNVDEDIINAVIEISFTKFNNLSIKAIEKILPYLKEGYQYNEACDKAGYDFKAVFKGEKELKLPLINAEEIINPVVIRSLTQTRKVVNAIIDKYGSPRGINIELARDLAKSFKDRKNIEKQQKENRDNKEKIRNELKELMRKEPTGSEVLKYRLWKEQKEECAYSQEHIYIDDLFKPGLYEIDHIIPFSRCFDDSLSNKVLVKGVENQNKKNRIPYEYFGSDTDRWHKFEVWVEQSSLGLKKKTNLLKKKVSEEEQKAFKSRNLNDTRYISKYIANYIDNRLIFKEDNVKRNTKKVITINGGATSFLRAKWGLIKVRENGDKHHALDAAVIAVTTQKMVNEISKYSKANELKNIKCNEEYIDIETGEVIDENIIKQNKVLLKDVLPRPWRGFSQELKLRLSDNPKEELKKLSFDSYDNEFIENTVRPVFVSRVPNRKASGMLFKETIYSANAFKNNKSIVKKNLCDLKLSDMDNVYNYSSDKKLYDSIKEQLVKYDGNAKKAFENGFRKPTKSGKLGPVVKSIKIVTNLIAKDMVDLNKGKVQKDGIVRVDIYKKDKKYYSVPVYRVDIAKGVIPKKAAVNHKPESEWTEIDENYEFQFSVYKNDLIEIKRENEESIFGYFNNFDRDSARYVIKSHDNSLEQKIAIKKGVKELNKYEVNVLGEYYKVKGGK

SEQ ID NO: 16302 - protein, 1100 aa, unidentified
  REGION 1..1100: note = Cas Enzyme sequence
LQGIPLERGDICFLGMFYGKIATMKRDFDYTLGLDLGIASVGWSVVELAYDEKEKVYSPKRLIDCGVRLFDKAEIPKTGESLNKTRREARSARRIVRRRKARIRALRKIIEDAGFIPAKEDLSTLPSDKDIWEIRGKDVFNRVLTDREITRLIIHIAKRRGYKSNRKKLDSDDTDSEKKKVLSAIKKNQELLKSKGLRTYGELVYHLYGGSAKRDTLKHNTADQYILSFDREGILEELQIVLNYQKNLGNSKVTDQFINNILEVVSSQRPFATGDQIKDMVGKCEFEPNELRAPKASISFLEFQFWQNAFNNLKLTDIEKGRNAKKTDLTLEQKEKLFKEVFDSKKDKITFAFVREVLNIPNNYIFYNFKNELLYRAGDKSIEKERIFLNLTDFQNIRKAVNKIDESLWEKIHEDRFVYNTLVEALTLYKTDPDIENYLKEKGLDEYIEIAKSLPTFSKFGHLSIKALENILPYLKENDYTKACELAGYGNKLKEQKSEILPLIEYDEIRNPVVFRGITQGRKVVNAIVRKYGPPTFINIELAREFAKNSQERRKMERMMESRHKDNEKALEEIRGLGISNPSGFDILKYKLWKEQDCKCAYSGETIPIERLFEDSYCQVDHVIPYSQSMDDSYNNKVLVLTKENQEKRNETPFQYLNRIDPSGKRWEEYKARVENNAHYYQHKKDILLIENADKYTIEDFIERNLNDTKYISRFFKNYLESNLKMKELKYGKRQVFTFHGRFTSELRRIYDISKDRQGSDRHHAIDAIILAVANQSMLQDIVRYRELEEEHKKNWEIFKEEQKIKHPEPWENFRQDIYNRVFEDTFEGISNISNFESLYGDIKNEIKPLFVSRMPRRKVEGPAHEETLYSPKHLDEGFVLIKKSLSDLKPEDVENIYGDDVVKNLIKERFKKNPEKPFEEPLYKPSPKNNNPNQIKSVKIKKPTGGGGVLLNGGRAFAPHASMVRIDIFSKDEKYYIVPIYVADTVKKELPNRAILQGKKEKDWTLIDDSFKFKFSLYPYDLLSLDMSDGKLDGWYYIKTHRNTGVITLRSHDGSKEIERGIKTALNLTKYQVDVLGNISKVRAEKRHGFQKRHNHKTV

SEQ ID NO: 16303 - protein, 1100 aa, unidentified
  REGION 1..1100: note = Cas Enzyme sequence
LQGIPLERGDICFLGMFYGKIATMKRDFDYTLGLDLGIASVGWSVVELAYDEKEKVYSPKRLIDCGVRLFDKAEIPKTGESLNKTRREARSARRIVRRRKARIRGLRKIIEDAGFIPAKEDLSTLPSDKDIWEIRGKDVFNRVLTDREITRLIVHIAKRRGYKSNRKKLDSDDTDSEKKKVLSAIKKNQELLKSKGLRTYGELVYHLYGGSAKRDTLKHNTADQYILSFDREGILEELQIVLNYQKNLGNSKVTDQFINNVLEIVSFQRPFATGDQIKDMVGKCEFEPNELRAPKASISFLEFQFWQSAFNNLKLIDIEKGRYGKKIDLTLEQKEKLFKEVFDSKKDKITFAFVREVLNIPNNYIFYNFKHELLYRAGDKSIEKEKIFLNLTDFQNIRKAVNKIDESLWEKIHEDRFVYNTLVEALTLYKTDSDIENYLKEKGLDEYIEIAKSLPTFSKFGHLSIKALENILPYLKENDYTKACELAGYGNKLKEQKSEILPLIEYDEIRNPVVFRGITQGRKVVNAIVRKYGSPTFINIELAREFAKNSQERRKMERMMESRHKDNEKALEEIRGLGISNPSGFDILKYKLWKEQDCKCAYSGETIPIERLFEDSYCQVDHVIPYSQSMDDSYNNKVLVLTKENQEKRNETPFQYLNRIDPSGKRWEEYKARVENNAHYYQHKKDILLIENADKYTIEDFIERNLNDTKYISRFFKNYLESNLKMKELKYGKRQVFTFHGRFTSELRRIYDISKDRQGSDRHHAIDAIILAVANQSMLQDIVRYRELEEEHKKDWEIFKEEQKIKHPEPWENFRQDIYNRVFEDTFEGISNISNFESLYGDIKNEIKPLFVSRMPRRKVEGPAHEETLYSPKHLDEGFVLIKKSLSDLKPEDVENIYGDDVVKNLIKERFKKNPEKPFEEPLYKPSPKNNNPNQIKSVKIKKPTGGGGVLLNGGRAFAPHASMVRIDIFSKDEKYYIVPIYVADTVKKELPNRAILQGKKEKDWTLIDDSFKFKFSLYPYDLLSLDMSDGKLDGWYYIKTHRNTGVITLRSHDGSKEIERGIKTALNLTKYQVDVLGNISKVRAEKRHGFQKRHNHKTV

SEQ ID NO: 16304 - protein, 989 aa, unidentified
  REGION 1..989: note = Cas Enzyme sequence
MLGIKRLFVAKGLVASTTELEALYAEQTGGDVWNLRAEALRRPLSKEELLRVLTHLAKHRGFKSYRKAAEEADKESGRILTAIAENRKETVGFQTLAQMIVERAKHSDDHKMRNYTPQKGPNKGVAVYVNSIPREEIEKETKLIFEYQKQFGLFTEDLYRDFCKIAFRYREVGSVGHMVGRCRFESEQPRAPKEAPSAELFVALSKINNLKVTVDGERRFLNGEERKALLELLKNTKEVKYSTIKNKLFKGREVFFDDVNYAQKTKKGKSGEEKAVNPEDAKFYAMKGWHKLKAAFSPEQWKEVGSNLPLLDLGMTAVVCEKNDAGIERFLSEKGIPEDYREVFKKLTGSEFINLSLKALYKLNPYLAEGLKYNQACEKAGYDFREDGIKLAEEKGLLLPPIANDKLTTVPVVNRAVAQFRKVYNAMVRTYGAPDQINLEIGRDLKKSRDERNQIMRRQKENETERKEAEDGLEKEGLAANGKNMLKYRLYQQQNGKCIYSGNAIDLRRLDENGYCDVDHIIPYSRSLDDGQNNKVLCLAEENRKKGSQTPYEYLEPLGRWEEFETVVNTTPSINRYKRNNLLNKDYQEKENDLEFRERNANDNSYIARYVKRYLEDAVDFSASSCAIKNRIQVRTGSLTDYLRHQWGLIKDRNESDRHHAQDAVVVACATQGMVQKLSKLSAIFENKDDFRRKKAEKLGHEEAEVWYKYIKQQIREPWSGFRTEVLASLEKVFVSRPPRKNATGSAHKDTIFSKSEKKGSLPIRYGMAEKENMFRLDVFRKENHFYIVPIYVVDLVDCKEFIDAPQPYEYVNGSFIKIDESFNFMFSLYKDDYVEITSKDECIKGYVNQYNAQSGQLYIGSVDNSPIFRIKTSTFLRDDNILLKIGDQEYIGKIGKFDNEKKQVVINGLKNNFMINALVKLNKKGDETKNIQTEKSYTKMSNEKKICLNVVDSIEKYQVDPLGRIAKVKKETRLPLTMIKKNRHKKGE

SEQ ID NO: 16305 - protein, 1005 aa, unidentified
  REGION 1..1005: note = Cas Enzyme sequence
MKKKIFGFDLGIASIGWAVIDHSDENFDPETGEIIEGKVVGCGVRCFPVAENPKDGSSLAAPRREKRLLRRITRRKARRMLGIKRLFVAKGLVASTTELEALYAEQTGGDVWNLRAEALRRPLSKEELLRVLTHLAKHRGFKSYRKAAEEADKESGRILTAIAENRKETVGFQTLAQMIVERAKHSDDHKMRNYTPQKGPNKGVAVYVNSIPREEIEKETKLIFEYQKQFGLFTEDLYRDFCKIAFRYREAGSVGHMVGRCRFESEQPRAPKEAPSAELFVALSKINNLKVTVDGERRFLNGEERKALLELLKNTKEVKYSTIKNKLFKSREVFFDDVNYAQKTKKGKSGEEKAVNPEDAKFYAMKGWHKLKAAFSPEQWKEVGSNLPLLDLGMTAVVCEKNDAGIERFLSEKGIPEDYREVFKKLTGSEFINLSLKALYKLNPYLAEGLKYNQACEKAGYDFREDGIKLAEEKGLLLPPIANDKLTTVPVVNRAVAQFRKVYNAMVRTYGAPDQINLEIGRDLKKSRDERNQIMRRQKENETERKEAEDGLEKEGLAANGKNMLKYRLYRQQNGKCIYSGKAIDLRRLDENGYCDVDHIIPYSRSLDDGQNNKVLCLAEENRKKGSQTPYEYLEPLGRWEEFETVVNTTPSINRYKRNNLLNKDYKEKENDLEFRERNANDNSYIARYVKRYLEDAVDFSASSCAIKNRIQVRTGSLTDYLRHQWGLIKDRNESDRHHAQDAVVVACATQGMVQKLSKLSAIFENKDDFRRKKAEKLGHEEAEVWYKYIKQQIREPWSGFRTEVLASLEKVFVSRPPRKNATGEIHQETIRTVNPKRKKYNEKEILSGIKIRGGLANNGLMLRTDVFVKKNKKGKDEFYLVPVYLSDMGKELPNKAMVPGKKENEWLELDETYQFKFSFYMDDLIKIKKKENEIFGYFRGTNRATASVSVATHDRSHTFEGIGVKTLDGIEKYQVDPLGRIAKVKKETRLPLTMIKKNRHKKGE

SEQ ID NO: 16306 - protein, 962 aa, unidentified
  REGION 1..962: note = Cas Enzyme sequence
MLLHVSAVCVIHEPLKLSKEELLRVLTHLAKHRGFKSYRKAAEEADKESGRILTAIAENRKETAGFQTLAQMIVERAKHSDDHKMRNYTPQKGPNKGVAVYVNSIPREEIEKETKLIFEYQKQFGLFTEDLYRDFCKIAFRYREVGSVGHMVGRCRFEPEQPRAPKEAPSAELFVALSKINNLKVTVDGERRFLNGEERKALLELLKNTKEVKYSTIKNKLFKSREVFFDDVNYAQKTKKGKSGEEKAVNPEDAKFYAMKGWHKLKAAFSPEQWKEVGSNLPLLDLGMTAVVCEKNDAGIERFLSEKGIPEDYREVFKKLTGSEFINLSLKALYKLNPYLAEGLKYNQACEKAGYDFREDGIKLAEEKGLLLPPIANDKLTTVPVVNRAVAQFRKVYNAMVRTYGAPDQINLEIGRDLKKSRDERNQIMRRQKENETERKEAEDGLEKEGLAANGKNMLKYRLYRQQNGKCIYSGKAIDLRRLDENGYCDVDHIIPYSRSLDDGQNNKVLCLAEENRKKGSQTPYEYLEPLGRWEEFETVVNTTPSINRYKRNNLLNKDYKEKENDLEFRERNANDNSYIARYVKRYLEDAVDFSASSCAIKNRIQVRTGSLTDYLRHQWGLIKDRNESDRHHAQDAVVVACATQGMVQKLSKLSAIFENKDDFRRKKAEKLGHEEAEVWYKYIKQQIREPWSGFRTEVLASLEKVFVSRPPRKNATGSAHKDTIFSKSEKKGSLPIRYGMAEKENMFRLDVFRKENHFYIVPIYVVDLVDCKEFTDAPQPYEYVNGSFIKIDESFNFMFSLYKDDYVEITSKDECIKGYVNQYNAQSGQLYIGSVDNSPIFRIKTSTFLRDDNILLKIGDQEYIGKIGKFDNEKKQVVINGLKNNFMINALVKLNKKGDETKNIQTEKSYTKMSNEKKICLNVVDSIEKYQVDPLGRIAKVKKETRLPLTMIKKNRHKKGE

SEQ ID NO: 16307 - protein, 1005 aa, unidentified
  REGION 1..1005: note = Cas Enzyme sequence
MKKKIFGFDLGIASIGWAVIDHSDENFDPETGEIIEGKVVGCGVRCFPVAENPKDGSSLAAPRREKRLLRRITRRKARRMLGIKRLFVAKGQVASTTELEALYAEQTGGDVWNLRAEALRRPLSKEELLRVLTHLAKHRGFKSYRKAAEEADKESGRILTAIAENRKETAGFQTLAQMIVERAKHSDDHKMRNYTPQKGPNKGVAVYVNSIPREEIEKETKLIFEYQKQFGWFTEDLYCDFCKIAFRYREAGSVGHMVGRCRFESEQPRAPKEAPSAELFVALSKINNLKVTVDGERRFLNGEERKALLELLKNTKEVKYSTIKNKLFKSREVFFDDVNYAQKTKKGKSGEEKAVNPEDAKFYAMKGWHKLKAAFSPEQWKEVGSNLPLLDLGMTAVVCEKNDAGIERFLSEKGIPEDYREVFKKLTGSEFINLSLKALYKLNPYLAEGLKYNQACEKAGYDFREDGIKLAEEKGLLLPPIANDKLTTVPVVNRAVAQFRKVYNAMVRTYGAPDQINLEIGRDLKKSRDERNQIMRRQKENETERKEAEDGLEKEGLAANGKNMLKYRLYQQQNGKCIYSGKAIDLRRLDENGYCDVDHIIPYSRSLDDGQNNKVLCLAEENRKKGSQTPYEYLEPLGRWEEFETVVNTTPSINRYKRNNLLNKDYKEKENDLEFRERNANDNSYIARYVKRYLEDAVDFSASSCAIKNRIQVRTGSLTDYLRHQWGLIKDRNENDRHHAQDAVVVACATQGMVQKLSKLSAIFENKDDFRRKKAEKLGHEEAEVWYKYIKQQIREPWSGFRTEVLASLEKVFVSRPPRKNATGEIHQETIRTVNPKRKKYNEKEILSGIKIRGGLANNGLMLRTDVFVKKNKKGKDEFYLVPVYLSDMGKELPNKAMVPGKKENEWLELDETYQFKFSFYMDDLIKIKKKENEIFGYFRGTNRATASVSVATHDRSHTFEGIGVKTLDGIEKYQVDPLGRIAKVKKETRLPLTMIKKNRHKKGE

SEQ ID NO: 16308 - protein, 1068 aa, unidentified
  REGION 1..1068: note = Cas Enzyme sequence
MKKKIFGFDLGIASIGWAVIDHSDENFDPETGEIIEGKVVGCGVRCFPVAENPKDGSSLAAPRREKRLLRRITRRKARRMLGIKRLFVAKGLVASTTELEALYAEQTGGDVWNLRAEALRRPLSKEELLRVLTHLAKHRGFKSYRKAAEEADKESGRILTAIAENRKETAGFQTLAQMIVERAKHSDDHKMRNYTPQKGPNKGVAVYVNSIPREEIEKETKLIFEYQKQFGLFTEDLYRDFCKIAFRYREAGSVGHMVGRCRFESEQPRAPKEAPSAELFVALSKINNLKVTVDGERRFLNGEERKALLELLKNTKEVKYSTIKNKLFKSREVFFDDVNYAQKTKKGKSGEEKAVNPEDAKFYAMKGWHKLKAAFSPEQWKEVGSNLPLLDLGMTAVVCEKNDAGIERFLSEKGIPEDYREVFKKLTGSEFINLSLKALYKLNPYLAEGLKYNQACEKAGYDFREDGIKLAEEKGLLLPPIANDKLTTVPVVNRAVAQFRKVYNAMVRTYGAPDQINLEIGRDLKKSRDERNQIMRRQKENETERKEAEDGLEKEGLAANGKNMLKYRLYRQQNGKCIYSGKAIDLRRLDENGYCDVDHIIPYSRSLDDGQNNKVLCLAEENRKKGSQTPYEYLEPLGRWEEFETVVNTTPSINRYKRNNLLNKDYQEKENDLEFRERNANDNSYIARYVKRYLEDAVDFSASSCAIKNRIQVRTGSLTDYLRHQWGLIKDRNESDRHHAQDAVVVACATQGMVQKLSKLSAIFENKDDFRRKKAEKLGHEEAEVWYKYIKQQIREPWSGFRTEVLASLEKVFVSRPPRKNATGSAHKDTIFSKSEKKGSLPIRYGMAEKENMFRLDVFRKENHFYIVPIYVVDLVDCKEFIDAPQPYEYVNGSFIKIDESFNFMFSLYKDDYVEITSKDECIKGYVNQYNAQSGQLYIGSVDNSPIFRIKTSTFLRDDNILLKIGDQEYIGKIGKFDNEKKQVVINGLKNNFMINALVKLNKKGDETKNIQTEKSYTKMSNEKKICLNVVDSIEKYQVDPLGRIAKVKKETRLPLTMIKKNRHKKGE

SEQ ID NO: 16309 - protein, 1068 aa, unidentified
  REGION 1..1068: note = Cas Enzyme sequence
MKKKIFGFDLGIASIGWAVIDHSDENFDPETGEIIEGKVVGCGVRCFPVAENPKDGSSLAAPRREKRLLRRITRRKARRMLGIKRLFVAKGLVASTTELEALYAEQTGGDVWNLRAEALRRPLSKEELLRVLTHLAKHRGFKSYRKAAEEADKESGRILTAIAENRKETVGFQTLAQMIVERAKHSDDHKMRNYTPQKGPNKGVAVYVNSIPREEIEKETKLIFEYQKQFGLFTEDLYRDFCKIAFRYREAGSVGHMVGRCRFESEQPRAPKEAPSAELFVALSKINNLKVTVDGERRFLNGEERKALLELLKNTKEVKYSTIKNKLFKSREVFFDDVNYAQKTKKGKSGEEKAVNPEDAKFYAMKGWHKLKAAFSPEQWKEVGSNLPLLDLGMTAVVCEKNDAGIERFLSEKGIPEDYREVFKKLTGSEFINLSLKALYKLNPYLAEGLKYNQACEKAGYDFREDGIKLAEEKGLLLPPIANDKLTTVPVVNRAVAQFRKVYNAMVRTYGAPDQINLEIGRDLKKSRDERNQIMRRQKENETERKEAEDGLEKEGLAANGKNMLKYRLYQQQNGKCIYSGNAIDLRRLDENGYCDVDHIIPYSRSLDDGQNNKVLCLAEENRKKGSQTPYEYLEPLGRWEEFETVVNTTPSINRYKRNNLLNKDYQEKENDLEFRERNANDNSYIARYVKRYLEDAVDFSASSCAIKNRIQVRTGSLTDYLRHQWGLIKDRNESDRHHAQDAVVVACATQGMVQKLSKLSAIFENKDDFRRKKAEKLGHEEAEVWYKYIKQQIREPWSGFRTEVLASLEKVFVSRPPRKNATGSAHKDTIFSKSEKKGSLPIRYGMAEKENMFRLDVFRKENHFYIVPIYVVDLVDCKEFIDAPQPYEYVNGSFIKIDESFNFMFSLYKDDYVEITSKDECIKGYVNQYNAQSGQLYIGSVDNSPIFRIKTSTFLRDDNILLKIGDQEYIGKIGKFDNEKKQVVINGLKNNFMINALVKLNKKGDETKNIQTEKSYTKMSNEKKICLNVVDSIEKYQVDPLGRIAKVKKETRLPLTMIKKNRHKKGE

SEQ ID NO: 16310 - protein, 1068 aa, unidentified
  REGION 1..1068: note = Cas Enzyme sequence
MKKKIFGFDLGIASIGWAIIDHSDENFDPETGEIIEGKVVGCGVRCFPVAENPKDGSSLAAPRREKRLLRRITRRKARRMLGIKRLFVAKGLVASTTELEALYAEQTGGDVWNLRAEALRRPLSKEELLRVLTHLAKHRGFKSYRKAAEEADKESGRILTAIAENRKETVGFQTLAQMIVERAKHSDDHKMRNYTPQKGPNKGVAVYVNSIPREEIEKETKLIFEYQKQFGLFTEDLYRDFCKIAFRYREAGSVGHMVGRCRFESEQPRAPKEAPSAELFVALSKINNLKVTVDGERRFLNGEERKALLELLKNTKEVKYSTIKNKLFKSREVFFDDVNYAQKTKKGKSGEEKAVNPEDAKFYAMKGWHKLKAAFSPEQWKEVGSNLPLLDLGMTAVVCEKNDAGIERFLSEKGIPEDYREVFKKLTGSEFINLSLKALYKLNPYLAEGLKYNQACEKAGYDFREDGIKLAEEKGLLLPPIANDKLTTVPVVNRAVAQFRKVYNAMVRTYGAPDQINLEIGRDLKKSRDERNQIMRRQKENETERKEAEDGLEKEGLAANGKNMLKYRLYQQQNGKCIYSGNAIDLRRLDENGYCDVDHIIPYSRSLDDGQNNKVLCLAEENRKKGSKTPYEYLEPLGRWEEFETVVNTTPSINRYKRNNLLNKDYQEKENDLEFRERNANDNSYIARYVKRYLEDAVDFSASSCAIKNRIQVRTGSLTDYLRHQWGLIKDRDASDRHHAQDAVVVACATQGMVQKLSKLSAIFENKDDFRRKKAEELGHEKAEAWYKYIKQQIREPWSGFRTEVLASLEKVFVSRPPRKNATGSAHKDTIFSKSEKKGSLPIRYGMAEKENMFRLDVFRKENHFYIVPIYVVDLVNCKEFTDAPQPYEYVNGSFIKIDESFNFMFSLYKDDYVEITSKDECIKGYVNQYNAQSGQLYIGSVDNSPIFRIKTSTFLRDDNILLKIGDQEYIGKIGKFDNEKKQVVINGLKNNFMINALVKLNKKGDETKNIQTEKSYTKMSNEKKICLNVVDSIEKYQVDPLGRIAKVKKETRLPLTMIKKNRHKKGE

SEQ ID NO: 16311 - protein, 1068 aa, unidentified
  REGION 1..1068: note = Cas Enzyme sequence
MKKKIFGFDLGIASIGWAVIDHSDENFDPETGEIIEGKVVGCGVRCFPVAENPKDGSSLAAPRREKRLLRRITRRKARRMLGIKRLFVAKGLVASTTELEALYAEQTGGDVWNLRAEALRRPLSKEELLRVLTHLAKHRGFKSYRKAAEEADKESGRILTAIAENRKETVGFQTLAQMIVERAKHSDDHKMRNYTPQKGPNKGVAVYVNSIPREEIEKETKLIFEYQKQFGLFTEDLYRDFCKIAFRYREVGSVGHMVGRCRFESEQPRAPKEAPSAELFVALSKINNLKVTVDGERRFLNGEERKALLELLKNTKEVKYSTIKNKLFKGREVFFDDVNYAQKTKKGKSGEEKAVNPEDAKFYAMKGWHKLKAAFSPEQWKEVGSNLPLLDLGMTAVVCEKNDAGIERFLSEKGIPEDYREVFKKLTGSEFINLSLKALYKLNPYLAEGLKYNQACEKAGYDFREDGIKLAEEKGLLLPPIANDKLTMVPVVNRAVAQFRKVYNAMVRTYGAPDQINLEIGRDLKKSRDERNQIMRRQKENETERKEAEDGLEKEGLAANGKNMLKYRLYRQQNGKCIYSGKAIDLRRLDENGYCDVDHIIPYSRSLDDGQNNKVLCLAEENRKKGSQTPYEYLEPLGRWEEFETVVNTTPSINRYKRNNLLNKDYQEKENDLEFRERNANDNSYIARYVKRYLEDAVDFSASSCAIKNRIQVRTGSLTDYLRHQWGLIKDRDASDRHHAQDAVVVACATQGMVQKLSKLSAIFENKDDFRRKKAEELGHEKAEVWYKYIKQQIREPWSGFRTEVLASLEKVFVSRPPRKNATGSAHKDTIFSKSEKKGSLPIRYGMAEKENMFRLDVFRKENHFYIVPIYVVDLVNCKEFTDAPQPYEYVNGSFIKIDESFNFMFSLYKDDYVEITSKDECIKGYVNQYNAQSGQLYIGSVDNSPIFRIKTSTFLRDDNILLKIGDQEYIGKIGKFDNEKKQVVINGLKNNFMINALVKLNKKGDETKNIQTEKSYTKMSNEKKICLNVVDSIEKYQVDPLGRIAKVKKETRLPLTMIKKNRHKKGE

SEQ ID NO: 16312 - protein, 1068 aa, unidentified
  REGION 1..1068: note = Cas Enzyme sequence
MKKKIFGFDLGIASIGWAVIDHSDENFDPETGEIIEGKVVGCGVRCFPVAENPKDGSSLAAPRREKRLLRRITRRKARRMLGIKRLFVAKGLVASTTELEALYAEQTGGDVWNLRAEALRRPLSKEELLRVLTHLAKHRGFKSYRKAAEEADKESGRILTAIAENRKETAGFQTLAQMIVERAKHSDDHKMRNYTPQKGPNKGVAVYVNSIPREEIEKETKLIFEYQKQFGLFTEDLYRDFCKIAFRYREAGSVGHMVGRCRFESEQPRAPKEAPSAELFVALSKINNLKVTVDGERRFLNGEERKALLELLKNTKEVKYSTIKNKLFKSREVFFDDVNYAQKTKKGKSGEEKAVNPEDAKFYAMKGWHKLKAAFSPEQWKEVGSNLPLLDLGMTAVVCEKNDAGIERFLSEKGIPEDYREVFKKLTGSEFINLSLKALYKLNPYLAEGLKYNQACEKAGYDFREDGIKLAEEKGLLLPPIANDKLTTVPVVNRAVAQFRKVYNAMVRTYGAPDQINLEIGRDLKKSRDERNQIMRRQKENETERKEAEDGLEKEGLAANGKNMLKYRLYQQQNGKCIYSGNAIDLRRLDENGYCDVDHIIPYSRSLDDGQNNKVLCLAEENRKKGSQTPYEYLEPLGRWEEFETVVNTTPSINRYKRNNLLNKDYQEKENDLEFRERNANDNSYIARYVKRYLEDAVDFSASSCAIKNRIQVRTGSLTDYLRHQWGLIKDRNESDRHHAQDAVVVACATQGMVQKLSKLSAIFENKDDFRRKKAEKLGHEEAEVWYKYIKQQIREPWSGFRTEVLASLEKVFVSRPPRKNATGSAHKDTIFSKSEKKGSLPIRYGMAEKENMFRLDVFRKENHFYIVPIYVVDLVDCKEFIDAPQPYEYVNGSFIKIDESFNFMFSLYKDDYVEITSKDECIKGYVNQYNAQSGQLYIGSVDNSPIFRIKTSTFLRDDNILLKIGDQEYIGKIGKFDNEKKQVVINGLKNNFMINALVKLNKKGDETKNIQTEKSYTKMSNEKKICLNVVDSIEKYQVDPLGRIAKVKKETRLPLTMIKKNRHKKGE

SEQ ID NO: 16313 - protein, 1068 aa, unidentified
  REGION 1..1068: note = Cas Enzyme sequence
MKKKIFGFDLGIASIGWAVIDHSDENFDPETGEIIEGKVVGCGVRCFPVAENPKDGSSLAAPRREKRLLRRITRRKARRMLGIKRLFVAKGLVASTTELEALYAEQTGGDVWNLRAEALRRPLSKEELLRVLTHLAKHRGFKSYRKAAEEADKESGRILTAIAENRKETAGFQTLAQMIVERAKHSDDHKMRNYTPQKGPNKGVAVYVNSIPREEIEKETKLIFEYQKQFGLFTEDLYRDFCKIAFRYREVGSVGHMVGRCRFEPEQPRAPKEAPSAELFVALSKINNLKVTVDGERRFLNGEERKALLELLKNTKEVKYSTIKNKLFKSREVFFDDVNYAQKTKKGKSGEEKAVNPEDAKFYAMKGWHKLKAAFSPEQWKEVGSNLPLLDLGMTAVVCEKNDAGIERFLSEKGIPEDYREVFKKLTGSEFINLSLKALYKLNPYLAEGLKYNQACEKAGYDFREDGIKLAEEKGLLLPPIANDKLTTVPVVNRAVAQFRKVYNAMVRTYGAPDQINLEIGRDLKKSRDERNQIMRRQKENETERKEAEDGLEKEGLAANGKNMLKYRLYRQQNGKCIYSGKAIDLRRLDENGYCDVDHIIPYSRSLDDGQNNKVLCLAEENRKKGSQTPYEYLEPLGRWEEFETVVNTTPSINRYKRNNLLNKDYKEKENDLEFRERNANDNSYIARYVKRYLEDAVDFSASSCAIKNRIQVRTGSLTDYLRHQWGLIKDRNESDRHHAQDAVVVACATQGMVQKLSKLSAIFENKDDFRRKKAEELGHEKAEVWYKYIKQQIREPWSGFRTEVLASLEKVFVSRPPRKNATGSAHKDTIFSKSEKKGSLPIRYGMAEKENMFRLDVFRKENHFYIVPIYVVDLVNCKEFTDAPQPYEYVNGSFIKIDESFNFMFSLYKDDYVEITSKDECIKGYVNQYNAQSGQLYIGSVDNSPIFRIKTSTFLRDDNILLKIGDQEYIGKIGKFDNEKKQVVINGLKNNFMINALVKLNKKGDETKNIQTEKSYTKMSNEKKICLNVVDSIEKYQVDPLGRIAKVKKETRLPLTMIKKNRHKKGE

SEQ ID NO: 16314 - protein, 1068 aa, unidentified
  REGION 1..1068: note = Cas Enzyme sequence
MKKKIFGFDLGIASIGWAVIDHSDENFDPETGEIIEGKVVGCGVRCFPVAENPKDGSSLAAPRREKRLLRRITRRKARRMLGIKRLFVAKGLVASTTELEALYAEQTGGDVWNLRAEALRRPLSKEELLRVLTHLAKHRGFKSYRKAAEEADKESGRILTAIAENRKETAGFQTLAQMIVERAKHSDDHKMRNYTPQKGPNKGVAVYVNSIPREEIEKETKLIFEYQKQFGLFTEDLYRDFCKIAFRYREVGSVGHMVGRCRFEPEQPRAPKEAPSAELFVALSKINNLKVTVDGERRFLNGEERKALLELLKNTKEVKYSTIKNKLFKSREVFFDDVNYAQKTKKGKSGEEKAVNPEDAKFYAMKGWHKLKAAFSPEQWKEVGSNLPLLDLGMTAVVCEKNDAGIERFLSEKGIPEDYREVFKKLTGSEFINLSLKALYKLNPYLAEGLKYNQACEKAGYDFREDGIKLAEEKGLLLPPIANDKLTTVPVVNRAVAQFRKVYNAMVRTYGAPDQINLEIGRDLKKSRDERNQIMRRQKENETERKEAEDGLEKEGLAANGKNMLKYRLYRQQNGKCIYSGKAIDLRRLDENGYCDVDHIIPYSRSLDDGQNNKVLCLAEENRKKGSQTPYEYLEPLGRWEEFETVVNTTPSINRYKRNNLLNKDYKEKENDLEFRERNANDNSYIARYVKRYLEDAVDFSASSCAIKNRIQVRTGSLTDYLRHQWGLIKDRNESDRHHAQDAVVVACATQGMVQKLSKLSAIFENKDDFRRKKAEKLGHEEAEVWYKYIKQQIREPWSGFRTEVLASLEKVFVSRPPRKNATGSAHKDTIFSKSEKKGSLPIRYGMAEKENMFRLDVFRKENHFYIVPIYVVDLVDCKEFTDAPQPYEYVNGSFIKIDESFNFMFSLYKDDYVEITSKDECIKGYVNQYNAQSGQLYIGSVDNSPIFRIKTSTFLRDDNILLKIGDQEYIGKIGKFDNEKKQVVINGLKNNFMINALVKLNKKGDETKNIQTEKSYTKMSNEKKICLNVVDSIEKYQVDPLGRIAKVKKETRLPLTMIKKNRHKKGE

SEQ ID NO: 16315 - protein, 960 aa, unidentified
  REGION 1..960: note = Cas Enzyme sequence
MSERILGLDIGISSLGWAVIDYDKNNSLNNKIIKSGVRIFTIAENPKTGESLALPRRNARASRRTIKRKKQRIKGIKNLLVKYLDFSKDEIFSPKNIFNEKKQKDVWQLRDKSLKRELTNKEFARVLMQIAKRRGYKSNRKVEEKENSEGKKVLSSIEKNKKLLNNYLTIGQAIYQTTKETKTRRNKKDDYNHSISRDMLVDEINIIFEKQKEFKNPFVSDNLKQEYLELFLKQRDFASVDKMVGFCTLEGKPNKRAAKASYSAELFVTLTKLINTKIIDSNHKERSLTKEELEKIILLCHQSEQPTYLKIKEIICLDESSHFKNVSFYEIDKKTGEVSKKTTKFISGFKGFHSLRKVVEKTFSKTYWQNIAQDKKLLNDIATIFSHHKSDEKINNELQKLEIKILNESEKQILIKALIENIHFDKFLNLSIKAIDKLLKYMLLGKRYDEAVDLCKYKKVEGTKQKFLRALNKDEQFELTNPVVKRALSQTRKVVNALIRVYGQFDKINIELTREIKKSHSDRKKIEKAQDEYQTLKQGIVKNFIENFGKEPRGNELLKYRLWQEQGERCIYSGKEIDIKRLISEVNYAQIDHILPFSRSLEDGMINKVICLSKENQDKKNRTPYEYFTHENKDWHWFEEFVKSLKNIKKGKRDRLLKKNFDENSEIAFRDRNANDTAFMSRFIKDFIENNLELKSKDKQKVFTRSGTLTNMLRHNWGIGNKSRDNHLHHAVDALIVAFSTQSEVQRLSTLSAKIDGFTYEKSEKKAGQLKFVPPIEHFRDEVQKSIDDIFVSFAPRRGVKGAAHKETIYSKKAEKKKGTFEINNGLAENGEVKRVDIFKKDGKYHFIFLYPSDFLKKELPLLTIKGIEIDDSFEFIFSLFKDEYIEIKQKNKEPHYGYLKFVESDGRFNVLPHFQSQLNKKDNRISTGSVEYIKKYQVDVLGNTFEIKREKRVGTKKQR

SEQ ID NO: 16316 - protein, 996 aa, unidentified
  REGION 1..996: note = Cas Enzyme sequence
  REGION 188..191: note = misc_feature - Xaa can be any naturally occurring amino acid
RDARLTRRRIRRRAHRLLRLRRLFKRISLLPTNPNNNTLSADNLSPWQLRAEGLDRRLDPQEWAAVLYHLVKHRGFLSNRKSEAKTDAKTGEMLGGVSTNQQRLSEGGYRTIGEMAWKDDRFSAAKRNKGGDYSHTFARADLVNELRSLFSCQRKFENPHTNPEFETATHELLMARRPTLSGDNLLKXXXXPKASHTAERFVWLTKLNNLRISGIGVTRPLTDGERQTLIHLPFSQAKLTYKQVRTKLALGEADRFVGLDYRNSKDPELAALFEAKAFHLLRKVYESAGLHQAWQRDGHDRQRLDLLAHALTVFKDDNEARQWLTVQGVEAEIIEAVLEESFDKFIRLSLKALHKILPHMEAGLRYDEAVQAAGYSHHSQIHTDSKTRYIPKISKEDIANPVVSRALNQARRLVNAIVREYGSPMAVHIELARDLNKPYDERRRIEKDQKTYKETKDKDIVDFEKRFEFTPKGLELVKWRLYREQDAQCAYSQTGFDLNRLFEPGYAEIDHALPQSRSFDNGMNNKVLVHSKHNRDKGNRTPYEYLGGDHNSPEWQHFVAWVEGNKKYRLTKRQRLLRKDFGKEEANKFRERNLTDTRYASKKFKQLVETHLQLAEESDSKRCVVLSGQLTAYLRARWVLNKVREDGDLHHALDAAVVAACSHSMVKRLSDYSRRKELEQSRGHFVDYETGEVLDLAALRRVEAHFPQPWPGFRKELEARLSPDPAATLHTLAGVAPVRVSRAPTRRGLGAAHQETIRSAKCLEDGTSSVKTSLTSLKLKDLPRIVGYNDPRNRTLITAIEQRLREHDDNGAKAFKEPLRRPAAPGKKDQAPIVRSVNLRDTQKSGLLVRDGIANNGSMLRVDIFTKGGKFFAVLLYVADTVKTELPNRAVVASKPESEWPVMDDSYAFLFSLHPNDWIKVTLKDQPLKEGYFSGLDRSTGAVSIWAHDRNSSVGKDGLMRSIGIKTALSLEKCHVDILGRLHRVHQETRQPLRHK

SEQ ID NO: 16317 - protein, 1076 aa, unidentified
  REGION 1..1076: note = Cas Enzyme sequence
LQFLLEKESWFMRYVLGLDIGIASVGWCILNEDLQRIENLGVRTFTKAEHPKDGSPLAEPRRLARGMRRRIRRRAHRLERIRRLLVRTGFGTQVEIEANLEASTIAGKTPYDFRAEGLDRKLSKEEWAKALYHIATRRGFKSNRKSEENEKEGGKLLQGVRANAGLMEDKKYRTVGEMLAKDEKFSLYKRNKGGSYEHTLGRGDLLAEIELLFSRQRELGNPLTNPEFEESFSKIFAAQRHYASGDQVFKMIGHCTFENEKNGKENQPRAPKMGYSAERFALLTRLVNLRILRQGATIPLDEEQRRSLMGMAYETKKVTYKQARKKLGLEEEDRFNGLSYQSDKKDPEEGTLAELKGYHGIKKAVEGSLGKIAWLNLSQQVDQLNFIAEALTYYKTDEDIQKYLTEKEVPEEIQAAVLSLSFDRVIHLSNFALNQLLPHLESGKRYDEACTEVGYLHYSPHQVDQKKVLLPSLSEEMKNPVVRRTFAQTRKVVNAIIRKYGAPREIHVELARELNKPWDERQKIQKGQEEYQSQKEKAVQKFKEISGREPKGADLLKFRLWGEQDGFCAYSQEYIDPTKLVYDPTYTEVDHILPYSRSFDDSMSNKVLVKTVQNQRKGNRTPYEYFAPDQWNTFEVWVKTQKKLSHRKKTNLLRKNFGDAEVAEMRNRNLNDTRYISRLISNYMREHLAFHEECEKNPVRVLNGQLTAFLRARWGLLKNRSESDRHHALDAAVIAAASQRFVSRLSKHSKWRELWNIKIDENKYVDPETGEILDSPYRQSLMENEKFPQPWEHFREELLVRLSPIAPTEIEKLNLPSYREGIEVTPIFVSRAPYRNASGAAHQETIRSTRWLKSGLTSVKTPLAKLTLKNLEDMVGKERDWRLYEGLKERLEAFSGNGQKAFVEPFYKYRKDGTPGPIVRSIPLFSTGTAGVSVRQGIADNDRMVRVDVYLKDKKYHLVPYYIADIVNKTVKDKAIIAGKSEEEWTQINKTFQFQFSLYPNDLVRIVTKKETFEGYYRGTHRGTGNITFDVHDRDQSIGKKGTIEGIGVKTAQSFQKLQVDPLGNKSFVSLEKPRP

SEQ ID NO: 16318 - protein, 1101 aa, unidentified
  REGION 1..1101: note = Cas Enzyme sequence
MAGGILLWDKLSLKEIRGKRRICLEESHIAGRGGVDLKYILGIDIGIASVGWCVLNYDKKRIEDLGTRTFVAAEHPKDGRSLAEPRRLARDTRRRLRRRAHRLERLRGLLIREGVLPLEAMASLYSIPLSVDQYTLRARALEHALGPEDWARVLLHIAKRRGFKSNRKSEEREKESGQVLCGIEANKKLLAEKGYRTVGEMLCKDEKFSDCKRNKGGRYLHTVSRAMLTDELHALFAAQRRLGNPHAGEGLETAFCQIFLAQRPFAASDDILKLVGECTFEKGQLRAAKHSYTAERFVLLQKINNLKLLLSGGKTGLTEEQRQKILRLAYDRAELKYAQIRKELVIPDEWQFAGLSYYRKGEAVNPETAKFVALDGFHKLKKAITDRAGKTAWGNIAENIDRLDDLAFALTFFKTDEDIQKYLREKEIPDEIIQAVLTVSFEKVQHLSIKAMRKVIPYLETGLSYGDACEKAGYCHWSPAGDHEKHKYLPPITKAEMRNPVVLRALAQSRKVINAIIRRFGSPYRIHVEVARELAKPWQERREIKREQDNYQQRKEQWKAEFKELYDFDAKSEDLLKYRLWKEQGNRCAYTGDYLSPDRLLEPGYAEVDHILPYSRSLDDSMANKVLVKGAENRNKGDRAPFEYMGGDQARWHKFEEWVRAYIKSGAKRNRLLRQSFGEKEEEELKSRNLNDTRYISRYLAQMLKEHIAFENTEDKNPVLMINGQMTAFLRAKWGLLKIREDGDLHHALDAAVIAAASNAMVGRITGYSKADELRYHLKNGKYIDMETGEIKDGPYKDTIDVSRFPRPWEKFREEIVSRLSDTPADFLEKFGLKSYTAEELAALKPVFVSRAPSRKVTGAAHKETVLSAKCLQAGFKLQKRSLADLNWDKGKSDFKDDIFGKERDWRLYEALRDRVRQNGGDVKKAFSTPFYKPVLDGKQDPPLVRSVKICVAGTSGVPINGGLAENGEMVKVLVYAKDGKYYFVPVYVADMVKNVVPDRAITVGKPESAWTIMDSTYTFKFTLYPNDLIHVKRKEDEFIGYYKQCNRNNSQVLVESHDRRKIFAGKDDTGWLISVGTILSLDKLQVDPLGNYTKVKQERP

SEQ ID NO: 16319 - protein, 1068 aa, unidentified
  REGION 1..1068: note = Cas Enzyme sequence
MIGGLAMKHAIGLDIGIASIGWSVINLERNRIEDLGVRVFPAPEHPKDGSSLAKKRREAGGARKRIQRKRSRLLGIRQLFQEYGVLSLQEMDALFQSPLNKNPYEIRVDGLSRRLSSTEWFQALYHIAKHRGFQSTKKTPPNSKEKEKEEGTLLEGIKNNASLLQEAKYRTVGEMILMDPKFQDHKRNKHGDYSHTIPQSLLREEIETLFFEQQRLGNPYTTDEFKRKILDTFASRLHFAAPGQIESRVGPCTFEAGEKRAPCMSWSAERFILFGKINNLRIRDYFRGERSLSIGEARDLANLAYQKPEVKYKDIRKLFDLDDTAYFSGIRYSGKDTEREKSEGAVFVRLKGTHELRRAITSKLGKEAWETYASTPEILDEIARTLTWLKNEEDIRKSLSDKNIPPYLIEAVRDLDFKGAINLSFKALHKILPHMENGLRYDEAWPKAGYQGPVSEIESVRSVLLPPEDFDDITNPVVKRSLHQTRKVINALVRKYGSPWSIHIELAREMGKSFDDRKKIKTMQEENNAEKERTKKDFIENYTREPSGTDLLKFRLWKEQGGFDPYHQVHIDSGRLFHQDDATYAEIDHIIPYSRSFDNSYTNKVLVLAEANRNKGNRTPREYIFSESRPEKWEAFVAWVEAQIRNGKKKSNLLRESFTLEDSNRMTERNLTDTRFITSHLANYLERCLVFSDPSPTSRKVLRVNGAVTATLRGKWGLHKDREAGHLHHALDAAVVAVTSHGLIQRITEYDQIRNSPGAKRNNGGARERTPQPWEGFSRELLARISPNPTEEIGKVSLPSYGAEESASLRPVFVSHMPVRKARGAAHKESVRSVKLGENGGTSIRTPLAKLDFKSLEKMVGKERDRRLYESLKERLVAYGGDGGKAFGGSAPPFYKPTKDGSRGPLVRSIKVFSPGTAGVLVRGGIAENDNLVRVDVYKYKTKFSLVPHYVPDIAKGIVKKRGVLAHKEEKDWEVIGDEHKFCFSLFPNDLIEIIQKGTAKTLGYYRGMDRSDGKIALNLHDGSNKKEIRVSTRTCDSIRKFQVGLLGDYHEVKKEKPPQGKIDDGLA

SEQ ID NO: 16320 - protein, 1062 aa, unidentified
  REGION 1..1062: note = Cas Enzyme sequence
MKHVIGLDIGIASVGWSVINLERNRIEDLGVRVFSAPEHPKDGSSLAKKRREAGGARKRIQRKRTRLLGIRQLFQEYGVLSLQEMDALFQSSLNKNPYEIRVDGLSRRLSSTEWFQALYHIAKHRGFQSTKKTPPNSKEKEKEEGALLEGIKNNASLLQEAKYRTVGEMILMDPKFQDHKRNKHGDYSHTIPQSLLREEIETLFFEQQRLGNPYTTDEFKRKTLDTFASRLHFAAPGQVESRVGPCTFEAGEKRAPCMSWSAERFILFGKINNLRIRDYFRGERSLSIGEARDLANLAYQKTEVKYKDIRKLFDLDDTAFFSGIRYSGKDTEREKSEGAVFVRLKGTQELRRAITSKLGKDAWETYASTPEILDEIARTLTWLKNEEDIRKSLSDKNIPPYLIEAVRDLDFKGAINLSFKALHKILPHMENGLRYDEAWPKAEYQGPVSEIESVRSVLLPPEDFDDITNPVVKRSLHQTRKVINALVRKYGSPWSIHIELAREMGKSFDDRKKIKTMQEENNAEKERTKKDFIENYTREPSGTDLLKFRLWKEQGGFDPYHQVHIDSGRLFHQGDGTYAEIDHIIPYSRSFDNSYTNKVLVLAEANRNKGNRTPREYIFSESRPEKWEAFVAWVEAQIRNGKKKSNLLRESFTLEDSNRMTERNLTDTRFITSHLANYLERCLVFSDPSPTSRKVLRVNGAVTATLRGKWGLHKDREAGHLHHALDAAVVAVTSHGLIQRITEYDQIRNSPGAKRNNGGVRERTPQPWEGFSREMLARISPNPTEEIGKVSLPSYEVEEIASLRPVFVSHMPIRKARGAAHKESVRSVKLGENGGTSIRTPLAKLDFKSLENMVGKERDRRLYESLKERLAAYGGDGGKAFGGSAPSFYKPTKDGSRGPLVRSIKVFSPGTAGVLVRGGIAENDNLVRVDVYKYKNKFSLVPHYVPDIAKGIVKKRGVLAHKEEKDWEVIGNEHKFCFSLFPNDLIEIIQKGTEKTLGYYRGMDRSDGKIALNLHDGSNKKEIRVSTRTCDSIRKFQVGLLGDYHEVKKEKPPQGKIDDGLA

SEQ ID NO: 16321 - protein, 1060 aa, unidentified
  REGION 1..1060: note = Cas Enzyme sequence
MNASILEHYSLGLDIGITSVGWAVLNLTVGKIADLGVRLFDKAEEPKTGASLAAPRREARNMRRRLRRKRQRMSNIRSLIISCGILSQTDMDNLFNSPHQCTPWELRTEGLDRLLTCEEWSRILIHMAKHRGFKSNRTVAESDIKNSEDGRVLSGIKENSELLQAGNNGAGYRTVGELIQSDPKFSGHKRNKGGEYSHTILRKDIEKEIEALFEEQRKFGSTYASMELEKEYKDIFGRQLPFASDGAIEKLIGYCFLEPAEKRAPKASWTAERFILLSKIMNLRVRLDGKKVSLSGDERITIDNLAYKNTKVTYKQIRKALNWQDNLIFDSLPFTKKDKDPEDSVFIELKGWHTFRKCLSEKLGTDYWETISVNPDLLDDLAYTLTFKKTDEDIARYLEERNIDKKIIDAVLPLNFSGVVNLSAAAMGKLIPLMEKDGCRYDEACVKAGYLHYKPAEKERSLKLPVPDWKEIRNPVVIRAIAETRKVVNAVVRKYGPPESVQVELARDLSRSKEERDKIIKEQEENRSQKEKLAKEFQDKFDYAPNGRQLEKFRLWKEQNGFCLYTGQYLAPEDVFNGSDDSFAEIDHIIPYSISFDDSRINKVLATSGANRDKGNRLPYYYFGGDGEKWNEFTARVNANIQNRKKAARLKIKSLDESDISEMKERNLSDTRYITEYVAKWLEENLLFAEKKTENHVTRINGRATATLRWQWGINALKDRESSDLHHALDACVVAAATPGIIKKISDYSRNRELQKLKINAEGNKKRRCPEPWEHFRKEVEARLSENPAEKILEFGLASYSESELNDLKPIFVSRRPDRGATGAAHKDTIYSAKYLNDDPPKIVVKKALTSLKKSDLENIVGKERDRALYEALAKKLEEYEDNPEKAFKDVFRKPTSNGKPGPIVHSVKIFDSRVTGLPVNGGIAFNDGMVRIDLYQKNGKYFLIPYYISDIAKKIVKDKAIAQGKREDDWIAIDETYNFVFSLFKNDLVRIIDSKGREIFGYYNSCDRATGAIEIKKHDGSASWRGIGIRTAKLIEKYQADVLGSYYKIKKEKPPHGLA

SEQ ID NO: 16322 - protein, 912 aa, unidentified
  REGION 1..912: note = Cas Enzyme sequence
PTDRAAAANKDDGKIAQGIQRLDATLNGQTLGQYLAQQTSRRARPRRAGAGIEYPLYPSRAMVEAEFATLWAVQAQAAPELLTEDLRQRIHHRIFHQRPLKPVERGWCSLVGTDKREPSAMPLAQQIRILQELANLRLTIGTASPRPLTRAEHAKLLNKLRTSKEVTFDAIRKLLKLPGITEFNLDTEGRTGLKGDLTAHRLASKNGFGKAWYNLPLADQSAIVTLLLNEPDEEQVLTRLQAFYGLSEAAALVVSRTALPDGESRYGPTALGKIVAKLAHPDEGWTKDEEDVVERPLRLDEAIPLADLTWHHSDRRTGEIDDHLPYYGQVLDRHVIGGKGQPNAAITDPMARAIQQYGRFPNPTVHVGLNQLAKLVNDLIARYGPPAEIVLELARELKQSAKERKKASEANVDNRKANDRRRQEIEGVGEKVTGDRLLRLRLWEELGRDQFTRTCVYSGRTISLHMALSAETEIDHILPFSKTLDNSAANLLLCVRGANREKLNRSPAEAFQSRPEWADIRARAAKLPDNKRWRFNDDAMAERESGFLDRQMAETRYLARISKAYLERICDPNRIWVVPGKLTALLRRAWGLERLLGNSGGKNRNDHRHHAIDALTIGCTSRGLLQRMAREAGRLEEGANLRDITDTVPDPWPGFDYETLRQRAARLVVHHKAEHGTGGELHEQTAYGLVDPKTNENCNLVVRKPLESLSAKEINHIRDPQLRTAIQAAVAGITDKKALAAALTAFGAAQTPPIRRVRVLTKDQTAIVLKDRQGKPYKAVVPGENHHVDVWRLPDGKVIGVGVSLFDAQPNKFQAEQRPHPAARKLMRLHKGDIIRAEKDGETQLFRVVRIAPANQRIWVAGINDSGDLQKRHDDPDDPFRWTFIGFNTFPIRNVVKVVVTRLGGIRQPPQG

SEQ ID NO: 16323 - protein, 1071 aa, unidentified
  REGION 1..1071: note = Cas Enzyme sequence
MKTTRDKRYRLGLDLGTNSIGWAAVNLDDQGQPCGVLDMGVRIFPDGRNATADKTSNAVARRTARGLRRRRDRYLMRRDELMQTLIEYRLMPPDPETRKELQRLDPYSLRARSLDQPLSPFELGRALFHLNQRRGFKSNRKSGGEEEDERKKIGPAIEGLRRSIDESGARSLGEFLARRHAQRETVRAREEVGLYPDRAMYQEEFDTIRQKQEEHHKLSPEQWDRLHDIIFYQRELQPVKPGWCQFEFTSEERRAPKALPIFQEFRIFTEVNNLKVQIASEPERPLDPQEREGVLKRLRSGLDISFKNPTAGLKVPSLSSGVSFNLARGGREKIQGDVVTKLLKKKELFGSRWLSLSLKKRNEIVKTLLLVEEPETIQLKAIREWGLTESQAKAVANVSLPTGYGDLSEKAIRKILPHLEKGRLYSDAVKDAGYSHHSDFRSSSALDRLPYYGEVLRRDAVGADPTKDPQKDGEEARYGRFPNPTVHIGLNQLRRVVNCLIEVYGKPEEIAVELARDLKSNLEQRLRDQRQQREGRERNQRYAETLEAKGLESTPDLRRKLRLWEEQKQGAVCVCPYTGRTLSFAMVVDSQTEVDHILPFSQTLDDSMANKVVCIAAANRAKGDRSPYEAFGKEILDRTTNFPPNKRWRFGPDAMERFEQEDRFLDRQLNETRYLSRTARAYLAHLYDEKGEGNQRVWATPGRLTYLLRRAWGLERILRADTDTGKIVRKQRDDHRHHAIDAFVVANTTQGLFQRFSRTAASGHHTAVERLASLVPDPWEGYQREQLRPILDRLVVSYKPDHGTRGVKGKTTGQLHNETAYGLLEPSEDGPSRVVRRKKLSAFKKKSELDDVRDPDMRKALIDLWDQTAAVIQAEGGKVSETPMRFAERAANEGVLVGGRRQTVRRVRVCEQETVILIRDQAGEPYKGYKRDGNEFADVWRMRDGSWKMVIVPRFEANQPNFDLEKFRPTDKAGRKDPTAKRLMRLFKNDMGAIGEGEERCIVHVRHMGTKTDRGPYVVLDDHEEANVDRRRRRGEIKEISYGARKLQRSSFRKVGVDEIGRVLDPGPPRL

SEQ ID NO: 16324 - protein, 1033 aa, unidentified
  REGION 1..1033: note = Cas Enzyme sequence
MGVRIFPDGRNATADKTSNAVARRTARGLRRRRDRYLMRRDELMQTLIEYRLMPPDPETRKELQRLDPYSLRARSLDQPLSPFELGRALFHLNQRRGFKSNRKSGGEEEDERKKIGPAIEGLRRSIDESGARSLGEFLARRHAQRETVRAREEVGLYPDRAMYQEEFDTIRQKQEEHHKLSPEQWDRLHDIIFYQRELQPVKPGWCQFEFTSEERRAPKALPIFQEFRIFTEVNNLKVQIASEPERPLDPQEREGVLKRLRSGLDISFKNPTAGLKVPSLSSGVSFNLARGGREKIQGDVVTKLLKKKELFGSRWLSLSLKKRNEIVKTLLLVEEPETIQLKAIREWGLTESQAKAVANVSLPTGYGDLSEKAIRKILPHLEKGRLYSDAVKDAGYSHHSDFRSSSALDRLPYYGEVLRRDAVGADPTKDPQKDGEEARYGRFPNPTVHIGLNQLRRVVNCLIEVYGKPEEIAVELARDLKSNLEQRLRDQRQQREGRERNQRYAETLEAKGLESTPDLRRKLRLWEEQKQGAVCVCPYTGRTLSFAMVVDSQTEVDHILPFSQTLDDSMANKVVCIAAANRAKGDRSPYEAFGKEILDRTTNFPPNKRWRFGPDAMERFEQEDRFLDRQLNETRYLSRTARAYLAHLYDEKGEGNQRVWATPGRLTYLLRRAWGLERILRADTDTGKIVRKQRDDHRHHAIDAFVVANTTQGLFQRFSRTAASGHHTAVERLASLVPDPWEGYQREQLRPILDRLVVSYKPDHGTRGVKGKTTGQLHNETAYGLLEPSEDGPSRVVRRKKLSAFKKKSELDDVRDPDMRKALIDLWDQTAAVIQAEGGKVSETPMRFAERAANEGVLVGGRRQTVRRVRVCEQETVILIRDQAGEPYKGYKRDGNEFADVWRMRDGSWKMVIVPRFEANQPNFDLEKFRPTDKAGRKDPTAKRLMRLFKNDMGAIGEGEERCIVHVRHMGTKTDRGPYVVLDDHEEANVDRRRRRGEIKEISYGARKLQRSSFRKVGVDEIGRVLDPGPPRL

SEQ ID NO: 16325 - protein, 951 aa, unidentified
  REGION 1..951: note = Cas Enzyme sequence
MPADDQAKRSVSTLDPYALRAAALNRRLDPHELGRVLFHLNQHRGFKSNRKIDRADNEGGLIKDAAAATQAELQREGFATIGAWLAHRHAQRAGVRVRLAGSGKTAAYPFYPTREMIEGEFDTIWAAQSAWNPMLTDAMRDELRSVMFHQRPLKPVPVGKCWLEPGEERAPRALPTVQRARIAQTLAHLRLAVPGMPEQLLTDQQRTELMTPLYQGKDLSFDRIRRLLKLSAETDFNTRDDKLVGCATADRLANGKKAPIGPAWHALDLATQDAAVRAIQNADTDEETTKTLVALGIDPEAAERAAKAMLPDGHAALSARALGNILPFLEVGERYSDAVQSAGYAHHSDRRTGEVRTELPYYGELLCQRIGTGTGKPDDPTEKRLGRAPNPTVHMALNEVRRVVNAIVHRHGPPTEIVVETLRELGRSARQRQEYEKQQKQNRDKNDARRKLLAEMRVPDNAANRMRLRLWEEQSTDPKNRVCPYSGTLITGRMALSDAIEEDHILPFAVTLDDSATNRVLVTREANRSKGRRSPFEAFGHSAQWPEILERVKLLDESKRWRFAPDALERFLGKGDFLARHLTDSATIARWAREYLDVLAPGRVWSIPGRLTGLARHALGLTSAAVLGKGGARKERDDHRHHAIDAVVVALCDRGLLKRMTDAAKRADERGQRLMVDFTPPWDGFVRDVAERMRALVVSHKPDTGWQGALHNDTAYGPIRGAKGKEPNVVVRKPLDALADWSAQDIRDGVRDQVLARKLASAVVDGNAQASKAALSSLTHSGGHVVRRVRTVERLVSTVAITNRQTGAPYKVLKRDGNHRTELWRMPDGKVTLEVVPTFNAAQQAEAARLGRKVPDHRPHPAAKLLIRLHKDDMVAFGDGDGRQLLRVVKMSGGNVTLAPAHEAGNLKARDAAKDDQFKYVTASARKLIVERARKVHVTPDGRVLDNGPAP

SEQ ID NO: 16326 - protein, 979 aa, unidentified
  REGION 1..979: note = Cas Enzyme sequence
MANTILGLDLGITSIGWALANVDDVNSTNNKIIESGVRIFTIAEHPKDGKSLALPRREARGARRTTKRKVQKLRAVKRLLIGEKIITTDELENLFIGNKNQKDVWELRRDALHKPLENKELARIMIHLVKHRGYASNSKSEEPTDSEGKAVLGGIEKNEKIVQESAYLTIGEYISTKVKKRNGKGSDGKLNYENSISRAMLIKEIETIFEKQKGFGNRFVNDELLESYKEIAFTQRPLKSVEGMVANCPFETDQKRTPKAAHTFEKFRALQKLKNLRIITQDGEISLTKEQINQAIYKAKTTTKFTYKTLKTLFSFEKTTQFKGLTYFDKYGVSVKKDPETVNLLDFSAYQKIQKVVESTDRLYWSRIENNDELLDEIARVLSTQKDDKKSFEELQKIIDHEAVSNALIGLSFSGFGHISTKAMQKINPFLEDGLDYDKACERAGYDFKAIFKGDKSLFLPPLTEQENLEMTNPVVKRAIAQMRLVYNAIARKYGAIDALHIEFTRDIKKSHDDRQKIKKEQDEFQVRKEAAKTSATEVLGREPNAKELLKFRLWQEQNGECIYSGVKIRPEHLMDDLATQVDHILPYSRSLDDSFNNKVLCFTKQNQDKGNKTPFEYFGADKESKEWQEFCLRTEGLKNLKSAKKSKLLKSNFDENSENSFKERNKSDTSYISKFVKNYIEAHAQFKESKMKRHVFTMNGMLTTQLRYKWGVGDKNRDNHLHHAEDAIILAFATQSEVQKLSTVSAAREGFSFKTKEEKAKNLKFEPPIEEFGNKVKENVEKIFVSHMPRRKIGGAAHKDTVYSNKTLSVKKSDGKIDSLKGNSVKNNVKLKHGIALNDAMPRVDLFQNKKTKKHYLVPIYVSDFVKPKLPNQAIVQGNKPWIEMDEEYEFLFSFYKSDLIEVKTKKTATKESIQVLGYYDGVDSATSQISLFTHDNRNSYRLGVQNLVFIKKYQVDALGSYVEVKNEKRQGTKKEKN

SEQ ID NO: 16327 - protein, 1022 aa, unidentified
  REGION 1..1022: note = Cas Enzyme sequence
MTKILGLDIGIASIGWAVVDQEKETIRDGVFLFDKAETPKEGKSLNLARSSARSHRKTLSRKVHRLKKLKNILMQNNICRSSEIIESPWKLRKDGLYRKLDTSELFVVIYHIAKRRGYHSNRISDFENEDGKVKEGIKNNKNAFKSANSLTIGEFLYDKYNGTHIRNKRDTYYRTITRDLLRAEVTVLFEKQRGYGHVLSADFERKITGIMFDQKPTGSVKEMVGPCTFESDEKRAPKNCYHIERYVAWQRLNQIKIQSDLGETKQITLEDKKSLITKIHTQTKFTFKQLRTYLKLNENYKFNLVNYNVKSKTKADPESKTFIELKGYHDLRKCLEKKCSKEDWIKLEEDKQTIDKIVEIFAYFKDDKLIRSKLEKLDGVPSKWVDPMLENINFSKMAHISLKAAKRILPEMEKGDPVHIATEKVGYSIKQLFQGHSKCLPLPTKEDLYVLTNPVVKRAFYRTRKIINAIIQKSEFDSTYKFEKIHIELARNIKKSLAERKKDENINNENQENNRKAESFCKEMDLPINGKNITKVKLFNEQTEICPYSMEPLTIDELKDETALEIEHIIPRSISFNNSFTNLLLVKSKSNREKSNQLAGEYLKKIGQYDQSIAFCEKTAMSKPKLTLLKKTILSDSEKESFNERNLTDTRYLSVFIKDFIQKHLKFDSSTENKQYVFTRSGKITSMLRQMWGISKDRSKDDKHHAIDAIILACSTNYMVQQLSTYMAKLETTTSNKKQPGFRWPWKTFRDDLNQSLSDIKCVRTPQKKISGLLHKQTLYSKKYLDKKRTKVNCPLTHLDEKKLEKIVDKENGNKKLYTSLKHHFEKNGSKKGYSFSNTNRFFIIQKNGEKRPIYKIKIWDDKKVCSGGVELHGGIYEREQINRVDVYLKNNKYFLVPIYISDFATGNCPNKAISSGKGAIIEIDQNYQFQFSLHKYDIIKIQTKKKGPIIDYYFSSVHSRSGSLIIKNINGEPFRISNDGKKPEFESSIGVKNVTIFKKCCIDLFGEIREVHNHSFLPLKK

SEQ ID NO: 16328 - protein, 1041 aa, unidentified
  REGION 1..1041: note = Cas Enzyme sequence
MGATSLGWCLLTVANNEPNSIACMGVRIFPDGRDAKSREPMAVTRRAARGARRRRDRTQKRQRVLMDFLIKNGFMPDDAKERKKIEKYDPYELRARALDGQVSLYELGRTFFHLSQRRGFKSNRISDRGNDEKGAINTGIENLQEKMSGFRTLGEYLFHSEQKRARPHTEKGKNSYVFYPDRSMYLDEIQQILKKQKQFHSELTEDTCQCLINIIFYQRPLKAPKIGLCTFETQNKESRARLAYSEVQNYRIWQEVNNLDLKRYAEDDPMLTNEDRQKIAKALQNKKDMSFAGIRKLLNFSRDMVFNLESNKRKKLLGNDTQFYLQQEECFGVEWQKLSDDKKNEIIDLLMEEDDEAEIISALTGKYGLTQEQAVKTADIPLKDGYGRLSIKAIRKILPYLQQGEIYSKACELAGYHHSQRETGEIFDRLPYYGEVLEDAVIGGSFDPEDRKTPEKYFGKINNPTVHIALNQLQKLVNEIIATYGHPDSIHVELARDLKCGQKQLKEINLRQAKETKDNERITAELIKLNVKQNYANRMIYKLWEDLSADPAKRCCPFTGKQIADRKLFSGDFEVEHLLPFSRSYNDSRANKVLACKTANRRKAGRSPFDAFGQSPEWNDILARVENLPEDKKWRFQENAWEIAKGEGEDLIARQLSDTQYMSRISKRYLSKVCDPRRVVGIPGQLTAMLRRKWGLNDLLSDGDLKDRTDHRHHAIDAFVVGCTTRSLLQRISAEARRFYDDSDLYERRLKLVASMPDAFPDFYEQLGQNLDNIVVSYKPDHGNAYKAQKNGKTTGKLHEDTAYGFVKESDKKGKAIYVVRKPIDSFKDQKGVKAIVDDTIRNKLLEATSGMNGVAFIDAVQAYARKNNHRRFRIHVEKSKNAMIGISRAGKEVQHTTPYKYYATGGNYCAEIYCSDKGPKAGKWQCEIISTYDAHKPGVMSEWRKNHPTAKLIMRLQIDDMVAYEDGDETKICRVKKMTGGLVYLRNHKIAKEDGDQFSWAASPNLMQQSNARKVSVDILGRVRDPAGRIAYKKSGVAVA

SEQ ID NO: 16329 - protein, 1041 aa, unidentified
  REGION 1..1041: note = Cas Enzyme sequence
MGATSLGWCLLTVANNEPNSIACMGVRIFPDGRDAKSREPMAVTRRAARGARRRRDRTQKRQRVLMDFLIKNGFMPDDAKERKKIEKYDPYELRARALDGQVSLYELGRTFFHLSQRRGFKSNRISDRGNDEKGAINTGIENLQEKMSGFRTLGEYLFHSEQKRARPHTEKGKNSYVFYPDRSMYLDEIQQILKKQKQFHSELTEDTCQCLINIIFYQRPLKAPKIGLCTFETQNKESRARLAYSEVQNYRIWQEVNNLDLKRYAEDDPMLTNEDRQKIAKALQNKKDMSFAGIRKLLNFSRDMVFNLESNKRKKLLGNDTQFYLQQEECFGVEWQKLSDDKKNEIIDLLMEEDDEAEIISALTGKYGLTQEQAVKTADIPLKDGYGRLSIKAIRKILPYLQQGEIYSKACELAGYHHSQRETGEIFDRLPYYGEVLEDAVIGGSFDPEDRKTPEKYFGKINNPTVHIALNQLQKLVNEIIATYGHPDSIHVELARDLKCGQKQLKEINLRQAKETKDNERITAELIKLNVKQNYANRMIYKLWEDLSADPAKRCCPFTGKQIAVHKLFSGDFEVEHLLPFSRSYNDSRANKVLACKTANRRKAGRSPFDAFGQSPEWNDILARVENLPEDKKWRFQENAWEIAKGEGEDLIARQLSDTQYMSRISKRYLSKVCDPRRVVGIPGQLTAMLRRKWGLNDLLSDGDLKDRTDHRHHAIDAFVVGCTTRSLLQRISAEARRFYDDSDLYERRLKLVASMPDAFPDFYEQLGQNLDNIVVSYKPDHGNAYKAQKNGKTTGKLHEDTAYGFVKESDKKGKAIYVVRKPIDSFKDQKGVKAIVDDTIRNKLLEATSGMNGVAFIDAVQAYARKNNHRRFRIHVEKSKNAMIGISRAGKEVQHTTPYKYYATGGNYCAEIYCSDKGPKAGKWQCEIISTYDAHKPGVMSEWRKNHPTAKLIMRLQIDDMVAYEDGDETKICRVKKMTGGLVYLRNHKIAKEDGDQFSWAASPNLMQQSNARKVSVDILGRVRDPAGRIAYKKSGVAVA

SEQ ID NO: 16330 - protein, 1192 aa, unidentified
  REGION 1..1192: note = Cas Enzyme sequence
MSLIFSFDVGKASLGYCVRKGYEIEELKSIIIPSEHADYVELFGGRKRQFRTREAHEKRQNWLRALWNDLGLEGLDSKDSRLVSEFRKSEDEEVCSGVLLRIKLLEGNKLQEWQIFKALWSAIQKRGYDDKLPWASSNSSRKEKKDELIDEVDSGEKSKPENDDDAENKKGIESYEKDLVENCGTDEKFHLPCYLEAAKLCLWKNGRIISHKITYEAEKVRKSAFVAPRHLIEKEIEQLLIKAAEQIPSIKEKEFDFVFFPNEESKRENKGIPVKGKGIDFVLYGQGQKQYASYYKDSEFNRKRGTEWDTQGLLSQKIPRFDNRIIGKCSLIPRLNTCNADDILAQEFKLIQSIRNLIRPNREALPHEKFIMVFQKLRNKLVIKDAPPSINFSLTEINKALKEVDLSQISEKNLHSKQTKSSFFKINNSGRSRLSRPALSCVSELILSGKPINRFVEEICEKGTLEHTAFGLLKNKEDKSKTEVQEKKYKHLITENNPLKGITQSELVNLSSRLGDSWSNYSIQDDREVQDLSKLSLDERKKLVEKELGKISNYVVKNRLQIVINTLNDLLKIHGEPDSVVIEMPRGEDSLDGSQNNLDYIKAQKDREKINKIYIEELAKLEKSPKYLERYKLWKEQRGVCVYTGQTILDSEIDSSKLDVDHIIPRAQNGNNSIINKVLVLKTANNEKLDRTPYEWLSSNPQKWAEFKEQFETGLLKHLPKFKKKLLLVDPSSEDGKKLIDNLNALQDTRFIAKLGKKLIGIFLGWNEGSEGSKRKLAVVKGSETAEFRREYDLNKLLGDDKEKNRNNNKHHALDAYCMSFANDEWVWTKSENGKQIRRKEHLETSEHVKKVKAEIKSWMEKVVPVDIIKGNPKKGDPKKKKPDETIYGLRLINKKLCIVRYRPLAPSKNDKDKKNDNAEKEEKLKPERIVDPFIREDLKNRFQSRNFDGKTQSEFFQKYLHPNPKRKQQNCEVKRVLYIECEINQEDLKRPLISNGRFCYQNFVDVSKNPSYSIDDLMNEKREKRKNNIQLKKIKQSRNYLIYKDLNSTKDNYGIRHVKGYESIKVAKEELEDKKFEVVNEHLFSGCLIKIHKDFEASVEIKKEKTKNKKTKNEDSTEEIQNDTKEAKTERKIMPSGIYILSSIGEATPRVSLESNNGDSMELLGRLNKLMELGFDLHEPNESKKEGRKLI

SEQ ID NO: 16331 - protein, 1085 aa, unidentified
  REGION 1..1085: note = Cas Enzyme sequence
MKYRLGLDMGSTSIGWCLFELTKDNEIKKVVNAGVRIFSDGRLADSHEPLSVGRRMARGIRRNRDRYKKRRTRLMDILIESGLMPDNETERKRLEILNPYELRAKGTNGKISLHEFGRVLFHIDQRRGFKSNRKSDKSDKDEKGKIAEASKRLSEELNQRGFKTLGEYLYDVLKKGESVRVKMVEDKYNIYPLRSMYEKEFEVLWNEQTKYYSNLTEKLKLKIKDTIFFQRDLLPQEAGFCEFEEGEHRLAKAHPLFQDFRIEQEVNTLEVLSPQGEFLSEEQRNTIKQILKTCSIPPDKGRMEITFSKLKKAINLNKKVKFNLESEKRKGLKCHTSNYIMSGQGNFESAWYEKDDNERYEIIELLISDKKDNEIKEWLKNKFGFDDERAEKIMHAYLEEGFGSLSKKAIEKILPFLKQMMLYPAACKEAGYNHSDNRPDKTLKFLPYYGEVLKNKVIGGKNDPKFKDYPEKFYGKINNPSVHIALNQLRKVVNALIKKYGPLEEIALEMARDLKVGTKGLQEIEKEQSANQRENERIDSILEKQGLPINGENRLRYKLWEELAEKPQNRRCVFSGEQISMKDVWSDKFEIEHLLPFSRTYDDARSNKTLSSRKSNRLKGNKTPYEAFGNSTIWKEILERVEKLPDNKKWRFGKEAMEKYEKDGGAIARMLNDTRYMAKTAKEYLGYVCEPNNVYAIPGQLTAILRNVWGLNYLKDKDNPEAYRADHRHHSIDAFVIGCTTRGMFQLASKCSDWADKAGGQHEGRKKLFKRRFEPFESYEEKGRDDFKEIVEKMVISYKPDHKNVELAKGIHSTTGQLHQETAYGPTDIKPKDKGCVVVSLRRDIKKIEEKHLDEIADKEIAKDIAKILKTEDKTKKESMLEKYGIENKISKVKCFIEKDKKILIPVYKKDKDGKKEEKPYKYYVGGNNYCMDIYCLRPDDKRDPKNAGKWMGEVISNFDAHQSGFEPEWRKKHPTAKRIMRLFINDTIVLTFTKEETIPQGLRKFVLSKFDRSKKKEINIVFRIKKMTGKRVFIRPQLVAKENGDQLSWGPNASGLFERKGRRVSINELGEIHDPGFMPGWQNN

SEQ ID NO: 16332 - protein, 1129 aa, unidentified
  REGION 1..1129: note = Cas Enzyme sequence
MGRSKERDCLEVLFANIYLNLTMIFEETVFGFDLGKGSIGYCARRGTEIIDLGSMLIPAEHASTQDIAKRRRAFRTRQAHKKRELWLNKIWSEAGLIPLIEFYEDINKNKSIRVKTADDKLKAEYTAKNSNTIYNSALLRVALMNYSSNPAQDLATLIQGQALNEWQIYKALHAAIQHRGYKHSDYKDHETENTENAAEALDDAKENYEAVQEYEKALQETFSAKELHYPCYFEAKLQGLISDEYPVNLNKIKLRIEDISQAESLSASRTVRRKGRVAPRELVAAELRVLFDNAKEIIPNLKNTETDYFLYGPAKEAFVTVKKNAPKEFKRQRGTEWEAQGVLAQKTPRFDNRMMDKCCLMPLRNTCNAKDTENSKFKLLMHLKNFRFTDVYGERRGFTREEFKKVFEKCFNLVQEKISSEVKSLKLTKAERDKIIKAVLDATFHDPNFNDEIKFNTSGRSSFCRPALKIINEILENTLEPSQIDISKHVQNSDETKPHLGVTKSEIERVTSRLGETWEKVNIQDNRYEIDLEDDKYKEIALKIGSVNNPVVRNRLQVFINLVEALAKKHGTPDKIIFEFIRGEGGYIDGNKVVKNYNTAIKDNEKKNDKAAKDLLENDLEVNKKNIDKYKLWERQGRICPYTGEALIPEKFREYQIDHIFPYSDVITSDALFNKVLCLGLANQEKGKRTAYEWISSKGTDEWIKFQARIRNMKALPKRTSELLINTKPLELFERYTGLAETAHVARLAQNVTAKLFGWGLQTRDDERKIFVNSGAVTAKLRSKYKLERLLRNLSEEEWKNLAPELKKKNRDNKLHHALDAYCISCSQSIKEKPDSSINDSDTRRFSCEALEKSKESFEKRFKEISPFNKTRDISALLPKETIYRLEKIQRKNKKGDLVNFNCLTYHKEFYAYLSEKITKDEVNKRLEKIWDLDVRKDLKNKLELMNFSKDNWINALKEYRHPYRKTLIKKIQIIDKETESEVYSDNERLCLEEFKDFSPSKSLTRGQFKHTKSHKGQIIYFDEKGKARVYALFAHKNTKLALKELTEKGYELYENGCMFETGDSILVESPFKVGAKEHPAGIYVLNSIKSNGVIAMNSGEIGVPASTLTKARFIKIDPVKNKKEAALI

SEQ ID NO: 16333 - protein, 903 aa, unidentified
  REGION 1..903: note = Cas Enzyme sequence
LSNVKNIELTLRQKIDNHECINSKTGEIVILSKDNIDSIVKFWINTPSSKEINATNIFKSTGFKDTKLNLHEQLSQVILNIQAHKNILTVLNKYNIDFQDTQNSFYNEILLELYYFKNNSSRVEHINNIVNKYNIKVDDAFVQELAILENMDGFASFSLEFTNEVLEIIRNENKTHHEALESLGYFSKYLDMPSYDYLPPLEPTKKDIQWLQDNISYFDTQHLFYQPMMSPKVKRVISILRKLINDMIKKYGKIDEIRIETAKEMNSVKEKEKIDKNQSKDRTKNNDAIKFLKAHNLKESNKNIERAKLYKEQSKNGCRCLYSNEEITEEDAFDENETEVEHFIPRSVIWINSYKNKILVKKKYNQAKGSLHPIEYLKSKGKWEEFQNHIINNTFMSFAKKDWLTKEEIINSVMQKEHWQDSYLNDTRSATRTIQKYLNHYLYPKENLHGKAEKRSIFSVSGRAISELKYMWGIHTVMPKNEDEKKDRNTNYHHTLDAFTVALCSNSAINTLHSHFKKKENQFKNKAQKKKLTANIPKSKEGINVVEHLKNLVERYETNKLYVCPYSKRKTNMKGFKDGNLKLYVTKDKNDKPILAEMEKVSIDSSILIKTVGGFPKPRSDDEVMNYIQTIQERLDNLKQKKIIDAIEVYATKLTTLRSKIDGVESEIKKLKKAFKTGKQHKEENDSINESIKPYSEKTKILSKELQELKCSFTIKNGKRQIVKSLKLKKIKISETGADAIIFKDRIERLSVSNFEKAIKDKEPFVAKMNESTLNVELFNTEKRGQAVGLNYFSSISNDINTKINDKFIEEIGNNQSNLILYKNDIIKVNDSKNLKEEYYIFNGGGKINVANKLTIKNINKNSFYKIDRKGNKKEIKEDAVSPGKNTVISIVNIDFFGNIKEG

SEQ ID NO: 16334 - protein, 981 aa, unidentified
  REGION 1..981: note = Cas Enzyme sequence
NKKDNYNNSLDRNLWKEELEILLESQKENKELFETIEIYDSLKNKLINGVNENSKGVFEQRSLKSMEDMVGYCSFYNKFHRNPQKRVLKSHISSIELTIRQRIENSISGNLIFNDKTGEIFTPTKEQIDNTIELWLKRPPTKTINTKNIFDKTGLKNIKIETLNKQDETVLDIGIHVQLLEIFKKTDLDIFKTHKDLYSKILKKIFYFVNKEQILKEIKKIDEENLLNDETIKELSKVSKGIKDTYASFSLCFIEEILEKMKSGKNYHDSLADLGYFRKYLNMEPYSYLPPLNPSEKDLIWLEKNIENFKREHIFYQPLVSPNVKRVISILRRLINDLISQYGKIDKIIIETARELNSKTEEEQIKEAQANSRKEIKAAEKLLLSDNCELSKKNIERARLLIEQKSKCLYSGEPLTLEDALDEQKTEVEHFIPRSKIWINSYKNKILVLKKHNQDKSNTHPIAYLKSKNSWEEFTSRVKKELTNTSKIFWLTNEENINKNWEKENLEDRFLNDTRSATKIISNYLEHYLFPKQNEFGKGETNQNVIRVTGKAISELKRLWGVDKVQPKNEDDKKDRQTNYHHTIDAIIISLLNESAKKALNDFFKQNENGFKTKEILEKIKTRFPITSDGVNIVEFIKEKVKRYENNEIYICPVIKKRDNVVGFKDGNVKLYLDKEKEEFYQIDKKAIDKNLLFDNYGKDISDKEVNKKVEDLISHLDLPKQENIKNALLEYKNKLLITRENISNIKKEIIELKGALPNKKNYEDTEQTIAIKDKLFRLDELKKDNELLQNEPCFFITKKGLKQIVRNIKVKTSSASKADSLIITDKTQKDRLKRLSLDVYKELKEKDIPFVAKLNDTTLNVDLFNTSKGQVIGLNYFSSIRNNIPPKINEKKIALIKDYEDKITIQKGDILEIENLKESTKEYFIFNGGGNIAGSNNKLELKSLNRKEVKRIFMTLNKDTIARKVFINYQGDISYEEFKK

SEQ ID NO: 16335 - protein, 1136 aa, unidentified
  REGION 1..1136: note = Cas Enzyme sequence
MKYRLGLDMGATSIGWAVYNIENDTVEDMGVRIFDDGRDPQSKASLCVKRRQARGARRLQNRKHIQKAYLLKTLIQYGLFPKAKEEQQALKSSDVYGLRKKALDEKITLYEFGRVLFQLVQRRGFLSNRKDNREEGGKLKAGYAHLKEKMASENARTYGEYLYNQILRGESPRLKGIIDSDGKFKGDDFPFRELYIMEFETLFEKQQQYYSDVLTSDLKALLKDVLFFQRPLKEAEEGMCTFEYGEKRIAKAHPLFQEFRIWQHIMNLEFCSETESEYRRLSQKEIERLVFILQHPTDYIKTKKALLTYKEIKALLGLDKKGLFNYELKSSKEDDTKGVLADTTAFAVGQVECLRPVWENLSETDKEEIVKIISRPETYIKKPKKVSAEGYDALIIDCLCQRFSLSNEVGKALLYDVEWEDGFGALSEKALRKIVEAMKTGMTYDMACQEAGYHHSHKETVHRDFLPYYGEILEQSCIGQKDNPATPEERYGKIANATVHVALNQVRQVVNELIRHYGQPFDISIEYARDLNASAEERQKMSKTRDNNEAENERIKKEISKTGRNPTPQDIIKYKIWKRMAKNPIDRSCPYTGNPIDIENLFNGNLFQIEHIIPFSRSLDDSYANRVIASAWANKLKGNKTPYEAFHNNEFASQNIVWTEIQNRIKKLPDEQKWRFGKDAMKKFEEKEGPIARSLNDTRYMTRVLQTYLLPIVREDGNKKAQAVAGQLTAMVRKSWGLNLYKEDKGTEEYRAYHNHHAIDAVIISAVNRRQIEKTAQDLKTIYPSALARFRDELWKMRDENISEEEKKDLRKRIKDFTLERETTIIKEHIQKPISLNVPDLIKRVENLNISHKPKLKNVYDKTSTVGELHKDTAYGFKGFVDEESLTAKFNGNEKDKIKDVTEYIPMFYEAEDKKAYYDAFKEWFIIERKAETLDAKTSEEKRIKEELQNREKEAVLKLRETSQKAFKWFVGGGNFCAEIYQINPQNKIGGVPTKDAGKWDSEIISNYNATVRVHRGEDIFYWKNRYPNAKRIMSLKRNDMVTGTFTREEAFEENFPKGIQAYVRPRFEENLNLTQTTVLFRVKKINSNGQIALTPHNIAKEEQDTKSWMATSGSLQKYRAKKVFVSPTGRIQNAK

SEQ ID NO: 16336 - protein, 1128 aa, unidentified
  REGION 1..1128: note = Cas Enzyme sequence
KDIIKKDLFMAKKTVYLPKKYSLGLDIGTSSAGWAVLDLDKKRIHDLGVRIFERSEDPQNGDSLAKPRRDARSARRRLKRRRQRLNRLKQFFVDQNILTKKQVEKVLDYKSDFNKLDIYALRSKALTEESSPEELLKVLYQIAKRRGFKSNRKVVEESDKEGGRVTSALKTNEKFLADNNYTTVGEALSRDEKFAPHKRNKRDDYTNSFARDDFLCELEAIIKIQRNYALKNVPKQAINEMIYGIDNGQVTNVNAIMYQRPFMTKELIEKMVGECTFEKDEKRAPKASYSFEVFRLASDLSHLIFIPRDASKRQAKRENLEVRLSPEQISKVIDVAKSQKNLTYKKVRSTAGISEDYVPKDVRGKKKEGDEFGEDNTFGGLKAYNDIRSALRALPEDWAKIDNESAINQIAYILTTQKADEGIRDELNLLPISNKAKEAIVKIKPTNFKAFGHLSIKALQKITPHIFEGMTYDKACEAAGYDFKKQSASLEQITNPVVKRAITQTLKVVRAVERKYGKPYFIKVETARDLAKNFKDRKAIENENKENQARNQSIIQTLNENGIVTPTGQQIIKVKLYREQNGVCLYSGKPIDFETMLRDDNAYQVDHIVPFSRSNNDGITNKTLVLTEENQKKGNQTPFEYFGADEKRWKEFAARVESIYKTRDIKTSDKATNAINYKYNGYAMKKKQNLLLQDYKNDSWNVRALNDTRYITRFIQNYLRQNVDFAEGEEKQRVIAPNGTTTAYLRKRWGLAKDRAEDVLHHAKDAAVVAAIDNSIVRQANLFAKRGEIAALLSAVKTMEEKTDKLTGEIIDEDEFDKAQRRKDAAIVLTSKYFPQPWDNFGKEVMKRTLNTDIATLQNELRGLDNYDEGFRLKVKPIFVSRMPRRKATAQAHKETIRSPKVKDNDQRTVRMPLKKVKRKDVENSVLKESDKWLYDKLLERLDTHDNNPEKAFVEPVYKNDKKIDKNGKQLSPVSTIKVYSTQPSGFYINNGKAFVNNGSMIRLDVYQKPNKRGKIEHFFVPVYAHQVGKNKPAPTKILPAPKGFTDVDETFNKVCSLYPNDYVRIYLKNEIREGYYVKYNVANGAMQLLPNYAPEKNQGTFVQAYGKNAQAIERYDISVLGDNCEWL

SEQ ID NO: 16337 - protein, 1145 aa, unidentified
  REGION 1..1145: note = Cas Enzyme sequence
MTQKYSYSPKKYSLGLDIGTSSIGWAVLDLDKERIHDLGVRIFEKPEHPKSGDSLAKPRRDARSARRRLKRRRQRLNNLKQFFISQNILTRDRIEEVLSDKSEFNKLDVYALRSKALTEKLSPEELFKVMYQIAKRRGFKSNRKVEEESEKEGGRVSKALKTNEKFLAENEYKTVGEALSRDENFASHKRNKRDDYTNSFSRSDFLHELEKIIEAQKRYALKNVSDTAINEMLYGLDDDKNVVNISSIMYQRPFMTEELIKKMVGNCTFEGNEKRAPRASYSFEIFRLASDLSHLVFIPRDASKRQARRENLEIRLSSEQINKVIEAAKNQKSLIYKKVRSIAGIGEDYVPKYTHGKKKDGDEFGEGNAFSSLKAYYDIKTALKNLPEDWAKIDNESTINQIAYILTTQKSDEGIKAELNALPISDDARNEIIKIKPANFGSFCHLSIKALQKITPHILNGMTYDKACEAAGYDFKKQSASLEQITNPVVKRAISQTLKVVRAIERKYGKPYFIKVETARDLAKNFKERNAIKKENEENQGYNEDIKSIIADGYEASPKTKGGKQLLSHLKELSVPLNKNADFNGQQIIKVKLYREQNGICLYSGKPIDFDTMLQDDNAYQIDHIVPFSRSNNDGITNKVLVLTEENQKKSNKTPFEYFGADENRWKEFVARVESIYKTRDIKTDDKVTNAINYKYNGYAMKKKQNLLLQDYKNDSWNVRALNDTRYITRFIQNYLRQNVDFAEGEGKQHVIAPNGTTTAYLRKRWGLAKDRSEDVLHHAKDAAIVAAIDQKIIMQANLHAKRHEIKELLAAAKTMEEKTDKLTGEIIDEDEFNKAQRRKNAMLVLSSKHFPQPWDDFGKEVMKRTLNIDIKTLQNELRGLDNYDEEFRLRVKPIFVSRMPRRKATGSAHKETIRSPKVKDDGQRTVRMPLKKVKRKDVENSTLKESDKWLYKKLLERLDACDDNPEKAFAEPIYKNEKKTDKNDNKLSPVSTIKVYSTQPSGFYINDDKAFVNNGSMVRLDVYQKPNKKGKIEHFFAPVYAHQVGKNKPTPTKILPVPKGFTDVDETFTKVCSLYPNDYVRCYFGNEIKEGYYVKYGINNGAMQVISHNSTGKDKDQLIQISPRSANLIERYDISILGDNYRWL

SEQ ID NO: 16338 - protein, 1145 aa, unidentified
  REGION 1..1145: note = Cas Enzyme sequence
MTQKYSYSPKKYSLGLDIGISSIGWAVLDLDKERIHDLGVRIFEKPEDPQNGDSLAKPRRDARSARRRLKRRRQRLNNLKQFFIDQNILTRDRIEEVLSDKSEFNKLDVYALRSKALTEELSPEELLKVMYQIAKRRGFKSNRKVEEESEKEGGRVSKALKTNEKFLAENEYKTVGEALSRDENFASHKRNKRDDYTNSFSRGDFLHELEKIIEVQKRYALKNVSDTAINEMLYGLDDDKNVVNISAIMYQRPFMTKELIEKMVGNCTFEENEKRAPRASYSFEIFRLASDLSHLVFIPRDASKRQAKRENLEIRLSSEQINKVIEAAKNQKSLTYKKVRSIAGISEDYVPKYTHGKKKDGDEFGEGNAFGGLKAYHDIKTALKNLPEDWSKIDNESTINQIAYILTTQKSDEGIKAELNALPISDDAKNAIVKIKATNFGSFCHLSIKALQKITPHILNGMTYDKACEAAGYDFKKQSASLEQITNPVVKRAISQTLKVVRAIERKYGKPYFIKVETARDLAKNFKERNAIKKENEENQGYNEDIKSIIADGYEASPKTKGGKQLLSHLKELNVPLNKNADFNGQQIIKVKLYREQNGICPYSGKPIDFDTMLLDDNAYQIDHIVPFSRSNNDGITNKVLVLTEENQKKSNKTPFEYFGADENRWKEFVARVESIYKTRDIKTDDKATNAINYKYNGYAMKKKQNLLLQDYKNDSWNARALNDTRYITRFIQNYLRQNVGFAEGEEKQHVIAPNGTTTAYLRKRWGLAKDRSEDVLHHAKDAAVVAAIDQKIIMQANLHAKRHEIKELLAAVKTMEEKTDKLTGEIIDEDEFNKAQRRKNAMLVLSSKHFPQPWDDFGKEVMKRTLNVDIKTLQNELRGLDNYDEEFRLSVKPIFVSRMPRRKATGSAHKETIRSPKVKDGDQRTIRMPLKKVKRKDVENSTLKESDKWLYKKLLERLDACDDNPEKAFAEPIYKNDKKTDKNGNKLSPVSTIKVYSTQPSGFYINDNKAFVNNGSMMRLDVYQKPNKKGKIKHFFVPVYTHQVGKNKPTPTKILPAPKGFTDVDETFTKVCSLYPNDYVRCYFENSIEEGYYAAYDIDSGRITVINASSPSKEGVNRRRISARSANLIERYDISILGDNYRWL

SEQ ID NO: 16339 - protein, 1145 aa, unidentified
  REGION 1..1145: note = Cas Enzyme sequence
MTQKYSYSPKKYSLGLDIGISSIGWAVLDLDKERIHDLGVRIFEKPEDPQNGDSLAKPRRDARSARRRLKRRRQRLNNLKQFFIDQNILTRDRIEEVLSDKSEFNKLDVYALRSKALTEELSPEELLKVMYQIAKRRGFKSNRKVEEESEKEGGRVSKALKTNEKFLAENEYKTVGEALSRDENFASHKRNKRDDYTNSFSRGDFLHELEKIIEVQKRYALKNVSDTAINEMLYGLDDDKNVVNISAIMYQRPFMTKELIEKMVGNCTFEENEKRAPRASYSFEIFRLASDLSHLVFIPRDASKRQAKRENLEIRLSSEQINKVIEAAENQKSLTYKKVRSIAGISEDYVPKYTHGKKKDGDEFGEGNAFGGLKAYHDIKTALKNLPEDWAKIDNESTINQIAYILTTQKSDEGIKAKLNALPISDDAKNAIIKIKATNFGSFCHLSIKALQKITPHILNGMTYDKACEAAGYDFKKQSASLEQITNPVVKRAISQTLKVVRAIERKYGKPYFIKVETARDLAKNFKERNAIKKENEENQGYNEDIKSIIADGYEASPKTKGGKQLLSHLKELSVPLNKNADFNGQQIIKVKLYREQNGICPYSGKPIDFDTMLQDDNAYQIDHIVPFSRSNNDGITNKVLVLTEENQKKSNKTPFEYFGADENRWKEFVARVESIYKTRDIKTDDKATNAINYKYNGYAMKKKQNLLLQDYKNDSWNVRALNDTRYITRFIQNYLRQNVGFAEGEEKQHVIAPNGTTTAYLRKRWGLAKDRSEDVLHHAKDAAVVAAIDQKIIMQANLHAKRHEIKELLAAVKTMEEKTDKLTGEIIDEDEFNKAQRRKNAMLVLSSKHFPQPWDDFGKEVMKRTLNVDIKTLQNELRGLDNYDEEFRLSVKPIFVSRMPRRKATGSAHKETIRSPKVKDGDQRTIRMPLKKVKRKDVENSTLKESDKWLYKKLLERLDACDDNPEKAFAEPIYKNDKKTDKNGNKLSPVSTIKVYSTQPSGFYINDNKAFVNNGSMMRLDVYQKPNKKGKIKHFFVPVYTHQVGKNKPTPTKILPAPKGFTDVDETFTKVCSLYPNDYVRCYFENSIEEGYYAAYDIDSGRITVINASSPSKEGVNRRRISARSANLIERYDISILGDNYRWL

SEQ ID NO: 16340 - protein, 1145 aa, unidentified
  REGION 1..1145: note = Cas Enzyme sequence
MTQKYSYSPKKYSLGLDIGTSSIGWAVLDLDKERIHDLGVRIFEKPEDPQNGDSLAKPRRDARSARRRLKRRRQRLNNLKQFFIDQNILTRDRIEEVLSDKSEFNKLDVYALRSKALAEELSPEELFKVMYQIAKRRGFKSNRKVEEESEKEGGRVSKALKTNEKFLAENGYKTVGEALSHDENFASHKRNKRDDYTNSFSRSDFLHELEKIIEVQKRYALKNVSDTAINEMLYGSDNDKNVVNISAIMYQRPFMTEELIEKMVGNCTFEENEKRAPRAGYSFEIFRLASDLSHLVFIPRDASKRQAKRENLEIRLSSDQINRVIEAAKNQKSLTYKKVRSIAGISEDYVPKYTHGKKKDGDEFGEGNVFGGLKAYSDIKAALKNLPEDWAKIDNESTINQIAYILTTQKSDEGIKAELNALPISDDAKNAIIKIKATNFRSFCHLSIKALQKITPHILNGMTYDKACEAAGYDFKKQSASLEQITNPVVKRAISQTLKVVRAIEHKYGKPYFIKVETARDLAKNFKERNAIKKENEENQGYNEDIKSIIADGYEASPKTKGGKQLLSHLKELNVPLNKNADFNGQQIIKVKLYREQNGICPYSGKPIDFDTMLQDDNAYQIDHIVPFSRSNNDGITNKVLVLTEENQKKSNKTPFEYFGADENRWKEFVARVESIYKTRDIKTDDKATNAINYKYNGYAMKKKQNLLLQDYKNDIWNVRALNDTRYITRFIQNYLRQNVDFAGDEVRQYVIAPNGTTTAYLRKRWGLAKDRSEDVLHHAKDAAVVAAIDQKIIMQANLHAKRHEIKELLAAVKTMEEKTDKLTGEIIDEDEFNKAQRRKNAMLVLSSKHFPQPWDDFGKEVMKRTLNVDIKTLQNELRGLDNYDEEFRLSVKPIFVSRMPRRKATGSAHKETIRSPKVKDGDQRTIRMPLKKVKRKDVENSTLKESDKWLYKKLLERLDACDDNPEKAFAEPIYKNDKKTDKNGNKLSSVSTIKVYSTQPSGFYINDNKAFVNNGSMMRLDVYQKPNKKGKIKHFFVPVYTHQVGKNKPTPTKILPAPKGFTDVDETFTKVCSLYPNDYVRCYFENSIEEGYYAAYDIDSGRITVINASSPSKEGTNRRRISARSANLIERYDISILGDNYRWL

SEQ ID NO: 16341 - protein, 1171 aa, unidentified
  REGION 1..1171: note = Cas Enzyme sequence
MTQKYSYSPKKYSLGLDIGTSSIGWAVLDLDKERIHDLGVRIFERPEDPQNGDSLAKPRRDARSARRRLKRRRQRLNNLKQFFIDQNILTRDRIEEVLSDKSEFNKLDVYALRSKALTEELSPEELLKVMYQIAKRRGFKSNRKVEEESEKEGGRVSKALKTNEKFLAENGYKTVGEALSRDENFASHKRNKRDDYTNSFSRSDFLHELEEIIEVQKRYVLKNVSDTAINEMLYGLDDDKNVVNVSAIMYQRPFMTEELIKKMVGNCTFEENEKRAPRASYSFEIFRLASDLSHLVFIPRDASKRQAKRENLEIRLSSEQINKVIEAAKNQKSLTYKKVRSIAGISEDYVPKYTHGKKKDGDEFGEGNTFGGLKAYHDIKTALKNLPEDWAKIDNESMINQIAYILTTQKSDEGIKAKLNALPISDDAKNAIIKIKATNFGSFCHLSIKALQKITPHILNGMTYDKACEAAGYDFKKQSASLEQITNPVVKRAISQTLKVVRAIEHKYGKPYFIKVETARDLAKNFKERNAIKKENEENQGYNEDIKSIIADGYEASPKTKGGKQLLSHLKELSVPLNKNADFNGQQIIKVKLYREQNGICPYSGKPIDFDTMLQDDNAYQIDHIVPFSRSNNDGITNKVLVLTEENQKKSNKTPFEYFGADENRWKEFVARVESIYKTRDIKTDDKATNAINYKYNGYAMKKKQNLLLQDYKNDSWNVRALNDTRYITRFIQNYLRQNVDFAEGEEKQRVIAPSGTTTAYLRKRWGLAKDRSEDVLHHAKDAAVVAAIGPKIIYQANLFSKEQEMKLYLNNAKTIDEKQQILLQSTDENTGEITDEATFTQTQKDLAQAEYFKLRSDKETKNRFPDPWTDFSKEIRKRSLNTDIATLQNELRGLDNYDEDFRLSVKPIFVSREIRHRIRGEAHESKLRSNRNRNGQNLIRVPLTELTLQRLENSLAKEEFDSQKNKNGSSLYEKLLARLNECNGDAKKAFNPPFKLYKGPKQDKNGNPISPVTAVKVYDKRGVVSVGRKANAPVALAEMVRIRAYKKDDQIYMIPDYRINILENKEPMELLKPFNGVSKIDNSFNFIGYLYKGDLITIQKDDQTFVGYFVQFEGDNRITIKSHLAADSSRNSKSTVKRESLSGISYLKIHKVDVLGDVHFSKGVVWPGAS

SEQ ID NO: 16342 - protein, 1145 aa, unidentified
  REGION 1..1145: note = Cas Enzyme sequence
MTQKYSYSPKKYSLGLDIGTSSIGWAVLDLDKERIHDLGVRIFERPEDPQNGDSLAKPRRDARSARRRLKRRRQRLNNLKQFFIDQNILTRDRIEEVLSDKSEFNKLDVYALRSKALTEELSPEELLKVMYQIAKRRGFKSNRKVEEESEKEGGRVSKALKTNEKFLAENEYKTVGEALSRDENFASHKRNKRDDYTNSFSRGDFLHELEKIIEVQKRYALKNVSDTAINEMLYGLDDDKNVVNISAIMYQRPFMTEELIKKMVGNCTFEENEKRAPRASYSFEIFRLASDLSHLVFIPRDASKRQAKRENLEIRLSSEQINKVIEAAKNQKSLTYKKVRSIAGISEDYVPKYTHGKKKDGDEFGEGNAFGGLKAYHDIKTALKNLPEDWVKIDNESMINQIAYILTTQKSDEGIKAELNALPISDDAKNAIVKIKATNFGSFCHLSIKALQKITPHILNGMTYDKACEAAGYDFKKQSASLEQITNPVVKRAISQTLKVVRAIEHKYGKPYFIKVETARDLAKNFKERNAIKKENEENQGYNEDIKSIIADGYEASPKTKGGKQLLSHLKELNVPLNKNADFNGQQIIKVKLYREQNGICPYSGKPIDFDTMLQDDNAYQIDHIVPFSRSNNDGITNKVLVLTEENQKKSNKTPFEYFGADENRWKEFVARVESIYKTRDIKTDDKATNAINYKYNGYAMKKKQNLLLQDYKNDSWNVRALNDTRYITRFIQNYLRQNVDFAGDEGKQHVIAPTGTTTAYLRKRWGLAKDRSEDVLHHAKDAAVVAAIDQKIIMQANLHAKRHEIKELLAAAKTMEEKTDRLTGEIIDEDEFNKAQRRKNAMLVLSSKHFPQPWDGFGKEVMKRTLNVDIKTLQNELRGLDNYDEEFRLSVKPIFVSRMPRRKATGSAHKETIRSPKVKDGDQRTVRVPLKKVKRKDVENSTLKESDKWLYKKLLERLDAYGDNPEKAFAEPIYKNDKKTDKNGNKLSPVSTIKVYSTQPSGFYINDDRAFVNNGSMVRLDVYQKPDKKGKIEHFFVPVYAHQVGKNKPTPTKILPAPKGFTDVDETFTKVCSLYPNDYVRCYFGDRIKEGYYVKYGSASGQMILLSHASASKDNDTYLTCSARSATLIERYDIAVLGDNYRWL

SEQ ID NO: 16343 - protein, 1145 aa, unidentified
  REGION 1..1145: note = Cas Enzyme sequence
MTQKYSYSPKKYSLGLDIGTSSIGWAVLDLDKERIHDLGVRIFEKPEDPQNGDSLAKPRRDARSARRRLKRRRQRLNNLKQFFIDQNILTRDRIEEVLSDKSEFNKLDVYALRSKALAEELSPEELFKVMYQIAKRRGFKSNRKVEEESEKEGGRVSKALKTNEKFLAENGYKTVGEALSHDENFASHKRNKRDDYTNSFSRSDFLHELEKIIEVQKRYALKNVSDTAINEMLYGSDNDKNVVNISAIMYQRPFMTEELIEKMVGNCTFEENEKRAPRAGYSFEIFRLASDLSHLVFIPRDASKRQAKRENLEIRLSSDQINRVIEAAKNQKSLTYKKVRSIAGISEDYVPKYTHGKKKDGDEFGEGNVFGGLKAYSDIKAALKNLPEDWAKIDNESTINQIAYILTTQKSDEGIKAELNALPISDDAKNAIIKIKATNFRSFCHLSIKALQKITPHILNGMTYDKACEAAGYDFKKQSASLEQITNPVVKRAISQTLKVVRAIEHKYGKPYFIKVETARDLAKNFKERNAIKKENEENQGYNEDIKSIIADGYEASPKTKGGKQLLSHLKELNVPLNKNADFNGQQIIKVKLYREQNGICPYSGKPIDFDTMLQDDNAYQIDHIVPFSRSNNDGITNKVLVLTEENQKKSNKTPFEYFGADENRWKEFVARVESIYKTRDIKTDDKATNAINYKYNGYAMKKKQNLLLQDYKNDIWNVRALNDTRYITRFIQNYLRQNVDFAGDEVRQYVIAPNGTTTAYLRKRWGLAKDRSEDVLHHAKDAAVVAAIDQKIIMQANLHAKRHEIKELLAAVKTMEEKTDKLTGEIIDEDEFNKAQRRKNAMLVLSSKHFPQPWDDFGKEVMKRTLNVDIKTLQNELRGLDNYDEEFRLSVKPIFVSRMPRRKATGSAHKETIRSPKVKDGDQRTIRMPLKKVKRKDVENSTLKESDKWLYKKLLERLDACDDNPEKAFAEPIYKNDKKTDKNGNKLSSVSTIKVYSTQPSGFYINDNKAFVNNGSMMRLDVYQKPNKKGKIKHFFVPVYTHQVGKNKPTPTKILPAPKGFTDVDETFTKVCSLYPNDYVRCYFENSIEEGYYAAYDIDSGRITVINASSPSKEGANRRRISARSANLIERYDISILGDNYRWL

SEQ ID NO: 16344 - protein, 1158 aa, unidentified
  REGION 1..1158: note = Cas Enzyme sequence
MKYWSKALIRSLVGRIIFFMSKVFTLSNILFWLYNCIKLSQKRTIMTQKYSYSLGLDIGTSSIGWAVLDLDKERIHDLGVRIFERPEVPKTGKSLAEPRRIDRSNRHRLRRRRQRLNYLKRFFIDNNLISESRIGDMLSPTHPKKWRPIYDPYALRIKGLNERLSPEELFVALYHIAKRRGYKSNRISVEEQDIEGSQVLSAISENKLLLEKYKTKSVAKVLTLDEKFKNNKRNKINTYKNSFVRKNFEDEVMLLLDSQKKFGLKLPYEKIQTLLYGDIKNGNYNGIFSQRPFMTSELIKKMRGYCEFEPEKPRAPKASYSFELFRLAQNLSHLRIVVDRETRQLSEDEIAKIIEKAKNVKVLKYEHIRDILGYKDDQSFSFAQGMIRGKIKNDDKKNGESNKFDSMIFYHTVKKALEQHPKDWDILATNNFELLDTAGLMLTVNKDDSSLRTELSKLNISTYAVEALLPINVSGFVHLSFDSLHRITPWLLRGLNYSEAVEKAGYSFSQSLSGNKKKLPPLSEKQAAQITNPVVKRAVSQTIKVVNAIIRKYGMPYSVKIETASELAKNAQERNKIKNIQDENAEYNEKIKQKLITEFNIPTPTGLQITKFKLREQQNGVSLYSGKEINLENLFADEHYGEIDHIIPFSRCGNDGLNNKVLVFADENQEKGNLTPYEAWGGDDKKWTQFEARVRATAGLPTAKRDRLLSKSKPVEDWNVRALNDTRYISRFLRQYIRDNLDFPKIEGETGAQRVFSPSGSITSYLRRVWHVGNKNRDDNNLHHAADACIIAATSPSIIQKISSLNKYYELFKYTDKNEIVDKLTGEVLDRNQFEQHIADLEPWNDFGKEVRKRSKPYNTPSELHNELTGLKNYDEEFRLSTLPIFVSRMPKRSGKGSANDATFRSPKIVAGYIDEKGKPAIARKHRVSLHSVDLKKLYDSPIRETDPKLYKILEQRLKDFNGDPKKAFAESVYKPTKDGKRGNIVRSIKIYNTRDSRSGFLVNKQRAFVNNGKTIRLDVYKRKNYKDIYEYYFTPVYTHLINTQRIEVLPTPTGRSKNEKADFDTIRTEGNKIYATLENGFIKQFSIYPNDYVRIYFDNEIVEGYYVKYNTNDSSLKLIKHSDTSKNDSDLISKVAKTATLIERYDIAVLGDNYRWL

SEQ ID NO: 16345 - protein, 1143 aa, unidentified
  REGION 1..1143: note = Cas Enzyme sequence
MTQKYSYSPKKYSLGLDIGTSSIGWAVLDLDKERIHDLGVRIFEKPEDPQNGDSLAKPRRDARSARRRLKRRRQRLNNLKQFFIDQNILTRDRIEEVLSDKSEFNKLDVYALRSKALTEELSPEELLKVMYQIAKRRGFKSNRKVEEESEKEGGRVSKALKTNEKFLAENGYKTVGEALSRDENFASHKRNKRDDYTNSFSRGDFLHELEKIIEVQKRYALKNVSDTAINEMLYGLDDDKNVVNISAIMYQRPFMTEELIKKMVGNCTFEENEKRTPRASYSFEIFRLASDLSHLVFIPRDASKRQAKRENLEIRLSSDQINKVIEAAKNQKSLTYKKVRSIAGISEDYVPKYTHGKKKDGDEFGEGNVFGGLKAYSDIKAALKNLPEDWAKIDNESTINQIAYILTTQKSDEGIKAELNALPISDDAKNAIIKIKATNFGSFCHLSIKALQKITPHILNDMTYDKACEAAGYDFKKQSASLEQITNPVVKRAISQTLKVVRAIERKYGKPYFIKVETARDLAKNFKERNAIKKENEENQGYNEDIKSIIADGYEASPKTKGGKQLLSHLKELNVPLNKNADFNGQQIIKVKLYREQNGICPYSGKPIDFDTMLQDDNAYQIDHIVPFSRSNNDGITNKVLVLTEENQKKSNKTPFEYFGADENRWKEFVARVESIYKTRDIKTDDKATNAINYKYNGYAMKKKQNLLLQDYKNDSWNVRALNDTRYITRFIQNYLHQNVDFAGDKGKQHVIAPNGTTTAYLRKRWGLAKDRSEDVLHHAKDAAVVAAIDQKIIMQANLHAKRHEIKELLAAAKTMEEKTDKLTGEIIDEDEFNKAQRRKNAMLVLSSKYFPQPWDGFGKEVMKRTLNVDIKTLQNELRGLDNYDEEFRLSVKPIFVSRMPRRKATGSAHKETIRSPKVKDGDQRTVRMPLKKVKHKDVENSTLKESDKWLYKKLLERLDACDDNPEKAFAEPIYKNDKKTDKNGNKLSPVSTIKVYSTKPDDSGKYINNQRSFVDNDSMVRVDVYMKNIDGREYPFFVPIYTHSVKHSTRKIRPTLKGLSEIDETFKYICGLYPNDYIKIKFENESKNVEGYYIQYGSSNAAIDLLPMHASGKDQRITCSARLAIKIERYDISILGDNYRWL

SEQ ID NO: 16346 - protein, 1190 aa, unidentified
  REGION 1..1190: note = Cas Enzyme sequence
MKYWSKALIRSLVGRIIFFMSKVFTLSNILFWLYNCIKLSQKRTIMTQKYSYSPKKYSLGLDIGTSSIGWAVLDLDKERIHDLGVRIFEKPEHPKSGESLAKPRRDARSARRRLKRRRQRLNNLKQFFIDQNILTRDQIEEVLSDKSEFNKLDVYALRSKALTEELSPEELLKVMYQIAKRRGFKSNRKVEEESEKEGGRVSKALKTNEKFLAENGYKTVGEALSRDENFASHKRNKRDDYTNSFSRSDFLHELEKIIEVQKRYALKNASDTAIDEMLYGLDDDKNVVNVSAIMYQRPFMTEELIKKMVRNCTFEENEKRAPRASYSFEIFRLASDLSHLVFIPRDASKRQAKRENLEIRLSSDQINKVIEAAKNQKSLTYKKVRSIAGISEDYVPKYTHGKKKDGDEFGEGNVFGGLKAYSDIKAALKNLPEDWAKIDNESTINQIAYILTTQKSDEGIKAELNALPISDDARNAIVKIKATNFGSFCHLSIKALQKITPHILNSMTYDKACEAAGYDFKKQSASLEQITNPVVKRAISQTLKVVRAIERKYGKPHFIKVETARDLAKNFKERNAIKKENEENQGYNEDIKSIIADGYEASPKTKGGKQLLSHLKELNVPLNKNADFNGQQIIKVKLYREQNGICPYSGKPIDFDTMLQDDNAYQIDHIVPFSRSNNDGITNKVLVLTEENQKKSNKTPFEYFGADENRWKEFVARVESIYKTRDIKTDDKATNAINYKYNGYAMKKKQNLLLQDYKNDIWNVRALNDTRYITRFIQNYLRQNVDFAGDEVRQYVIAPNGTTTAYLRKRWGLAKDRSEDVLHHAKDAAVVAAIDQKIIMQANLHAKRHEIKELLAAVKTMEEKTDKLTGEIIDEDEFNKAQRRKNAMLVLSSKHFPQPWDDFGKEVMKRTLNVDIKTLQNELRGLDNYDEEFRLSVKPIFVSRMPRRKATGSAHKETIRSPKVKDGDQRTVRMPLKKVKRKDVENSTLKESDKWLYKKLLERLDACDDNPEKAFAEPIYKNDKKADKNGNKLSPVSTIKVYSTQPSGFYINDDKAFVNNGSMVRLDVYQKPDKKGKIKHFFVPVYAHQVGKNKPAPTKILPSPKGFTDVDETFTKVCSLYPNDYVRCYFGNNIEEGYYTAYDIDSGRITVINASSPSKEGTNRRRISPRSANLIERYDISILGDNYRWL

SEQ ID NO: 16347 - protein, 1145 aa, unidentified
  REGION 1..1145: note = Cas Enzyme sequence
MTQKYSYSPKKYSLGLDIGTSSIGWAVLDLDKERIHDLGVRIFERPEDPQNRDSLAKPRRDARSARRRLKRRRQRLNNLKQFFIDQNILTRDRIEEVLSDKSEFNKLDVYALRSKALTEELSPEELLKVMYQIAKRRGFKSNRKVEEESEKEGGRVSKALKTNEKFLAENEYKTVGEALSRDENFASHKRNKRDDYTNSFSRGDFLHELEKIIEVQKRYALKNVSDTAINEMLYGLDDDKNVVNISAIMYQRPFMTKELIEKMVGNCTFEENEKRAPRASYSFEIFRLASDLSHLVFIPRDASKRQAKRENLEIRLSSEQINKVIEAAKNQKSLTYKKVRSIAGISEDYVPKYTHGKKKDGDEFGEGNTFGGLKAYSDIKTALKNLPEDWAKIDNESTINQIAYILTTQKSDEGIKAELNALPISDDAKNAIIKIKATNFGSFCHLSIKALQKITPHILNGMTYDKACEAAGYDFKKQSASLEQITNPVVKRAISQTLKVVRAIERKYGKPYFIKVETARDLAKNFKERNAIKKENEENQGYNEDIKSIIADGYEASPKTKGGKQLLSHLKELSVPLNKNADFNGQQIIKVKLYREQNGICPYSGKPIDFDTMLQDDNAYQIDHIVPFSRSNNDGITNKVLVLTEENQKKSNKTPFEYFGADENRWKEFVARVESIYKTRDIKTDDKATNAINYKYNGYAMKKKQNLLLQDYKNDSWNVRALNDTRYITRFIQNYLRQNVDFAEGEEKQRVITPSGTTTAYLRKRWGLAKDRSEDVLHHAKDAAVVAAIGQKIIMQANLHAKRHEIKELLAAAKTMEEKTDRLTGEIIDEDEFNKAQRRKNAMLVLSSKHFPQPWDGFGKEVMKRTLNVDIKTLQNELRGLDNYDEEFRLSVKPIFVSRMPRRKATGSAHKETIRSPKVKDGDQRTVRVPLKKVKRKDVENSTLKESDKWLYKKLLERLDACDDNPEKAFAEPIYKNDKKTDKNGNNLSPVSTIKVYSTQPSGFYINDDKAFVNNGSMVRLDVYQKPDKKGKIEHFFVPVYAHQVGKNKPTPTKILPAPKGFTDVDETFTKICSLYPNDYVRCYFGDKIKEGYYVKYGSASGQMILLSHASASKDNDTYLTCSARSATLIERYDISILGDNYRWL

SEQ ID NO: 16348 - protein, 1145 aa, unidentified
  REGION 1..1145: note = Cas Enzyme sequence
MTQKYSYSPKKYSLGLDIGTSSIGWAVLDLDKERIHDLGVRIFERPEDPQNGDSLAKPRRDARSARRRLKRRRQRLNNLKQFFIDQNILTRDRIEEVLSDKSEFNKLDVYALRSKALTKELSPEELLKVMYQIAKRRGFKSNRKVEEESEKEGGRVSKALKTNEKFLAENGYKTVGEALSHDENFASHKRNKRDDYTNSFSRSDFLHELEKIIEVQKRYALKNVSDTAINEMLYGSDNDKNVVNISAIMYQRPFMTEELIEKMVGNCTFEENEKRAPRAGYSFEIFRLASDLSHLVFIPRDASKRQAKRENLEIRLSSDQINRVIEAAKNQKSLTYKKVRSIAGISEDYVPKYTHGKKKDGDEFGEGNVFGGLKAYSDIKAALKNLPEDWAKIDNESTINQIAYILTTQKSDEGIKAELNALPISDDAKNAIIKIKATNFRSFCHLSIKALQKITPHILNGMTYDKACEAAGYDFKKQSASLEQITNPVVKRAISQTLKVVRAIEHKYGKPYFIKVETARDLAKNFKERNAIKKENEENQGYNEDIKSIIADGYEASPKTKGGKQLLSHLKELNVPLNKNADFNGQQIIKVKLYREQNGICPYSGKPIDFDTMLQDDNAYQIDHIVPFSRSNNDGITNKVLVLTEENQKKSNKTPFEYFGADENRWKEFVARVESIYKTRDIKTDDKATNAINYKYNGYAMKKKQNLLLQDYKNDIWNVRALNDTRYITRFIQNYLRQNVDFAGDEVRQYVIAPNGTTTAYLRKRWGLAKDRSEDVLHHAKDAAVVAAIDQKIIMQANLHAKRHEIKELLAAVKTMEEKTDKLTGEIIDEDEFNKAQRRKNAMLVLSSKHFPQPWDDFGKEVMKRTLNVDIKTLQNELRGLDNYDEEFRLSVKPIFVSRMPRRKATGSAHKETIRSPKVKDGDQRTIRMPLKKVKRKDVENSTLKESDKWLYKKLLERLDACDDNPEKAFAEPIYKNDKKTDKNGNKLSSVSTIKVYSTQPSGFYINDNKAFVNNGSMMRLDVYQKPNKKGKIKHFFVPVYTHQVGKNKPTPTKILPAPKGFTDVDETFTKVCSLYPNDYVRCYFENSIEEGYYAAYDIDSGRITVINASSPSKEGTNRRRISARSANLIERYDISILGDNYRWL

SEQ ID NO: 16349 - protein, 1145 aa, unidentified
  REGION 1..1145: note = Cas Enzyme sequence
MTQKYSYSPKKYSLGIDIGTSSIGWAVLDLDKERIHDLGVRIFERPEDPQNGDSLAKPRRDARSARRRLKRRRQRLNNLKQFFIDQNILTRDRIEEVLSGKSEFNKLDVYALRSKALTEELSPEELLKVMYQIAKRRGFKSNRKVEEESEKEGGRVSKALKTNEKFLAENGYKTVGEALSRDENFASHKRNKRDDYTNSFSRGDFLHELEKIIEVQKRYALKNVSDTAINEMLYGLDDDKNVVNVSAIMYQRPFMTEELIKKMVGNCTFEENEKRAPRASYSFEIFRLASDLSHLVFIPRDASKRQAKRENLEIRLSSEQINKVIEAAKNQKSLTYKKVRSIAGISEDYVPKYTHGKKKDGDEFGEGNAFGGLKAYHDIKTALKSLPEDWAKIDNESTINQIAYILTTQKSDEGIKAELNALPISDDAKNAIIKIKATNFGSFCHLSIKALQKITPHILNGMTYDKACEAAGYDFKKQSASLEQITNPVVKRAISQTLKVVRAIEHKYGKPYFIKVETARDLAKNFKERNAIKKENEENQGYNEDIKSIIADGYEASPKTKGGKQLLSHLKELNVPLNKNADFNGQQIIKVKLYREQNGICPYSGKPIDFDTMLQDDNAYQIDHIVPFSRSNNDGITNKVLVLTEENQKKSNKTPFEYFGADENRWKEFVARVESIYKTRDIKTDDKATNAINYKYNGYAMKKKQNLLLQDYKNDSWNVRALNDTRYITRFIQNYLRQNVDFAEGEERQRVIAPSGTTTAYLRKRWGLAKDRSEDVLHHAKDAAVVAAIDQKIIMQANLHAKRHEIKELLAAAKTMEEKTDKLTGEIIDEDEFNKAQRRKNAMLVLSSKHFPQPWDSFGKEVMKRTLNVDIKTLQNELRGLDNYDEEFRLGVKPIFVSRMPRRKATGSAHKETIRSPKVKDGDQRTVRMPLKKVKHKDVENSTLKESDKWLYKKLLERLDACDDNPEKAFAEPVYKNDKKTDKNGNKLSPVSTIKVYSTQPSGFYINDDKAFVNNGSMVRLDVYQKPNKKGKIEHFFVPVYAHQVGKNKPTPTKILPSPKGFTDVDETFTKVCSLYPNDYVRCYFGDKIKEGYYVKYGSASGQMILLSHASASKDNDTYLTCSARSATLIERYDISILGDNYRWL

SEQ ID NO: 16350 - protein, 1118 aa, unidentified
  REGION 1..1118: note = Cas Enzyme sequence
MSVFSYDLGKESIGYCVRNGYTVQEMGIDLVDSSHASITERGLSGRRRAIRTRLAHKMRETWFRWFWTEKLGLADLPVEDDRWHKEFSRDGILYNGASIRVAMLQGLTNQDETKTPLEDWQLFKGVWSLIQRRGYGAGVAWGEKEAKEGDDQKLVEDYKKKLTDSQLVETFHLPAYLETFRLGVWHPISPNTIECTQGASPLKVRNDKSSAPREMVVAELKALVLALKDLRTNNIAVQELTYETLAYGDAQTPYASYYACKPNPPLAIKPFKKLRGSFKHYKTRINGDWFPLEWEGVLSQKTPRFDNRILSKCVLLPRYSVARNKIQEGKNWYDVPIHQAKALMFLKNIRFMQEVIGDEQQKHFHTRKLTADELKTTWETFLEKPAQSISATWLNAHLPKITGAYYFDNKDARDRQYQVFKPDTDSGRSRFSRPAATLLRDCLLSGLSPQTYVDDLLDKGYYPTEQGEFKPLQPDTAEGKRRGLTPQDLHAFAKRLGGESWDNIHIADNRDDFDGWNQAKREAYIEKVLIGTCMNNVVRNRLQLFYGVFKNQVASFGTPEYVVLEFVRGDMSITQSKKKKDDYNAFLKANTEKNNRLRDELKKAGICNGQGQVAGKDILRLQLLEEQGRHCLYTGRPLSIEDVRSGGADIEHSVPFSRSGTGNRVNLTLADAHANKEKGNKTPYEYMMSKGQEAFNAFAARVMACDYLPKKKKELLLSPDAESLVSSYNGLADTAHISRLVQQVVAMYCGKGLQVKDQDRFVYVMNGQETSQIGRHLDLYKYLLDDPESIGELEPEDRVKKLRDNRKHHALDAYIISWYREYTRRKTWVKDENTTEVQKWCFDPAEVSEGKVREVGREALEQVIPKYIKRNKIDLDPKATFYGIRHIAEKNVYFAVERTNFQELMLKALDTKKREKVLNDLMDKAITNALMPFVNDTKAEWDARIKAFKHPRFKNTPNKVTVRYSSESKAEDITIYPNGRIQMGKYYNMAKAVDINEPFKNVQLKCTKENIGQILYYNQKEKVSVQPIYPYIGLKQTMKQLKEKGYKLYKNGMVFNSGCLIHLSEQLVYNNIVYEGTLELGSLKSNGQTVIKKPGHKESSPAINIKYLIDCGLQVVET

SEQ ID NO: 16351 - protein, 1130 aa, unidentified
  REGION 1..1130: note = Cas Enzyme sequence
MKYSIGLDIGITSCGWSVINLDKKRIEDLGVRIFNAAEDPQKHTSLALPRREKRSSRRRFHRRRARLNYLKQFFIELNLLDKSEITQLLTPHKGQLNPYILREKALEEKLSTDELLIALYHIAKRRGYKSNRRAESSSDENENKKTLHAISENQKLLIDYQTVAKALNQNEKFAAHKRNKPNDYSNSFARADFESEITTILNKQAEFYPELTEEKINDLLYRQNYGLFFQRPFMSPELIAKMRGNCQFEKDTPRAQKASVSFEIFRLASDLAHLTYNNGQKLTSEEITTCIEKAKEVVTFKYSHIDKILNQTHPEEIIFDYIRGLKKKDLNSDTDEAKKKALNQKFSELKFYHAIKKALANLPEEWQKLEKNLKLFNEIGFILTANKEDESVIKHLEELDLSKQAIENIASIKQNFTGFCHLSILALDKITPYVLEGNTYDKAVVLAGYNFNDKLSGDQNRLPALTEEESQQITNPVTKRAVSQTIKVVNAIIHKYGAPTRLHIECASELAKSYDKRRQIEDNQKDNQATNQKIVDILKNEYHIVTPNYLQITKYKLYLEQDGKCLYSNQPIDLDRLFTDEHYCEIDHIIPKSRCGNDSLINKALVFNRENQEKRNQTPFEAWGGDTERWQQFKTNVQSNLKIHPRKKLRLLAEVPPKEDWNSRALNDTRYITRFLSNYFKQHLKFSEDSHSKKKVFTPTGGITSYLRRIWHVGSKDRSGNLHHAVDATIIALVTEDIIKQCALMNKYIELGANYATKGINLSKFHHDIHSVIDPVTGEIIDLAGYEKIKEEVLPWPNFDTELRFRATPLAIFVNELPKNKKEPKPELAESAKLQQKNKSINTLAEWRDQFREIYNDQDELFKNSIHPIFVSRMPKRKGTGSLHQDTVRSPKGIIVDPKTQKITTNPNRSSYIRANLENIKLADLENSIIKTDDKSLYQQLKQLLEENDNDPKKAFKEPVYKNNIKVDKNGKPLSPVRTIKLIDDKNVKSGILLSRGTQFVNNGSMVRVDIYQKEVKGKNQLFYVPIYTHQVKKGSTRILPTTCGYDYVDETFKKLFSLYPNDYIIMKKDNNTIQGYYIKYNTSNSVITHISNLMPGSTNFKETTGRSLTEIYRLDISILGDNYPWEKLY

SEQ ID NO: 16352 - protein, 1011 aa, unidentified
  REGION 1..1011: note = Cas Enzyme sequence
VGWSIVETESLTSVKPKRLYDAGVRIFHTAEVPKNGESLNVQRRAARSLRRRLRRKKQRQKALLRILCAQFSVQRVDILHITKPDPWSLRVKGLDYLLSDLEFSRAIYHIIKHRGFKSNRKDSVKDKKSEDGRMLSAVAANENADGDYRSFAERIVTESKRIDSPHYGRKRNTTDIYVNTPSRKSIEDELSLFCKLQKSYGNEKITEQFTSELLSILRTQNAFGTRDGILEKVGFCTLSIEEKRAPKHSIAFQEFQTWQALNNTRLLDTTANSERVLTQEEKNTLFSELEDKMTFIKARKVLSIPASTLFKGLRYSKNSIQEKQENPESKTFIQKKMYSNLKDAISSIDAHYWEQLSDNQELLEKVILELTLCTTNTELETYLAKLDIPTNVVKALTLIPSPSGFAHLSLKALRKLLPFLKSGDSYFDACIKSNFKESNEKKDVALPVVDDVMDIRNPVVLRAVTQCRKVLRALYGKYGAPLRIHLEMSRDLSRSHEERKRIEKEQENNGELKAREIKFLSEELGIENPSGTTRLKYRLWKEQGDICAYSGKQITKEMLFDDNQTQIDHALPFSRTLDDTYLNKVLVLTAENQKKRDKTPYEYLGGKQDSEQWQFFVKRVESWVMPEKKKLVLLRQNVPHSLKTSGDTLHFRERDMNDTRYISRLMREYLEMYMPFAGKERRRIIIFSGPITSYFRNHWGLSKDRSNHRHHAVDAVVLACIDSYMLEQVVSWAKNREMNNLYRLDFPTPWISFNQDVRYRLLEDRLADFWERPELAKHYSDVKEIDVIRPLFVSHAPSRNIGGRIHEDTFYSTRLLTEGKLSIKKRITDEKLLQLKNGLLSKQTKQIQTESANSYLLLKRSNAFVAAKNPPGSMIRIDVFFKEDKYYVIPVYRSDAYSNKLPMEIINTNKPKKLWTTIDSSYNFSLSVYPGDYLELINKNGEVISGYFVKAHSKSAAITLVNSTGENIQSGIGIQKMKSIKKYDIDPIGRKSLIKKEKRLQLNMRTNKSKK

SEQ ID NO: 16353 - protein, 973 aa, unidentified
  REGION 1..973: note = Cas Enzyme sequence
LNVQRRAARSLRRRLRRKKQRQKALLRILCAQFSVQRVDILHITKPDPWSLRVKGLDYLLSDLEFSRAIYHIIKHRGFKSNRKDSVKDKKSEDGRMLSAVAANENADGDYRSFAERIVTESKRIDSPHYGRKRNTTDIYVNTPSRKSIEDELSLFCKLQKSYGNEKITEQFTSELLSILRTQNAFGTRDGILEKVGFCTLSIEEKRAPKHSIAFQEFQTWQALNNTRLLDTTANSERVLTQEEKNTLFSELEDKMTFIKARKVLSIPASTLFKGLRYSKNSIQEKQENPESKTFIQKKMYSNLKDAISSIDAHYWEQLSDNQELLEKVILELTLCTTNTELETYLAKLDIPTNVVKALTLIPSPSGFAHLSLKALRKLLPFLKSGDSYFDACIKSNFKESNEKKDVALPVVDDVMDIRNPVVLRAVTQCRKVLRALYGKYGAPLRIHLEMSRDLSRSHEERKRIEKEQENNGELKAREIKFLSEELGIENPSGTTRLKYRLWKEQGDICAYSGKQITKEMLFDDNQTQIDHALPFSRTLDDTYLNKVLVLTAENQKKRDKTPYEYLGGKQDSEQWQFFVKRVESWVMPEKKKLVLLRQNVPHSLKTSGDTLHFRERDMNDTRYISRLMREYLEMYMPFAGKERRRIIIFSGPITSYFRNHWGLSKDRSNHRHHAVDAVVLACIDSYMLEQVVSWAKNREMNNLYRLDFPTPWISFNQDVRYRLLEDRLADFWERPELAKHYSDVKEIDVIRPLFVSHAPSRNIGGRIHEDTFYSTRLLTEGKLSIKKRITDEKLLQLKNGLLSKQTKQIQTESANSYLLLKRSNAFVAAKNPPGSMIRIDVFFKEDKYYVIPVYRSDAYSNKLPMEIINTNKPKKLWTTIDSSYNFSLSVYPGDYLELINKNGEVISGYFVKAHSKSAAITLVNSTGENIQSGIGIQKMKSIKKYDIDPIGRKSLIKKEKRLQLNMRTNKSKK

SEQ ID NO: 16354 - protein, 1382 aa, unidentified
  REGION 1..1382: note = Cas Enzyme sequence
MSNSGTIWAFDLGKGSIGEAVRKGNEFLHKASLLIPAEFAETKTAASRRRMWRTRQAHKAREKWLNDVMREAGIEILKGRQIGKVDAEGKEIPEDQWKRTKGEWVEIAKGNPWLEREFPAPGDSTCYTSCLLRIKLLRGEKLEPWQVYKALHSAIQRRGHDPDIPWKHREQRKRKSNEPDDDEAGTQQRMEQFEKDLEAMAPGKPEYHYPCYFDAWRMGLWNPGRPNELKERTDCRAKSRREQIVPRKIVEEEIRKLVEAASKHYPKLNGQARYLLYGPAETAYASFDAKLRTKYGLKEGGASDWEGVLGQKIPRFENRILNDCALIPRLHVCRNPSPEQYKDLPEDKLLPAHVTFLMKLKNMRVEEKTPGRKQRGLTAEQIKEIFGECNPRRKYNLTSTQWRKWCDKFDVLPITDAGEKTTSADDETGKKEKKDERDAVAAPLPSGRSRFSRPALRILKALILSGIKPSLLHERLVKRDPALVAEIGIDILDAPPVNEKKTDSGKRTIRNYVKQPRPWLLVSDLSFLLAMRKTGAQEDSWEDLFIPNQRLDQVVQEISGDGNRDTKVERQRKGKAIQELIGSQNDPKVRHRLATFWDRLKLLETLPDKNGKPIGEPGQIVLEFVREDFMGEKAKGKLKKFQDDRAEARKKAREHGGLKFELYEAQGGVCLYGKEVFKNGKCIGLENGLPMPGTPGWDTLVIDHIVPREAPYNGPDAAVNYVLTTPDANNAKRKRTPFDWFHQDRLGEWDCYKNFIASKIGTLGGKKVQLLTRSDAAELVGKYTSLAETAWISKLAQTLVRLHFGWPLEHERGKERVTVVPGGLTGRIRRKYLLNTLLDERFKNLATAEIKPEDEEEAEKDRTDLRHHALDAMMISFFPDWMRNPQKSDFFRFPPPLDKPFPGKRNKHAVREFFKTQLGEVLPENLFLEKAKLAEMAYGRSFQAEEASASATAVKYKTAKMSLSDLAYGNAASGKAAYDLKQARRMANGIADDGTREKVQGFLKSRPTEAGWSEFCRNFETEFACQQKRGKPVKIEVRKVGEIRTRRRKVKEMAYEQGNSREYDVEYARQNVSEIAGDVPEQENIKAKLGEFFAGNPSEKQWKDFAETLKPIGQTRLRSKLEEGGKKAKARTVKFAFFAHRPIPMKFNLEKAQGRIDKICDEGIRQRLRAFVNQNPPPDQSAWKAFCDTFAHERKDEDGNLLKDADGKVVYGAAIKKVRVNDGSPDEYKDFSKDGTGTFYKNKKEHKGQFVYLVDDGTADGVVSVRPVYVFESVQKVKKNVEAFPQFKRLIGYFQSGCTISIIQPVPVDSYKLVILNDEKKKRRIVANAPLVPGKFLSSTIITASQAVEAEMADGTVVVSTLAPLIRAGLHRVYHKSETTRL

SEQ ID NO: 16355 - protein, 1034 aa, unidentified
  REGION 1..1034: note = Cas Enzyme sequence
LLPAHVTFLMKLKNMRVEEKTPGRKQRGLTAEQIKEIFGECNPRRKYNLTSTQWRKWCDKFDVLPITDAGEKTTSADDETGKKEKKDERDAVAAPLPSGRSRFSRPALRILKALILSGIKPSLLHERLVKRDPALVAEIGIDILDAPPVNEKKTDSGKRTIRNYVKQPRPWLLVSDLSFLLAMRKTGAQEDSWEDLFIPNQRLDQVVQEISGDGNRDTKVERQRKGKAIQELIGSQNDPKVRHRLATFWDRLKLLETLPDKNGKPIGEPGQIVLEFVREDFMGEKAKGKLKKFQDDRAEARKKAREHGGLKFELYEAQGGVCLYGKEVFKNGKCIGLENGLPMPGTPGWDTLVIDHIVPREAPYNGPDAAVNYVLTTPDANNAKRKRTPFDWFHQDRLGEWDCYKNFIASKIGTLGGKKVQLLTRSDAAELVGKYTSLAETAWISKLAQTLVRLHFGWPLEHERGKERVTVVPGGLTGRIRRKYLLNTLLDERFKNLATAEIKPEDEEEAEKDRTDLRHHALDAMMISFFPDWMRNPQKSDFFRFPPPLDKPFPGKRNKHAVREFFKTQLGEVLPENLFLEKAKLAEMAYGRSFQAEEASASATAVKYKTAKMSLSDLAYGNAASGKAAYDLKQARRMANGIADDGTREKVQGFLKSRPTEAGWSEFCRNFETEFACQQKRGKPVKIEVRKVGEIRTRRRKVKEMAYEQGNSREYDVEYARQNVSEIAGDVPEQENIKAKLGEFFAGNPSEKQWKDFAETLKPIGQTRLRSKLEEGGKKAKARTVKFAFFAHRPIPMKFNLEKAQGRIDKICDEGIRQRLRAFVNQNPPPDQSAWKAFCDTFAHERKDEDGNLLKDADGKVVYGAAIKKVRVNDGSPDEYKDFSKDGTGTFYKNKKEHKGQFVYLVDDGTADGVVSVRPVYVFESVQKVKKNVEAFPQFKRLIGYFQSGCTISIIQPVPVDSYKLVILNDEKKKRRIVANAPLVPGKFLLSTIITASQAVEAEMADGTVVVSTLAPLIRAGLHRVYHKSETTRL

SEQ ID NO: 16356 - protein, 1108 aa, unidentified
  REGION 1..1108: note = Cas Enzyme sequence
MKYKLGLDLGSTSLGWAAVKLNDAGAVEQLLDFGVRIFPDGRDAKTHAPINVVRRAARTMRRRGDRVKLRKKRVLQLIRKYGLDFDIRSNPILENPYELRVRALEHRLSPSELGRVLFHLALRRGFKSNRKETKGENGGKLKAATDALASAVGDGTLAQFQVQTKKFRFSNQFDGNVIKDGALYPTRDMYLDEFHRICDAQGLDKEMRAAFENAIFFQRPLIPPVVGTCIFAAGQPRAHKFEPVFQRWRALQQLNQLAILDNGQNVALTDQQRQCLVDILLYNFNGVKRDRGGRVKITFAEIKKQLGLSRTVKFNLESEQRKELNVDSTGFSFAEIGELDFWRSLTDEQQSDVLNKINDDQTEDAELIEYLVAHYGLSASRARAIIDIPLEDDVANVSVVAMKKMLPFLEGGQLYHLAVHSAGYHYGEQDVPLMDKLPYYGDLDVLKPSLMPARDGAYRTMNATVHIAMNQIRVVVNDLIERYGRPCAINIELGRDVRAGAKERAELDKQQSANKRKNDAIRAELAEIGILNPSREDFQKYKLWENLAPQPQNRRCVYTGEPITSLAALFKSGRFEIEHILPFAQTLDDSLANKTISAVAANRFKGNRSPAEAFDDPASPWAYADVWARAQNLPDGSRWRFDRDAMEKFTRHGDCIARALNDTRFMSVMAVNYLKHICSDKNKVRGLPGRLTAIFRDMWHLDWWKNHDDADTYRANHIHHAIDAFVIACMGAGNLQKLAENATHLEDFHGKTLKEKHRQLFADMYLPFPEFDYYDFRMRCEACVISYRPSVKEPAASDTVGCLHEDTAYKLEKFETGTRATMSRRIALPTTADARAKFKKDFDSLNPKTLEMFLAETGVANDANDIADQFLNWCQMRGIKKVRMFKTRVDTTTYVPVFRNRGDKNAFNRAWTEWYAAAGIARGMTEPKAKKAQQEKERRLLALYQNAAARAYKWFVSGNNFCADIFEIRSDDRRYPALAGQWQSEIISNYCATLNNGTPMWRCKYATARRVMRLRINDMVMAEFSRDNVPLLKGLEDAVRHQLAVQDTDTVNIIFRVKKISSNGAIFLRPHYIAKEDADTKTWQANATSLQKYKARKIRVSPTGKVLE

SEQ ID NO: 16357 - protein, 1015 aa, unidentified
  REGION 1..1015: note = Cas Enzyme sequence
RIKKLICDTMNVDFKYIQSIYERKNLSDIYEIRYEALNRKLTKDEFIRLLIHLSQRRGFKSNRKIDAKNKNSDDGKMLKEIEKNKSIFTDNGYRTIGEMLFKNEKFIQRKRNKSDYSMTFLRVDYENEIKVIFNQQRKFNNQHATESFENEYLKIYLSQRNFDDGPDESSPYGGNLIGKMVKNCTFEPTLKAAPKASYSFEYSNLLTKVNSMKILYNGNRRPLTKEEREKVVTLAFKKNKITYSSIRTELGLSNEEFFNISYNSKDYTETEKKTKFSYLTAYYEFKKAYGSSYLEWSVEKKNTLATILTLHKNDSKIIEEMKEKNFLEDEINVALTIPSFTKFGNLSIAVLNKMIPYLEDGMLYNEAITALGYNFKDDDKCQQMYLPSNPKDAPELDEIRNPVVRRTVSQTIKVINSIIREKGESPTYINIELARELAKSYKERKNIESNQKSNREKNEKSFEELKKLGVVKPTAFDLVKYKLWKEQDGICVYSQKPLNIEKLFSEGYAEVDHIVPYSISFDDSYSNKVLVHTNENQNKGNRIPLNYLSGKERDEFIVWVKNSHLSFRKKQNLLKEKISEDDFDGFKNRNLKDTQYLSRFLLKFIKKYLKFAPSSTNRKETVIAVNGAITSYIRKRWGIEKIRANGDAHHATDAIVIACVTKSMIKRISEYSKYKETLYIKNNNETLDVDKITGEVKNYFPMPYKWFRTELDIRCSKNPERLLASNPIPTYARDEKVKPIFVSRMVNRKVTGPAHQDTLRRMVVENGQKYEVVKTDLNKLSLDNNNEIANYYNPDDDRLLYDALKNHLIKFKEMHKEENGKKKVEDAFTEPFYKPKSDGSKGPLVKSVKIIKKITSSVTLNNNTTIAKNGDMIRTDVFRTEDGYYLVPIYVADTVKNELPNKAIVQGGEWKAMNDEDFLFSLYRNDLIKIKSNSDVTFSLMNESSSLPKTESLREEFVYFKGTSINTASIRVVTHDNCYIKKSLGVKNLQSLEKYQVDVLGNVSKVKKEKRMGFR

SEQ ID NO: 16358 - protein, 1182 aa, unidentified
  REGION 1..1182: note = Cas Enzyme sequence
MLKGVLMEEIKQLNRKTDVPKPTDLNYRIGLDIGIASVGWAVLENDSHDEPFRIIDLGVRIFDAPDNSGELLSAKRREARSTRRRTRRRGHRLERIKKLFETEGLIDIEEFETRYKKAGLPDVYRLRYEGLDRVLTDDELAQVLLHIAKHRGFKSNSKAEETENDSDATKKKEIGAIKESISANKRIMEEKGYRTVGEMLYLDEKFKIDCDLNTNGYIFCPRNKRGEYKVIILRDVLVDEVHKIFESQRKYGNESASDKLEKKYLDIFLSQRSFDQGPGYPSKYALDGFDFGKCPFEEKNGERRAPKAAYTSELFVALQTMNHTKIVDTDGNKRAFTELERKKIIQLFHIQNDVKYSEVRKELALTENEKFYNLTYSKGKKKDSEQSIFIKMTNYHNMAKALKEKCTGEILDDNRADLYDKIAYNFARYKNDDSRLKELRALGIGEAECNDLLKLSCNKAQGLSLVAMNKIIPFLLEGRVYSEACKLAGYGDFVGDNCTGKSILLRDDEGQKIKETLNEITNPVVRRAVSQTIKVINAIIIEYGSPQAVSIELSREMAKNKKERDKIDKDMEKRCAENAKILDEIREFKAIPTGKDIVKYRLWKEQREICLYTGKKISAYELFSGDGGYDIDHILPYSKTFDDSYRNKVLVRSEANRLKGNRTPYEYLISHGGEKDWEEFTIRVEHCINDYKKRQKLLKKTITDEDTNEFKRRNLQDTQYATTFIYNLIRKNLYLKPYQNSTKKKTQQVMALNGSITSFLSRGWGLEKKDRRTHIHHAQDAVVIACTTQGMINSISEYFKYRESKLERINRHVKDESKEKFEDIVVTREQYDKQSGKKFPLPWQNFKEELDIRMARYNGAVGAIDFKTSPLEYLMAYTDVSNRINYPEWMFVKGRPGRRGVLDGIFVSRMPNHKVSGQAHKETIRSAKYYKEGGGVLDKGYVVYKVPIQDIKYINGEIIYDKNAVYFNPDSDRLLYNALISRLEQFNGNAKEAFLEPFYKPKADGTSGPVVKKIKVCEKQTSGVPVGENGIASNGDMVRIDVFCEENKGKKKYYFVPIYVSDVVKKRMPNRAATQAKIQSEWREMREENFIFSLYSKDLIYIESDKGVPLHDINKNVYSENSVFAYYTGANISKASIDGECHDKKAYFDSLGIQGLRKLEKCQVDVLGNISFVHKEKRMLFN

SEQ ID NO: 16359 - protein, 1176 aa, unidentified
  REGION 1..1176: note = Cas Enzyme sequence
MEEIKQLNRKTDVPKPTDLNYRIGLDIGIASVGWAVLENDSHDEPFRIIDLGVRIFDAPDNSGELLSAKRREARSTRRRTRRRGHRLERIKKLFETEGLIDIEEFETRYKKAGLPDVYRLRYEGLDRVLTDDELAQVLLHIAKHRGFKSNSKAEETENDSDATKKKEIGAIKESISANKRIMEEKGYRTVGEMLYLDEKFKIDCDWNTNGYIFCPRNKRGEYKVIILRDVLVDEVHKIFESQRKYGNESASDKLEKKYLDIFLSQRSFDQGPGYPSKYALDGFDFGKCPFEEKNGERRAPKAAYTSELFVALQTMNHTKIVDTDGNKRAFTELERKKIIQLFHIQNDVKYSEVRKELALTENEKFYNLTYSKGKKKDSEKSIFIKMTNYHNMAKALKEKCTGEILDDNRADLYDKIAYNLARYKNDDSRLKELRALGIGEAECNDLLKLSCNKAQGLSLVAMNKIIPFLLEGRVYSEACKLAGYGDFVGDNCTGKSILLRDDEGQKIKETLNEITNPVVRRAVSQTIKVINAIIIEYGSPQAVSIELSREMAKNKKERDKIDKDMEKRCAENAKILDEIREFKAIPTGKDIVKYRLWKEQREICLYTGKKISAYELFSGDGGYDIDHILPYSKTFDDSYRNKVLVRSEANRLKGNRTPYEYLISHGGEKDWEEFTIRVEHCINDYKKRQKLLKKTITDEDTNEFKRRNLQDTQYATTFIYNLIRKNLYLKPYQNSTKKKTQQVMALNGSITSFLSRGWGLEKKDRRTHIHHAQDAVVIACTTQGMINSISEYFKYRESKLERINRHVKDESKEKFEDIVVTREQYDKQSGKKFPLPWQNFKEELDIRMARYNGAVGAIDFKTSPLEYLMAYTDVSNRINYPEWMFVKGRPGRRGVLDGIFVSRMPNHKVSGQAHKETIRSAKYYKEGGGVLDKGYVVYKVPIQDIKYINGEIIYDKNAVYFNPDSDRLLYNALISRLEQFNGNAKEAFLEPFYKPKADGTSGPIVKKIKVCEKQTSGVPVGENGIASNGDMVRIDVFCEENKGKKKYYFVPIYVSDVVKKRMPNRAATQAKIQSEWREMREENFIFSLYSKDLIYIESDKGVPLHDINKNVYSENSVFAYYTGANISKASIDGECHDKKAYFDSLGIQGLRKLEKCQVDVLGNISFVHKEKRMLFN

SEQ ID NO: 16360 - protein, 1162 aa, unidentified
  REGION 1..1162: note = Cas Enzyme sequence
MHLNRKAEVPKPTDLNYRIGLDIGIASVGWAVLENNTHDEPFRIIDLGVRIFDTAEQSKTGASLALPRREARSARRRLRRRGHRLERIKKLFEAEGLINIEEFEARYKKTGLPDVYKLRYEGLDKRLTNDELAQVLLHIAKHRGFKSTSKAEDGADSDTGEVKKSISANKALMQEKGYRTVGEMIYLDEKFHTDCPWNENGYILTPRNKSGDYKHTVLRDMLADEVMEIFKAQRALENDAATEELERAYLDIMLSQRSFDLGPGTPSKYAMEGFEDRVGLCTFEGRNGEKRAPKAAYTSEFFVALEKINHTKIVYADGNTRFFTDDERYAIIALMHRQQTVKYTAVRRAIGLAEEDKFYNLNYSPKSGNKKSPEDTDFVKMENYHKIRKALGEEVVSEHLSPDKIKLYDDIARILTLYKNDDSRIRRLAEHDIASECYDALLEMSPSKFHNLSLKAMGKIIPFLLEGNTYDKACELAGYDFRAENNGEKSVLLKGKNITNIVNDITNPVVRRSVSQTIKVINAIILEYGSPQAVNIELAREMSKDFDERRKIKSDMEAREKENDKVLSRVREYKSNPTGQDIVKFRLWEEQGGVCLYSGDKIDINDLFSSNGGYDVDHILPYSITFDDSYRNKVLVKASENRQKGNRTPYEYIMAEKGEQAWNEYETLVRNTVKDYKKQLKLLKKHISDEEKAEFKERNLTDTKYITRIIYNMIRQNLVLKPYFNLERERKKQVMAVNGAITHYLSKRWGLAGKDRRTDTHHAQDAVVIACTTDGMINRISRYSKGRELAYSRGFGFVDEETGEILNRDNFSREDWDEKFGVRLPMPWEHFVDELDIRMSRYSTMGEGVSSGTSPREFILSHRDVFNWINYPEWMFVEGRPGRRGVLDGIFVSRMPNHKVSGQAHEETIRSAKYYEDGGCGVEKGYVVYKTAITNLKLDKNGEISNYFNPESDSLLYNALVKRLKDYENDPKKAFEKAFYKPKSDGTNGPIVKKVKVFEKKTIGVLLEKVKGFANNDSMIRVDIYCVNGKYYFVPVYASDVVRDRLPNKCAAKNKNSSDWEIVDDKYFLFSLYKNDLLYIKKDKLPLKSIDECKYPIPNSSKGVYMYFGGADVSGLAFSCEAHDKSFSFRSSVVTVDKLCKCQVDVLGNVSFVKNEKRMTFN

SEQ ID NO: 16361 - protein, 1160 aa, unidentified
  REGION 1..1160: note = Cas Enzyme sequence
MHLNRKAEVPKPTDLNYRIGLDIGIASVGWAVLENNTHDEPFRIIDLGVRIFDAPDNTGELLSGKRREARSTRRRLRRRGHRLERIKKLFEAEGLINIEEFEARYKRAGLPDVYKLRYEGLDRRLTNDELAQVLLHIAKHRGFKSTSKAADGADSDTGEVKKSISANKTLMQEKRYRTVGEMIYLDEKFRTDCPWNENGYILTPRNKSGDYKHTVLRDMLADEVMEIFKAQRALGNDAATEKLERVYLDIMLSQRSFDIGPGSPSKYAMEGFEDRVGLCTFKGKNGEKRAPKAAYTSEFFVALEKINHTKIVSADGSTRFFTSDERHAIIALLHRQQTVKYTAVRKTIGLAEEDKFYNLNYSPKSGNKKSPEDTDFVKMENYHKIRKALGEEVVSEHLSPDKIKLYDDIARILTLYKNDDSRIRRLAEHDIASECYDALLEMSPSKFHNLSLKAMGKIIPFLLEGNTYDKACELAGYDFRAENNGEKSILLKGKNITNIVNDITNPVVRRSVSQTIKVINAIILEYGSPQAVNIELAREISKDFDERRKIKSDMEAREKENDKVLGRVREYKPNPTGQDIVKFRLWEEQGGVCLYSGEKIDINDLFSSNGGYDVDHILPYSITFDDSYRNKVLVKAAENRQKGNRTPYEYIMAEKGETAWNQYETLVKNTVKDYKKQLKLLKKHISDEEKAEFKERNLTDTKYITRIIYNMIRQNLVLKPYLNLERKRKKQVMAVNGAITHYLSKRWGLAGKDRRTDTHHAQDAVVIACTTDGMINRISRYSKGRELAYSRGFEFVDEETGEILNRDNFSREDWDEKFGVMLPMPWEHFVDELDIRMSRYSTMGEGVSSGTSPREFILSHRDVFNWINYPEWMLVEGRPGRRGVLDGIFVSRMPNHKVSGQAHEETIRSAKYYEDGGCGVEKGYVVYKTAITNLKLDKNGEISNYFNPESDSLLYNALVKRLKDYENDPKKAFEKAFYKPKSDGTNGPIVKKVKVFEKKTIGVLLEKVKGFANNDSMIRVDIYCVNGKYYFVPVYASDVVRDRLPNKCAAKNKNSSDWEIVDDKYFLFSLYKNDLLYIKKDKLPLKSIDECKYPIPNSSKGVYMYFGGADVSGLAFSCEAHDKSFSFRSSVVTVDKLCKCQVDVLGNVSFVKNEKRMTFN

SEQ ID NO: 16362 - protein, 1166 aa, unidentified
  REGION 1..1166: note = Cas Enzyme sequence
MEEMKHLNRKAEVPKPTDLNYRIGLDIGIASVGWAVLENNTHDEPFRIIDLGVRIFDTAEQPKTGASLALPRREARSARRRLRRRGHRLERIKKLFEAEGLINIEEFEARYKRTGLPDVYKLRYEGLDRRLTNDELAQILLHIAKHRGFKSTSKAADGADSDTGEVKKGISANKTLMQEKRYRTVGEMIYLDEKFRTDCPWNENGYILTPRNKSGDYKHTVLRDMLADEVMKIFKAQRALGNDTATEKLERAYLDIMLSQRSFDMGPGAPSRYAMEGFEDRVGLCTFEGKNGEKRAPKAAYTSEFFVALEKINHTKIVSADGSTRFFTSDERHAIIALLHRQQTVKYTAVRKTIGLAEEDKFYNLNYSPKSGSKKSPEDTDFVKMENYHKIRKALREEVVSEHLSPDKIKLYDDIARILTLYKNDDSRIRRLAEHDIASECYDALLEMSPSKFHNLSLKAMGKIIPFLLQGNTYDKACELAGYDFRTENNGEKSILLKGKNITNIVNDITNPVVRRSVSQTIKVINAIILEYGSPQAVNIELAREMSKDFDERRKMKSDMETREKENDKVLSRVREYKPNPTGQDIVKFRLWEEQGGVCLYSGDKIDINDLFSSNGGYDVDHILPYSITFDDSYRNKVLVKASENRQKGNRTPYEYIMAEKGEQAWNEYETLVRNTVKDYKKQLKLLKKHISDEEKAEFKERNLTDTKYITRIIYNMIRQNLVLKPYFNLERERKKQVMAVNGAITHYLSKRWGLAGKDRRTDTHHAQDAVVIACTTDGMINRISRYSKGRELAYSRGFGFVDEETGEILNRDNFSREDWDEKFGVRLPMPWEHFVDELDIRMSRYSIMGESVSEGTSPRKFILSHRDVFNWINYPEWMFVEGRPGRRGVLNGIFVSRMPNHKVSGQAHEETIRSAKYYEDGGCGVEKGYVVYKTAITNLKLDKNGEISNYFNPESDSLLYNALVKRLKDYENDPKKAFEKAFYKPKSDGTNGPIVKKVKVFEKKTIGVLLEKVKGFANNDSMIRVDIYCVNGKYYFVPVYASDVVRDRLPNKCAAKNKNSSDWEIVDDKYFLFSLYKNDLLYIKKDKLPLKSIDECKYPIPNSSKGVYMYFGGADVSGLAFSCEAHDKSFSFRSSVVTVDKLCKCQVDVLGNVSFVKNEKRMTFN

SEQ ID NO: 16363 - protein, 1126 aa, unidentified
  REGION 1..1126: note = Cas Enzyme sequence
MDEKMDYRIGLDIGIASVGWAVLQNNSDDEPIRIVDLGVRIFDTAEIPKTGESLAGPRRAARTTRRRLRRRKHRLDRIKWLFEDQGLIEIDSFMKRYGMAGLPDVYKLRYEALDRKLTNEELAQVLIHIAKHRGFRSTRKAETAAKENGAVLKATDENQKRMQEKGYRTVGEMIYLDEAFRTSCPWTEEGYILTARNKAENYQHTMLRAMLVDEVREIFSSQRRLGNEKTTEELEEKYLEIMTSQRSFDMGPGVQPDGTPSPYAMEGFSDRVGKCTFEQDELRGAKGTYTAEYFVALQKINHTRLVNEDGEIRNFTEEERRALVALLFTQKEVKYAAVRKKLGLPESILFYNLNYKKAATKEEQTKENQNTEKVKFVSMPYYHEYKKCLEDRIKYLSENEIRDLFDEIGTILTCYKNDDSRMKRLAELGLVPEEMDGLLAYTPTKFQHLSIKAMRNIIPFLEKGMTYDKACVEAGYDFKADSKGVKQKLLTGENVNQTINEITNPVVKRSVSQTVKVINAIIRTYGSPQAIHIELAREMSKTFEERRKIKGDMEKRQKNNEDVKKQIQELGKLSPTGQDILKYRLWQEQQGICLYSGKSIPLEELFKPGYDIDHILPYSITFDDSFRNKVLVTSQENRQKGNRTPYEYMGKDEKRWNEFEIRVKTTIKDYKKQQKLLKRHFSEEERSEFKERNLTDTKYITTVIYNMIRQNLELAPLNCPEKKKQVRAVSGTITAYLRKRWGLPQKNRETDTHHAMDAVVIACCTDGMIQKISRYTKVRERCYSKGTEFVDAETGEIFRPEDYSRAEWDEIFGVHIPKPWETFRTELDVRMGDDPKGFLDTHSDVALELDYPEEIYENIRPIFVSRMPNHKVTGAAHADTIRSPRHFKDEGIVLTKTALTDLKLNKDGEIDGYYNPQSDLLLYEALKRQLLLYGNDAKKAFAQDFHKPKADGSQGPVVRKVKIQKKQTMGVFVDSGNGIAENGGMVRIDVYCVNGKYYFVPVYTADVVKKVLPNKAATAKKPYSEWRVMDDKDFLFSLYSRDLIHIKSKKGIKTKSVDGNELKLHEIYAYYIKSNISTASIEGIAHDNRFQFSSLGIQSLEVLEKCQVDVLGHVSIVKSEKRMGFS

SEQ ID NO: 16364 - protein, 1071 aa, unidentified
  REGION 1..1071: note = Cas Enzyme sequence
MRYTIGLDIGIASVGWAVINEDKSRIEDLGVRVFKKAEEPDGKSLNLARREARGSRRRIRRRATRMQKVKELLVKYNLVSEKELETLYIITETTPDVYELRAKGLDRLLSRQEFARVLTNIAKRRGYKSNRKIDEEDKEVGKLSKGTIENKRILQEKGYRTIGEMFYKDEKFEYNKRNKAGEYNSTVLRSMLIDEVHTLFEMQRKFKSEFANEEFEKEYVEVMTYQKPYITPELLEKMLGKCTFEKGEPRAPKNSYTFERFMLLQKVNNLNIYINGEKVEIPQEKKKEIIELAYKQAEIKYTQLRKKLELPIEARFADLNYQIKRTEEESEEALVKKIEDKKFVKLEGWHKIRLALKENKDKFEKIEKNPELQNIIADALVRNKTDETIKNYLEKSDIDEEIINAILNINFTKFGHLSYKAMNKIIPELEKGLTYDKACENVGYEFKGRKNELQYKLPPVTELEDEILNSVVLRAVSQTRKVINAIIDKYGSPTAIYIETARELSKPYDERMKIEKRQKENAANNEQIKEYIKETFGFDPKPFDIVKMKLWREQNGKCAYSSKPIPAERLYEENFVQVDHIIPFSRCFDDSYQNKVLVLTDENQKKKERTPFEYFGEDKERWHQFEEFVNLTYKFNTRKKENLLIKNFNEEKSKEWIQRNINDTKYISKFMYNYIANNLKFADSESKRKVYNINGQATSILRHYWGLKKDREESDKHHAQDAVIIACATNKNIKKVSDYSRRKLLYKNNEIIDEETGEIIDKKYNIDISIKEPWPKFREEVEARMEDADNNGQLYALINGNFTNYDDVDITHIKPIFTSRMPERKITGRAHKDTMRSQKFIQQGQNFTVVKKPLKAISKQEIEGIINNPDFKNLYLSDKKLYDDIYQKMKEADFKAEKAFANEYRKYSKNGNSPIVRSIKVASAGATGVQLKNGAIAENANMVRVDVFEKDNKNYLVPIYVSDFAKNELPNKAICANKDEKEWIEMTEKYKFKFSLYPNDLVKIKRKNEKEFYAYYCSTHRGTGAINLLAVNGESRIESVGVKGLEIFEKYQVDILGNISKINKEKREGVK

SEQ ID NO: 16365 - protein, 1074 aa, unidentified
  REGION 1..1074: note = Cas Enzyme sequence
MKYTIGLDIGIASIGWAVINNDKSRIEDLGVRIFKKAEEPDGKALNLARREARGSRRRIRRRAARMRKVKEMLVKYNLVSKEELEQLYVITEENKDVWELRAIGLDELLDRKQWARVLTSIAKRRGYQSNRKIDEEDIEVGKLRKGTIENKRILEEKGYRTIGEMFYQDEKFERNKRNKAGEYHNTVLRSMLIDEIHTLFEMQRKYKNKFASKELEKEYIDIVTYQKPYITPELLEKMLGKCTFEKEEHRAPKNSYTFERFMLIQKVNNLKIDINGEKIQIPQEQKEGIMNLAYEQAEIKYSQLRKKLELPKEARFVDLNYNGTKKKEGLSEEKTIKEVEDKKFIKLEGWHKIRLALKANKQEEKFNLIKQNPELQDIIADALVRNKTDKTIKKYLENKKVDNQIINAVLNINFTKFGHLSYKAMKKIIPELEKGLTYDKACENAGYEFRGSKNTLQYKLPPVSKLDDCILNPVVLRAVSQTRKVINSIIDKYGSPTAIYIETARELSKSFDERRIIEIRQKENMENNEKLKDYIRETFKFEPKPFDIVKMKLWREQGGKCAYSGKSIPAERLYEENFVQVDHIIPFSRCFNDSYNNKVLVLTDENQKKKERTPFEYLGENKEKWHAFEEFVNLTYKFNNRKKENLLIKNLSEEKSKEWIERNINDTRYIAKFMYNYITNNLQFAESELKRKVYNINGQATAILRHYWGLKKDREESDKHHAQDAVIIACATNKNIKKVSDYSRKKILHINNETVDEETGEIIDLKYNTDITIKEPWPKFREEVEARMEDLDNNGELYALKHGNFRNYDDIDISTIKPIFVSRMPERKITGRAHKDTMRSQKFIKQGKNFTVVKKNLKNITKQEIESIIQKPEFSMLYLSDKDMYDDIYKKMKEVNFKAEKAFAEEYRKPSKKNNGAIVRSIKVPSMGSAGVRLKNQSIAENASMVRADVFEKNNKYYLVPIYVSDFAKKNLPNKAIVANKDEKEWIEMTEEYNFKFSLYPNDLVKIKKKKEKEFYAYYTSTHRGTGAINLLAVNGDKKIEGIGVKGLETFEKYQVDILGNISKVKKERREGVN

SEQ ID NO: 16366 - protein, 1159 aa, unidentified
  REGION 1..1159: note = Cas Enzyme sequence
MSRKALAVQKWAAIFIFRIMEVLIMGYRIGLDIGITSVGWSAIENDSNGNPIRIIDLGSRIFDAAEKPKDGSPLAKERRDARGLRRRIRRKKHRVERTKRLLERYDIISKKEIDKMYENSEHIKHLFNVYELRVLGIDQKLTPKELARVLISLVKKRGYKSNSKAEESDGESGKLLTATRDNEKLMKEKGYRTVAEMYLKDEKFKVRDKDGEILKDKEGNQLIKIKNTTGEYRNTTLRKLLVEEIKLILDKQKELNPKITDEFIREYLNIFEGQRNFDEGPGYPSQYGGDLIENMLGTCTFEKGQKRAPKATYTFEYFKFLQTLNHIKIEKIVIQDGKKVKEKRELTPDERNKVKELIFSKVTVTYSDIRKALKLTEKERFNMFVYKDMLNFTEETNKEIEKDKKLKEFESYKKIKTALNHIEKDYISKLDKEEIDSIGYALTVYKNDEKRIKYLKENTHNLTDEAIEELLKLSFSKVGNLSITAMKKIIPELEKGLTYDKAVDNIYEDFRGQINTEKKRKLRLKDFEEDITNPVVRRGLSQAIKVLNAITLKYNEKYGKPDVVVVELARELGKNFRDRKDIEKRQNSNMQTNEKAKAEIIGLGKSNPTGKDIVKYKLWQEQDCKCIYSGQSIPVEELFTDLVDVDHIIPYSQCFDDSYNNKVLVLAKENRQKGNRVPYKYIKESGRNIDEYEIRVNTLIKNNRKKQNLLKEDFTKEDSKDWKERNLNDTKYICKYMYNLIRNHLDFSDNPSFVRKVWTVNGALTAHIRKRLGIDKVRDGDTHHAIDATVIAITTQNMINRLTQYYQYIDGRYMNNKGEYIDIYTGELLSAKEYEKQNGIYFPEPWNKFRKELDIRANCKTRERMIECLEAEKIYTYENYDDVEPIFVSRMPRRKVTGTAHLETIRGIKEENGELKTITKTELTKLKLKDGEIEGYPENCKKDDRLLYEALKNRLIEFNGDAAKAFNEPFYKPKSDGSRGPIVNKVKIESNTTIGVKLNNNKAFAANGDCVRIDIFYVENDGYYFIPIYVSDTVKKELPNKACMAGKPYSDWKEMDDKDFIFSIYPKDLIYIKGKNKLKLNPVIKDKEVIEVEDILAYYVKCGIGSASIAIQTNDNKYVQESLGIKKLEKLEKYEVDILGNYHKVKLPEKRLPFNINKK

SEQ ID NO: 16367 - protein, 1127 aa, unidentified
  REGION 1..1127: note = Cas Enzyme sequence
MNYRIGLDLGIASVGWAVLEDDYTGKPKRIVKLGARIFDSAENPKDGSSLALNRRETRETRRRLRRRNHRIKRTKNLLEKYNIMTTKEIENMYATYKFQFNPYELRVKGLDEKLTNSELSRILISFVKRRGYKSNSKSEETNDKEMGKLLTATKENELLMKEKGYRTVGEMYLKDEKFKMQMPDGRVLLKVRNTTDDYKNTPLRKLLLDETKQILNKQKELNVNITSDFIDEYINIFTSQRNFDDGPGQPSIYAGNQIEKMLGKCTFEKEENRAAKATYTFEYFKLLQDINHIKIEKHIINETGKKEVLKRPLTEDERNIIINLAKAKVTLTYASLRTALNLEGNERFNMIHYKATNVFSDEINKKAEKERKFKEFESYHKMRVAMDKAEKNYILKLSTDELDVIGTVLTLYKNDNKRIEKLAQLNLPENIINEILKLSFSKVGNLSIKAMKKIIPYLEKGYTYDKAVNEVYEDFRGVVNTEKKKKIALRDLEQELSNPVVKRSVSQAIKVLNAITRTYGEPDVINVELARELSKNFADRQNIKKNQENNMQSNEKAKEDILKLGKSNPTGQDIVKYKLWKEQDGICVYSGKRISIEDLFTEAVDVDHIIPYSMCFDDTYKNKVLVLSSENRQKGNRIPYQYMQEKGRDLDEYEIRVNNIIKNYSKKQRLLKQKFTREDANEWKDRNICDTQYISRLMYNLIKNHVQFSNNENFERKVFTVNGQITSHIRKRLGINKIRENGDEHHAIDAAIIATVSQGMIQRITKYYQYIDGRYEKNSGEYIDIETGEIITKEQYEAENGSNFPEPWPKFRKELDIRTTCKTKARMEECLLTEKIFYDDYDDVKPIFISRMPRRKITGQAHLDTIRGLRKSDEGLKTLTKTELTKLKLDKNGEIERYPESQKQDDKLLYNALVEQLRKFGGNGTEAFKKPFYKPKSDGTPGPLVKKVKLEDKTTLAVELNNGKAIAANGDMIRIDVFKVEGEGYYFVPIYVSDTIKNKLPNKASVASKTYAEWKEMQDKDFIFSLYPRDLFYVKSKNKIKLTSINKQDKESLDTNELFAYYVNADISTAAIACINHNGEYERRGLGIKRLQEFKKYEVDVLGNYHEVKLPEKRQDFSNLKKGGSLK

SEQ ID NO: 16368 - protein, 1128 aa, unidentified
  REGION 1..1128: note = Cas Enzyme sequence
MNYRIGLDLGIASVGWAILEDDNKGNPKRIVKLGSRIFDAAENPKDGSSLALNRREARNTRRRLRRRNHRIKRTKNLLEKYNIITIKEIENMYATYKFQFNPYELRVKGLDEKLTNSELARVLISFVKRRGYKSNSKAEETSNKEMGKLLVATKENEILMKEKNYRTIGEMYLKDEKFKIQMPDGRVLFKVRNTTDEYKNTPLRKLLLDEIKQILEKQKELNSNITDSFIDEYINIFTSQRNFDDGPSQPSIYAGNQIEKMLGKCTFEKEENRSAKATYTFEYFKLLQDINHIKIEEYHLKENGTREVIKRTLTEEERNIIINLAKTKVTLTYDSLRTALKLTTNERFNMINYKRTDIFNDEENKKVEKDRRIKEFESYHKIRVAMDRIEKNYINKLNSDDLDTIGTVLTLYKNDNKRIEKLKEINLPEDIVNELLKLSFSKVGNLSIKAMKKIIPYLEQGYTYDKAVNEVYEDFRGIINTKKKKKIALRDLEQELSNPVVKRAVSQAIKVLNAITTTYGKPDIINIELARQLSKKFADRQNIKKKQEQNMQNNDKAREEILKLGKNNPTGQDIVKYKLWQEQDGICVYSGKHISIEDLFTEAVDVDHIIPYSMCFDDTYKNKVLVLASENRQKGNRIPYQYLKEKGRNLEEYEVRVNNIIKNYYKKKRLLRQNFTREDATEWKDRNIQDTQYISRLMYNLIKNHVQFSDNENFDRKVFTVNGQITSHVRKRLGINKIRENGDEHHAVDAAVIAIISQGMIQKITKYYQYIDGRYEKNSGEYIDLETGEILTKEQYEKENGINFPEPWPKFRTELDIRTTCQTKERMEECLVAEKIYYENYDDVKPVFISRMPRRKVTGQAHLDTIRGIRKNEEGIKTLTKTELTKLKLDKNGEIEKYPDSQKQDDKLLYKALVDQLRKFGGNGEEAFKRPFYKPKSDGTPGPLVKKVKLEDKTTLAVELNNGKAIAANGDMIRIDVFKVDGEGYYFVPIYVSDTIKSKLPNKACVAAKQYSEWKDMKDENFIFSLYPRDLIYIKSKNKIKLTSINKENKETKEISEMFAYYIKSGISTAAISIINHNGEYEQNSLGIKTLKEFKKFEVDVLGNYHEVKLPEKRQSFKNLKKKGGSLK

SEQ ID NO: 16369 - protein, 1083 aa, unidentified
  REGION 1..1083: note = Cas Enzyme sequence
MKYVMGLDLGITSVGWAVINLDKKRIEDLGVRIFPGGERPKDGGSLNENRRLFRGQRRRLSRRRVRMRKIKELLVEQGLIVKEELENFYQLKKEDRDVWLLRVESLERKLEDKEWARVLTTLAKRRGYKSNRKDSKSEKEESGRVLKAIQLNQTIMENKNYRTVGEMLVKETNITTETLAKQALRNKADQYDHCVLREMLVEELKTLFEIQRNLGNLKASESFEKEYLEVFEYQKPFMTRELMEKMIGKCTFEKEEPRASKNSWTFERFMLLQKINNLTYSTGSEKHNLSQEEREKIITLAYEQREIKYTTLRKTLKLPDDARFTGLNYFIRKKKQEELTEEKYRQEVEKTTFVKLNGYHTLKEAFKKNEKIGLWKEFEKDKEKLDDVAETLSKSKTEQEIQKELEQIGLTKEEIAIVKDVNFDKYGHLSYKAMKKILPYLEEGKTYDKACELAGYNFKNETENPQKKLPPILQERGINPVMYRTVTQTRKIINAIIEKYGSPYEIHIEVARDLTKNRDERNKIQKKQEENRAENEKTKEYIRETFKIENPKPVDILKVKLWREQGGKSAYSLKAISPEQLFEDNYVQIDHALPFSRSFDDSYNNKVLVLTKENQDKRNLTPREYIKNEEEWEQYEAWIKTTYKYNPRKRENLLMKNFDEERAGDWRARNLVDTKYIARFLANYIKSNLLFEDYGEKSNRIKVKMIPGGVTTALRHYWGIAKKDRETDTHHAEDAVILACATNEFINKVMDFSKYKELYHEYKDGNYIDKETGEIVENKYKTHEMKRPWPEFKEELEARTSQNPRHDLESGQFKNYNDFNFENLKPLFVSRMPNRKITGQAHKETIYSDRKNGVVVIKTRLQELSGEDIKNICTKEEYKELYMSDKNTYDAIYRRMAEYNFKADKAFAPGYTIRKKAKNGEGTIVKSIKVPSKMNSGVKVQGGIAANGGMVRVDVFEKDGKYYLVPVYVADLVKGEIPNLAIMANKPKSEWTFMDESYNFKFSLFLNDLVYVKKGEKEILGYYVSTHSGTGAINLKSPNGQSEYEGIGVKTLDKFEKYEVDLLGNYYKVKKETRKGGKSRLKK

SEQ ID NO: 16370 - protein, 1101 aa, unidentified
  REGION 1..1101: note = Cas Enzyme sequence
MKYSIGLDIGTTSIGWAIIDEDNKRIEKVGVRIFEKPENPKDGKSLSETRRTARSTRRRLKRRRQRLNFIKRFFRDNNLLSKEQIEELLKPENKLDPYKIREKALNEKISNDELFVGLYHIAKRRGYKSNRKSAEENDKENSKVLSAISKNEKLLKEYKTVASALNSNEKFIAHKRNKAEDYSNSFVRANFEDEAKLILKIQKEFGLKLSDEKINFLLFGNEKEGNFNGIFSQRPFMTSELIMKMRGKCSFEKSEFRAPKASYSFEMFRLAENLAHLRVVINNEERNLTEEEISKVIEKAKDIKVLKYQHIREVLGYKKDENFSFPVNMIRGEIKKDSKNNGEENKFGELSFYHKVKAALSNTPEDWQKVCDNNYRMLDELGEILSCNKDDENLRKEISKLNLSEDAVEVLMMINVSGFGHLSFKALRKILPFLLKGDTYRNASENAGYDTKQQLSGDKNKLPPLSKEESAQITNPVVKRAVSQTIKVVNAIIREYGAPYQIKIEAAGDLAKNFKERKKIKKTQDENASYNESIKERLKNEFNVLSPTGLQITKFKLYEQQNWKCAYSGEDFVIENLFSNEHYAEIDHIIPFSRCGNDSLMNKVLVFTEENRQKGNLTPFEAWGANESRWANFEARINSMNLPFRKKERLLAKVPPKEDWNSRALNDTRYISKFLSQYLRKNLKFAKIENENPAQRVIVPNGSITSYLRRIWRVGSKDREENNLHHATDACIIAAIDQSVIQKISRLNKYFELFKYSAEDEVIDKITGEISSRADFEQTFEDIEPWRDFGKEVRKRTAHYESPMELRNELIGLENYDEEFRNKTTPIFVSRMPKRSGNGSINKETIRSPKIVEGYIDSKGKPAIARKQRVRLTSVDLKTLYDSPVRETDPALYEILKARLDEFDNKPEKAFGDPSNPVYKPTKNGSLGNIVRSIKVYDTQNSKSGFLINEGKAFVNNGDTIRLDVFKRKNYKGEFEYYFSPIYAHLLNAKKVEILPTPNGRSAAEKADFNKIRDENGKIFATEENGFVKQFSLYPNDYVRIYAKNKIVEGYYVKYNIANGSISLIGHDKADKKNIDGVSGGTITSIERYDISVLGDNYRWI

SEQ ID NO: 16371 - protein, 987 aa, unidentified
  REGION 1..987: note = Cas Enzyme sequence
FISLYHIAKRRGYKSNRKSAEEKDKEGSKVLSAISENEKLLKEYKTVASALNSNEKFIAHKRNKAEDYSNSFVRANFEDEAKLILKTQKEFGLNLSDEKINFLLFGNEEKGNFNGIFSQRPFMTSELIMKMRGKCSLEKSEFRAPKASYSFEMFRLAENLAHLRVVINNEERSLAEEEISKIIEKAKDIKVLKYQHIREVLGYKKDENFSFPANMIRGEIKKDSKNNGEENKFGELSFYHKVKTALSNTPEDWQKVCDNNYRMLDELGEILSCNKDDESLQKEISKLGLSEKAVEILMTINVSGFGHLSFKALRKILPFLLKGDIYFDALKNAGYDVKQQLSGDKNKLPPLSKEDSAQITNPVVKRAVSQTIKVVNAIIREYGAPYQIKIEAAGDLAKNFKERKKIKKAQDENASYNERIKERLQNEFNVPLPTGLQITKFKLYEQQNGKCAYSGKRLVLENLFSNEHYAEIDHIIPFSRCGNDSLINKVLVLTEENRQKGNLTPFEAWGADENRWVEYEARVNSMNLPFRKKGRLLAKVQPKEDWNSRALNDTRYISKFLSQYLRKNLKFAKFDNENPAQRVIVPNGSITSYLRRVWRVGSKNREENNLHHATDACIIAAIDQNVIQKISRLNKYFELFKYSAEDEVIDKITGEISSRADFEQTFEDIEPWKDFGKEVRKRTAHYESPMELRNELIGLENYDEEFRNKTMPIFVSRMPKRSGKGNINKETIRSPKIVEGYVDSKEKPVIARKQRIRLTSIDLKTLYDSPVRETDPALYEILKARLNEFGDKPEKAFGDPSNPVYKPTKNGSQGNIVRSIKVYDTLNSKSGFLINKGKAFVNNGDTIRLDVFKRKNYKGEFEYYFSPIYVHLLNAKKVEILPTPNGRSAEEKADFNKIRDENGKIFATEENGFVKQFSLYPNDYVRIYAKNKIIEGYYVGYDINGGKISLIGHDKADKKNINRVSGGTITSIEHYDISVLGDNYRWI

SEQ ID NO: 16372 - protein, 1101 aa, unidentified
  REGION 1..1101: note = Cas Enzyme sequence
MKYSIGLDIGTTSIGWAIIDEDNKRIEKVGVRIFEKPENPKDGKSLSETRRTARSTRRRLKRRRQRLNFIKKFFRDNNLLTKEQIEELLKPENKLNPYKIREKALDEKISNEELFISLYHIAKRRGYKSNRKSAEEKDKEGSKVLLAISKNEKLLKDYKTVASALNSNEKFIAHKRNKAEDYSNSFVRANFEDEAKLILKTQKEFGLNLSDEKINFLLFGNEKEGNFNGIFSQRPFMTSELIMKMRGKCSLEKSELRAPKAGYSFEMFRLAENLAHLRVVINNEERSLAEDEISKVIEKAKDIRVLKYQHIREVLGYKKDENFSFPANMIRGEIKKDSKNNGEENKFGELSFYHKVKTALSNTPEDWQKVCDNNYRMLDELGEILSCNKDDESLRKEISKLGLSEKAVEVLMTINVSGFGHLSFKALRKILPFLLKGDIYSDALKNAGYDVKQQLSGDKNKLPPLSKEDSAQITNPVVKRAVSQTIKVVNAIIREYGAPCQIKIEAASDLAKNFKERKKIKKAQDENASYNERIKERLQNEFNVPLPTGLQITKFKFYEQQNGKCAYSGKKLVLENLFSNEHYAEIDHIIPFSRCGNDSLMNKVLVLTEENRQKGNLTPFKAWGADKSRWAEYEARVNSMNLPFRKKERLLAKVPPKEDWNSRALNDTRYISKFLSQYLRKNLKFAKFDNENPVQRVIVPNGSITSYLRRVWRVGSKNREENNLHHATDACVIAAIDQNVIQKISRLNKYFELFKYSAEDEVIDKITGEISSRADFEQTFEDIEPWKDFGKEVRKRTAHYESPIELHNELIGLENYDEDFRNKTTPIFVSRMPKRSGKGNINKETIRSPKIVEGYVDSKEKPVIARKQRVRLTSVDLKTLYDSPVRETDPALYEILKARLNEFDNKPEKAFGDPSNPVYKPTKNGGQGNIVRSIKVYDTQNSKSGFLINKGKAFVNNGDTIRLDVFKRKNYKGEFEYYFSPIYVHLLNAKKVEILPTPNGRSSAEKADFNKIRDENGKIFATEENGFVKQFSLYPNDYVRIYTKNKIVEGYYVKYNIANGSIYLIGHDKADKKNIDRVSGGTIASIERYDISVLGDNYRWI

SEQ ID NO: 16373 - protein, 1101 aa, unidentified
  REGION 1..1101: note = Cas Enzyme sequence
MKYSIGLDIGTTSIGWAIIDEDNKRIEKVGVRIFEKPENPKDGKSLSETRRTARSTRRRLKRRRQRLNFIKRFFRDNNLLSKEQIEELLKPENKLDPYKIREKALNEKISNDELFVGLYHIAKRRGYKSNRKSAEENDKENSKVLSAISKNEKLLKEYKTVASALNSNEKFIAHKRNKAEDYSNSFVRANFEDEAKLILKIQKEFGLKLSDEKINFLLFGNEKEGNFNGIFSQRPFMTSELIMKMRGKCGFEKSEFRAPKASYSFEMFRLAENLAHLRVVINNEERNLTEEEISKVIEKAKDIKVLKYQHIREVLGYKKDENFSFPVNMIRGEIKKDSKNNGEENKFGELSFYHKVKAALSNTPEDWQKVCDNNYRMLDELGEILSCNKDDENLRKEISKLNLSEDAVEVLMMINVSGFGHLSFKALRKILPFLLKGDTYRNASENAGYDTKQQLSGDKNKLPPLSKEESAQITNPVVKRAVSQTIKVVNAIIREYGAPYQIKIEAAGDLAKNFKERKKIKKTQDENASYNESIKERLKNEFNVLSPTGLQITKFKLYEQQNWKCAYSGEDFVIENLFSNEHYAEIDHIIPFSRCGNDSLMNKVLVFTEENRQKGNLTPFEAWGANESRWANFEARINSMNLPFRKKERLLAKVPPKEDWNSRALNDTRYISKFLSQYLRKNLKFAKIENENPAQRVIVPNGSITSYLRRIWRVGSKDREENNLHHATDACIIAAIDQSVIQKISRLNKYFELFKYSAEDEVIDKITGEISSRADFEQTFEDIEPWRDFGKEVRKRTAHYESPMELRNELIGLENYDEEFRNKTTPIFVSRMPKRSGNGSINKETIRSPKIVEGYVDSKGKPAIARKQRVRLTSVDLKTLYDSPVRETDPALYEILKARLDEFDNKPEKAFGDPSNPVYKPTKNGSLGNIVRSIKVYDTQNSKSGFLINEGKAFVNNGDTIRLDVFKRKNYKGEFEYYFSPIYAHLLNAKKVEILPTPNGRSAAEKADFNKIRDENGKIFATEENGFVKQFSLYPNDYVRIYAKNKIVEGYYVKYNIANGSISLIGHDKADKKNIDGVSGGTITSIERYDISVLGDNYRWI

SEQ ID NO: 16374 - protein, 1101 aa, unidentified
  REGION 1..1101: note = Cas Enzyme sequence
MKYSIGLDIGTTSIGWAIIDEDNKRIEKVGVRIFEKPENPKDGKSLSEARRTARSARRRLKRRRQRLNFIKRFFRDNNLLTKEQIEKLLKPENKLDPYKIREKALNEKISNEELFIGLYHIAKRRGYKSNQKSAEENDKEKSKVLSAISKNEKLLKEYKTVASALNSNEKFIAHKRNKAEDYSNSFVRANFEDEAKLILKIQKEFGLKLSDEKINFLLFGNEKEGNFNGIFSQRPFMTSELIMKMRGKCSLEKSEFRAPKASYSFEMFRLAENLAHLRVVINNKERSLTEEEISKIIEKAKDIKVLKYQHVREVLGYKKDENFSFPANMIRGEIKKDSKNNGEENKFGELSFYHKVKAALSNTPEDWQKVCDNNYRMLDELGEILSCNKDDENLRKEISKLNLSEDAVEALMMINVSGFGHLSFKALRKILPFLLKGNIYSDALKNAGYDTKQQLSGDKNKLPPLSKGESAQITNPVVKRAVSQTIKVVNAIIREYGAPYQIKIEAAGDLAKNFKEREKIKKVQKANASYNESIKERLQNEFNVPLPTGLQITKFKLYEQQNGKCAYSGKRLVLENLFSNEHYAEIDHIIPFSRCGNDSLMNKVLVFTEENRQKGNLTPFEAWGANESRWADFEARINSMNLPFRKKERLLAKVPPKEDWNSRALNDTRYISKFLSRYLRKNLKFAKFENENPAQRVIVPNGSITSYLRRIWRVGSKDREENNLHHATDACIIAAIDQSAIQKISRLNKYFELFKYSVEDEVIDKITGEISSRTDFEQTFEDIEPWKDFGKEVRKRTAHYESPMELRNELIGLENYDEEFRNKTTPIFVSRMPKRSGKGSINKETIRSPKIVEEYIDSKGKPAVARKQRVRLTSVDLKTLYDSPVRETDPALYEILKARLNEFDNKPEKAFGDLSNPVYKPTKNGGRGNIVRSIKIYDTQNSKSGFLINKGKAFVNNGDTIRLDVFKRKNYKGEFEYYFSPIYAHLLNAKKVEILPTPNGRSAAEKADFNKIRDENGKIFATEENGFVKQFSLYPNDYARIYAENKIVESYYVGYDIDSSRISLIGHDKADKKSTNRISGGMITLIERYDISVLGDNYRWI

SEQ ID NO: 16375 - protein, 1166 aa, unidentified
  REGION 1..1166: note = Cas Enzyme sequence
MKIRNNVYSMKSIKDVEKLANRPYRIALDLGVGSIGYAVGALASTNDNHIYVEELILSGVRIFSSSKGAAERRQKRGQRNVIRHKRHRLTYLWKILAERNLMLPYVKETSELDTNIVRFSEPVRKLKNGNVYSLRYKGLFEKLNLDEIGFCVYHIANHRGSSSVRTFLDMDVQELQELKKNKSKLELVEAKQANNQSISFIEILHELNKDGIIGYRNTNDRMNIPLPKRDVILVELNKLLATQKLFYPEVLTDEYCERIVKAVNYENEKLVPEVGNCPYFPDEPKLPKCHFLNEERRLWEALNNARIKLPQESKGTIVYVPTKFSQEDKEKLYKELRNGVTLTGKMVKTLLPEYKDFDIILQGKEQKTSEIKGFRFKSLERKSFWNRLSNLEQDNFFALWVNCPDDMLLKKKLIDEFHLTEEEVTDALKTVQLISDYGPVGKSATEIIMRYIKEEGLTWTESLLVAEKNKELHSCFELKKYDVLPYYGEVLTGSTKAIMGKAWHSAFEARRYSKGFICPNTAKDEEKFGRIANPVVHQTLNEVRKLVNEIISLFGYKPSEIVVEVARSLKVGLEKREDISRTQKNNETHRKELFEKYCKPHNLSQKYIQHFYLLETQGMKCPYCLETINPDGLVRNAVDIDHILPEHETADSSFNNLVLAHKNCNAKKGKRSPFKAFYGTDKWAEILHYLEENQSMRSKRWRFMLDDEEYKMYLERKGFLSRFASDNAYIAKACKEYLSCLFDRSNGNRIPVYTMKGGETAVLRKAWGLNQIGYELGTMHLKDTEALEYISHKNRTDHRHHAIDAITMLYATRGYSQLINTLTSRGIPLSVVEKKIPVPMNLKRLIDEVFDESYLFDYNSIFFTEIAVHIKQESRISIKYDTDFNGELLKGWTYGIIGKYKDEIILCTQKSVAKIEDRKKLKKQLFGEKEMALLDDSLKEKLLKFQIHNLAVYEAIEENIPKALKVIQDENKKNVKEGKRTIKESEKNVELRAKIMTGGKYYDISKQKSNKLFLLRDVSEKGKGFVVDTGRNLCIDLFHDNTGKLCGEIIRKVQAMDKDYVPEYKRKGFHLYERIYQGDTLEVDLGEKAFSVPAPISSCHKALVRVDTFTETKTGFQIYVTNLYRSGVTQDSSFTLTTVHARNARKVVLSSLGYPLYVSQVLKDKT

SEQ ID NO: 16376 - protein, 1438 aa, unidentified
  REGION 1..1438: note = Cas Enzyme sequence
MNFNRKCSENYCLGLDVGTASVGYCVIDENGKLFKINRKGDNGNNKRNSLWGVRTFKSGEPAKGCRINRSTRRRYSRTHTRILELRKIMSDMVCKVDENFFARLDESFLWKEDKSDKAKSDYILFADKDCTDKDYYEKYQTIYHLRKHLLGTTEKADARFIYLALHHMLKYRGNFLYEGQKFTELDDFKIIYEQFVTSLKEYLEIECNYDQISCEEIEEKLKEKKSKKEKNDEVSEIIKKLGLDKKYAGAVANAIIGYKFNVATIMNDKNLCDENGKEMSVSFASADYEEEEQKLSDELGEKFSVIENLKRLYSWYVIKQIMQGSDKKRVNYLSEAMVAKYEKHHAELKELKELFRDYKTQKEYSEFFHKELKAEQKDGKMSPAFLKSFGKIKKGEYVPNYANYIKGMKRCGDTQSKARENLYKCIKALLGDVAKDDERYIRICAEMENDSYLEKINDVSNSVIPYQLNEMEMEKILDIQGEFYPELKKNKELILKMLTSKIPYFVGPLNPGSRFAWMSKKAGMENKSVYPWNVEEVVDVDKTAEKFITRMTNYCTYLPDEKVLPKHSIIYQWYEVLTELSQISIDKIKLGKEIRDDIIQNLFLKKVSVSGENLKEHLKKSGTYNDIDNRVIRGYQGGDNFASSMSSYITFKKIFGEINMSNIDMIEQIIYWLTIFDDKKIIKRKIEQNYKDKINDSQLKRILKIKYTGWGQLSKKFLTGIKGDTGHTIIEMLEEGDPRWKELPNLIQIINRDEKIKTVIEENRLRYNGEDDLPDIIDKLHTSPANKRGIKQCMKVIEEIIEYMGRKPEQIFIEFAREEGEKVETKKVKDKLDKAIGKLKQEFKDYYNDDIKQELKDNEKRLDEEKVRLYFSQNGKSLYSAPSAGNQLSLDNLNQYDVDHIIPYSISQDDSMDNKVLVKKIENQNKGNRIVSDAFGNKADYKEMQNYWEMLYKAGLISEKKYNNLNKSLDEVFSKGFINRQLVETRQIVKNVANLISDYYDDKIEVIEVKAQLSSYIRNKFTQEKKDDDGFWIENTENAMFFKNRGLNDYHHAHDAYLACIIGLYIQKVYPGWKNELNFKKYRREFEKYYEEQKKYNTKSKKEIYISMLNRFTKNYEKAGWNGEEIIEYMRKIFCYRDVMISKKTEENTGSFYNQTRYPKEKLDGNKKETKLIPLKSGNNLRGNEGLKELSVEKYGGYQGGECAYFVLVKYYTVKNKKKTEEKQWKMEFVGIPTYISYEINKGNINLKQYICDKLKNNTVEILRNKICKYQELMDEEGNRYFLVGPTEVANAKQFVLGSRYQKFNRLYSYINSENWHYIRTDELEKEIDEFFKLLQNKIHNEFKGYIKDIDKVIGANTSKLDIDKKIDYFNEIYKIVQANSSRPAVSKFNIAGISDGLGRKRSLPFKDKIIIVDKSVTGIYERRTCFELENGGNTKSC

SEQ ID NO: 16377 - protein, 1254 aa, unidentified
  REGION 1..1254: note = Cas Enzyme sequence
DAKKLLKGVEKLCKINNELPITEFKEKLINYLNKADNLGAVKKGIADVSKKITETGCETLGQYFYKLYQNQSKIRKVYTARTEHYYHEFLKICETQNICDQLKHKLDKAIFYQRPLKSQKGLIGKCVFEKNKTRCAVSHPAYEEYRALQFINSIKVSETKDGKKDFLSFDERKKIWPKFIRKSKPNFDFKEIAETLDKKGLSRYYNYTGHTSVSGCPTIAQLTNIFGENWQETLFEKYTNKQNTKGLKTIDEVVTDIWHVLFTFDKDEKIIEFGKQKLGLNEVLAKKFGAINLKKDYASLSLKAINKILPYLREGLIYSYAVFLANIENVVGEEIWKNDENKNLIKKELHLLIDNFNEIKGLEAVVNDFIADFKKEYNNAHKDYVLDEQDKKILLEKIESNYGKNKFESLEPDKKTEIINSTEKMVAEQLRKQRGEFIKPKRLDEKISEFLINNFNVTKKSIARLYHPSDVEIFKTASRNSEGLLLLGSPIVSSIKNPMAMRAMHQLRKLVNTLIKENIIDEETKINIELARELNDANKRAAIKKWQDERQKAREEYKKSIKELFKAECGKDIEPSDSEILKYELWEEQQHICIYTGKTINICDFIGANPNFDIEHTIPKSLCFDNSNENLTLCDIQYNRDVKRNKIPTELSDYNSIKPRLDKWLVFIDDYEKLYNTRKKAKGIETKEQKDKRIKEKHYYKLHLDYWKGKYKRFIMVDVPSGFKNSQIVDTGIITKYAISYMKSIFPKVYSVKGNIVAEFRKIWGLQNDYEKKERVNHVHHCIDAITIACMSKQKYDTLAKIYHEDEAGFHKIKKETQLVSKPWTSFTMDVLNIEKEIFVSHHTPDNMKKQSKKVVRERGIIAPKVIYETDANNNTLRDKYGKKIVKEYILLKDVNGNLIPIKGKRLTPSDIINKVDGIDYFSLIINDKIQYYEFAKSKKTGKIIYKKEPIYLQGDTVRGSLHLDTFYGAIAKDINGNIITNTNGKIAPNYVIRKELSKLKETDIENIVDPVVRGKIIEAKKNKLITFNKSGAVIKTTIWMKENQIPINKVRVYSSLKNPLPDFKKHRDLSHLTYKQQYNVSNEENYCLAIYEGKNKKGNVCRTCELVNMIDAGNYYRLSNKNWKQQYPIVPEKDSVTNYSLKTIITKGLMVLLYEKSPEEIWELTYNQQMERLYEITQLDTEKSAEIKLLFHQEAREKKVITEYMGLKTGMKGGKNIGKHKEFPWIKVGPNSFDALIEGIDFKLTPTGKIIKL

SEQ ID NO: 16378 - protein, 953 aa, unidentified
  REGION 1..953: note = Cas Enzyme sequence
LIMPLFFRKSKHSFHFEDIAKKLKGKNEYWKFNYRNDTNVSGCSVATHLQEIFGESWKDVVIGQYDIFDIWHVLFDFDDDDKLCDFARTKLNLDEERANKFCKIHLPQGYGNLSLKAIRKILPFLRKGYLYSHAVFLANIPFMIGEKEFEENSIVIEDSIKEIIGSLNKRNNVLIIANNCIDRVFKDKQYDFHSEEWDKSIIDTQLVDFYGKKKWDNLSAKEQGNIKMEVEGKVEDVLKIATTRNPNDYKYQMLRTDNLIEEYLIENGFSIKKNIKLYHPSDIDYIFENPIILDDGKKMLGSPRTPSVKNPVAMRAMFQLRKLINYLIATGEIDSSTKINVELAKEVNDKNWRKAIAEFQKENEKKNEGYRKKLMESGYEPSETNVKKYRLWKEQQETCPYTGEPIRIEALFGAQPLYDFEHTIPRSMSYDDSLENITLCQAEYNRNVKKQCIPSELPGYDEMKLRFMKFYEKDIDACLATIEKNKVRGYMDPATKDKKIVARHIAELKLRYLKGKIKRFTALEITSGFTHRQLNDTRIITKFALAYLKSVFNYVQPVNGMMTDLFKRQWELLDRNEIKDRTNYRHHIVDALTVACVNRGKYNLLCEIIKKSASATHLKIAKPWESFDEDVLSAVQYVIPKHFVDDNSLRQSKKLRRERGGKPCLKNGKKVYIKGATARGSLHQDTFYGCIQTPPEKGEESKKIFVLRTSCDKLSKDSADKIIDKEIRKVFLENIESGKQSISDIQEKGILLPIRKDGKEIYVKKVRLKVRVADPLILKQHAEKSLRKEREYKQNYYVVNDENYLIALYRGIDKKNKMVTDYHVLNLLEAVSRKHREEALYPNTIDKNGTVLPLYRVLKIGKIVIMQENKEEDVFALSREQLFSRLYRVAGIASKPDGRIKFVHVMIASPHSTNGESFDNNIDKFKRISNSQLFCLVEGIDFIITPTGEIVRK

SEQ ID NO: 16379 - protein, 945 aa, unidentified
  REGION 1..945: note = Cas Enzyme sequence
KSKHSFHFEDIAKKLKGKNEYWKFNYRNDTNVSGCSVATHLQEIFGESWKDVVIGQYDIFDIWHVLFDFDDDDKLCDFARTKLNLDEERANKFCKIHLPQGYGNLSLKAIRKILPFLRKGYLYSHAVFLANIPFMIGEKEFEENSIVIEDSIKEIIGSLNKRNNVLIIANNCIDRVFKDKQYDFHSEEWDKSIIDTQLVDFYGKKKWDNLSAKEQGNIKMEVEGKVEDVLKIATTRNPNDYKYQMLRTDNLIEEYLIENGFSIKKNIKLYHPSDIDYIFENPIILDDGKKMLGSPRTPSVKNPVAMRAMFQLRKLINYLIATGEIDSSTKINVELAKEVNDKNWRKAIAEFQKENEKKNEGYRKKLMESGYEPSETNVKKYRLWKEQQETCPYTGEPIRIEALFGAQPLYDFEHTIPRSMSYDDSLENITLCQAEYNRNVKKQCIPSELPGYDEMKLRFMKFYEKDIDACLATIEKNKVRGYMDPATKDKKIVARHIAELKLRYLKGKIKRFTALEITSGFTHRQLNDTRIITKFALAYLKSVFNYVQPVNGMMTDLFKRQWELLDRNEIKDRTNYRHHIVDALTVACVNRGKYNLLCEIIKKSASATHLKIAKPWESFDEDVLSAVQYVIPKHFVDDNSLRQSKKLRRERGGKPCLKNGKKVYIKGATARGSLHQDTFYGCIQTPPEKGEESKKIFVLRTSCDKLSKDSADKIIDKEIRKVFLENIESGKQSISDIQEKGILLPIRKDGKEIYVKKVRLKVRVADPLILKQHAEKSLRKEREYKQNYYVVNDENYLIALYRGIDKKNKMVTDYHVLNLLEAVSRKHREEALYPNTIDKNGTVLPLYRVLKIGKIVIMQENKEEDVFALSREQLFSRLYRVAGIASKPDGRIKFVHVMIASPHSTNGESFDNNIDKFKRISNSQLFCLVEGIDFIITPTGEIVRK

SEQ ID NO: 16380 - protein, 1258 aa, unidentified
  REGION 1..1258: note = Cas Enzyme sequence
MKVLGLDIGTNSIGWGIVDETEHKIIKCGVYIFPEGVKKEKGNESSKAAERTRYRSARRLKFRRKLRKYETLKVLIKNQMCPLSLEELELWRKEKIYPSSNDFVKWYRTDENTNWEPYFLRKKCVEEKAEKYEIGRALYHLAQRRGFLSNRKESTKESDGKVNESIKDLSEELGDKTLGQYFYELKNNGEKIRARYTSRKDHYEKEFNRICEIQSISDELKKELYNAIFFQRKLKSQKFLVGKCTFETNKPRCPISHFEFEEFRMLSFINSIKVAKNSTENDMQEMKFLSSSEKEIIYPLFFRKSKKTFDFKDISKKLKGKNDNWKFNYRDDTTVCGCPVSSHFIEIFGDGWKDTKINQYDIFDIWHVLFDFDDEEKLKDFAINKLQLSTVQTEKLCEIHFQQGYANLSLKAIRKILPFLRKGFLYSNAVFLANIPSMIGSDVFEKNRELIENEVLNISKTLKEKNNIITLANLCMEKIFKDENHNFHTEEWDKTILDLQIKDFYGLKKWNDFSAEKKEEIKNTVIEKIDETLKLATTRNPNDYKYKLLRTDKLIEDFLLENGLSIKKGKKLYHPSETEYCFEKPKISEDGKRCLGSPRTPSVKNPVAMRALHQLRKLINYLIETNEIDGSTKINIELANEVNDKNWRKAIEEFQKKNEKLNDEYRKRIEDFYKEVGVIKEITESDIKKYRLYKEQEIKGTSICPYTGKSINLTDLFGATPLFDFEHTIPRSISYDDSLENLTLCDSNFNRNVKKQHIPSELQNFGEINERFQKFYEDKISDCLFIIEKNKTKGGYIDPVVKDNKIVKRHIAQLELNYYIGKLKRFTADSYKVTMGFKHSQLNDTRIITKFALSYLKSVFEYVQPVNGSMTDLFKRQWGLLDRKESKDRTNYKHHIIDALTIACVNRGKYNLLCEIIKNSSDGKHIRIPKPWEDFDSDVLKAVEYVIPKHFVVDNALRQSKKLLKDRFGKPIIKNGHVVYKKGNTVRGSLHKDTFYGCIMTPPEKNIPSEKIFVQTIDCGNLDKSKAEKIIDKGIKRAFFTNLESGIQSLVEIQNNGIKLPYKLNNRDVFAKKIRIATRLSNPIIIKKHKDISEKEYKQNYYVVNDENYLIALYRAKDKNGKSISEYSVLNLYDAVSKKKNKEALYTNKMKKNNYDLSIYKVLKIGKIVILQEEENEDVFTLPNEQLFSRLYRVSGIASKPDGRINFVHVIISSPFSINKEVFDNGIEKFKRISNSNLYCLVEGKDFIISPIGEIIKK

SEQ ID NO: 16381 - protein, 1050 aa, unidentified
  REGION 1..1050: note = Cas Enzyme sequence
MNRSYGLGLSIGIGTVSYTVLSQIKDTNNIIDNDVRIEDIGVRMFETGETPDHKNSLNQDRRSYRASRRLIRRRKHRKERVKHFLERIQFINYDKYRTWKKIFNPNIFQLKYDGLSKKLSPEEIFAIIIHFCNHRGYKDFYEEDATTINEKERGKIKTALSNFEKIYKDNGYISVSEMILKDPIFLGKGNYPDYHNHAIKNKQDNIEPRFFLIKREYLRKELINILKKQQQYYSKLTDKRINFICDNIVFIQRDFEDGPGDKKDSTRKYMGFLDSIGNCIYYKNEKRAFRTTIISDIYSLINQLSQVYFIDKNTEEISFSKEAANEIIDYVLINASLTEKDLKNILKKYDLILNKPGNLKLKINDCLKALKILKNTLEKCGYDYTSLIKEEQFNLEQPSKLQKLCILLSKNITPKRRILALQKAGYNKELQQEMIRKNFSSTANVSEKYMIQAIEAFKHGENYGNFQARMFKDKYNNITKKEKHLLLPSLTLKDDEDIVKNVVVFKAINETRKVINALIRKYGSFKYINILASDELGHSIQERKRIVKMQNKNRKETQNIRTQILELGLKKEDEITTQDIQRYKLYQQQNGIDLYTGSIIPENEILGTNYEIDYIVPFSLILDDTLNNKVLTKISINRITKNTKLPLQFLENEALDFYKKTVTTLFNKGKISSKKYNYLLLPILNEEILSEWKSRNLNDTRYICKFITNYISSNLIFDSNKKKNVYAIKAPIISKMRKIWLNKKTWGAKELDKTNNLYHAVNALVAANLTPAYVEIVYDNIRLQQIYREHHKTISNEYIDYLNKSINKMQKYYGFSIEYSQKLLRSLGKVPAILKNIWAEADIRLADNTIEYYKDIDDERFRQNICSFYQDKEFAESVQKVIVSYKSYKKFQGKITDDNPLPLSKNKSSYIKKMNNILNANKYYCIEVYKTIDNTINLRGIRFIDLIRKKGKLKLVIDNPIDYKHHIMYLFKNDYVKVYKNNKLLFKGYYKSVGNINQNILMFKIDNSSINTLKFIGKQYNIKKYDVNILGKLGGEIKCSVPFMFHKGNN

SEQ ID NO: 16382 - protein, 1066 aa, unidentified
  REGION 1..1066: note = Cas Enzyme sequence
MFMGKVLGLDIGVSSVGWGIIDTDSMEIIDAGVRLFEEATRNANEERRGFRGARRLKRRRKHRLERTKKLFEEYGIPTNSIGTGKPYEVRCKALKEKVSLEELAIGLYHIVKRRGTVLDAPLEEETTGGELSTKEQLKRNSKELETKYVCEIQMERLQKGLVRSHENRFRTEDYVKEAKAILNRQAQFYQEINDEFIEKYIDLVQRRRAYYEGPGSKKSPTIYGRFFIKNGELQEMSMIEKMRGKCSYFPEEPRIAKMSFTAELFDLLNGDLNKLRVNGEYLTEEDKVYIVEEIVKKGQKVTIDRILKYKGLPKDTYVVGYRVDLKKNQPTFTEFKGFKRILKAVKENDLPKEILDNVELLDEISEILTAEKSYERRENNLKKALEKYTAFDENTKNKIINALKEVTEFKGYHSLSKRAIQLILPDLWKTNKNQMELFSELGLEGKRYKNISNGKNIKFDDSAILSTVAKRAHREAIKIVNKVRQVYGELDSIVIETAREKNSEEAQLRYKDFQKKQGKFEKKMAELLGVSSLKELNLSPKQYLALKLWDAQDGQCLYSKNPISLHDIIRDFSKFEVDHIIPISISFDDSQENKVLCYREENQEKGQQTPFYYLTSSPKAKRTFEEFKADVFKLYTSGKISNKKMEYLLEQRDIMNNEELQKQFINRNLVDTRYAVRSFSMNLRSYFKHHNIPTKVLSIRGGFTAAIRRRANMNKDRDSSYAHHAIDALIVAAIGKLRVFQFFQNFGMNELGVFYDRRTGEILTEKEFFGEEMFKFIRNLLNYESKIKYSHKVDRKGNRSISNQTIYSTRIVNGEEYVIGKSGNIYALNKKDAESLIKRIKDKPETFFIAKHNPELFELILKIIKEYGKSENPFKAYYNEHGYIMKDGKVPVKFLRYYDEKLGVHLDISKKYPNAKNKVVLKSIKSVRIDVYKNNEGKYKYLGVPYHWFKDDGNKLVLNMEKYNREKKKPYKNIDSSYEFQFSLYRNDQFSIEKNGQTLEYILLGDANPRQNKIEADYVYKSKQKGDKRIILTIGPTIRNITKYNVDVLGNKHKVQKEEFRNTLQK

SEQ ID NO: 16383 - protein, 979 aa, unidentified
  REGION 1..979: note = Cas Enzyme sequence
RQMRRRTAARKYRRDWLKQQLEKHGFTLPNNTDKFEHPVILRNNAVRGQKLDSAELHIALQHLFKKRGYEYEVPWANVQEDIKGKKDEEITGEKVTAERLEKEGFDYPCEKLFNILQKMAKLKKEGTPEDRIIGFNFERKLIEKEYRRIIETQKKYYPQFDNIVETSKDKITLEDWLLYGNCQIIKVGVNKIPVYDKKTEKDRGVLGIRFAHIYNRALGLDIDSPLDDEGRVLHRIKKSKDIYKRFQFEVAIRNFRVIDAKGNKVIPPKEILEKIREEFNKSKNKQGRNLSVSKLEKILKGTEYKLVEGQNDLNAKSPGDRSSFSSVTLKKWAEITRQGSVPYDNPQPLLRRGGENWETASKRYLNDMAFPLGKHRLEYYIRLLDGLIKKYGNPEFVVIETIRELTLGDKARKEIIKKQADNKLLRDKARDFWAEAGIANPGNPRIRLKRLVEENGWHCPYCQKKIEESEVINDEIELEHIVPQSEVVCNEIFNLTAAHRNCNKKKGEMTPYEAFAHTDKWSYIFKHAQDHYMRKTPKRIETTLKFRLFTEPNARELLRDKYNSPLTQTAYITKAARALSLIRMNWLTADGREPTIEKGNPASMKFMSTNGATTALLRRNWGINDVLWDLYPESDANIKSKKVRLDVRNHAIDAMVIACTFPPVARFMSSSQAEGYWIQDKDGKPQAINSFDINYDTVKNELDKIKVIPYVPNKRHASHYDSTLLGKRKIIISSKTKQKEEVRFYKRVPVVGSHLKEKQIENGDIYPQALGEYIKTAWRKFKSENENCVFEKTKEQFFNKLCFSHFQRWRALGENMEVENFKWPVKVKIPIRNVRIQSQKNEDAVMEIRPKTYVARTGYKGLAIYKTLEGKRIGIYVPYWKTDAIYEQECKKIPKDSKLLIVLRTNMAIKLKKAITDKKNWAWEEFKIVGLGGPRKNPQINLMPLIFIAKGNEIELVLGAERTSNLKITLNDLLDNLLI

SEQ ID NO: 16384 - protein, 1113 aa, unidentified
  REGION 1..1113: note = Cas Enzyme sequence
MGYIFGLDIGVASVGVAVINNQTLEIEEVVSDLFESADASKNVERRSARQSRRLQRRRKNRVSDFNRLWIKSGYDIPEDNDENILLLRNEGIKKALSEKELYYVLRYMLQHRGISYLEDALGEEEVKGSYQKGIALNQKESENLLPCEIQQERMIRYGQYRGQYEITEEDGSKVTLSNIFTTSSYIKELNKLFEVQQKHGLVNEEFVNQYMEIFRRKRKYYEGPGNELSRTDYGKYTTKKNDDGKYITEKNIFEKLIGKCSVYKNEFRAAGASYTAQEFNILNDLNNITVDGKKLSKEQKVSIIESIKSANRVSVEKIIGDCIGNKKPFIEGARIDKNGKHIYHSFEQYNKMRKAFELINFDIAELSVDELDEIGRILTINTEKEGIEEAFKESKVSLTEEQINVLVDLRRKNSLAFNKWQSLSVKAMRELIPDLYERSVNQMVLLTEKGIFKEKENEFAKSVYIPKEIIISEIYNPVVKRSVSVALDALNALIKKYGYPDDVVVEMPRDKNEDEQKDRIKKFQKNRENELKEIKNKLKQEYNIELTDEYFRKHKGLELQLKLWVEQEEKCPYSGKYININDLLYHHDMFEVDHIIPLSISYDDGRNNKVLVYREENQSKRNNTPMTYLANVNRDYDMHKFMDYVLKNKKFPPKKKSNLLYGEDITKIDVVKGFINRNLNDTRYASRSILNAIQLYFSSRDCSTTVRVINGTVTHQLRNRLKLEKDRDKSYSHHAIDAAIICYTQLGLLKFKEIQSRFIDFDNEVYKEADIQSCYDEKYYDEALFSQVLKIRNNLKKAEGDSQTTVRSRGIYAESEKNNGIVKYHHRVDKKANRGLSNATIYGTRNINNKIYKIVSYDIRDNKDVDSIRKIIAGGKQEYFLMYKNDPKTFEMLMSIYEQFNEEKNPFVAYEQETGEKIRKYSKKHNGPVIKKIKYADSEVGSCIDISANYGYNKDDKKVIMDTLKPYRADLYYNRRNNNYRIIGVKYADFKFVKGRYILDEASYEDILVKEEILKPGMKITDLESEGYEFRLSFYKNDIIQYEKDGDVYKERFLSRTMPKQKNYIETKPIVAAAYEKRIPIGLTKAKNIGKIYTDILGNEKIVYKERFKLSID

SEQ ID NO: 16385 - protein, 1113 aa, unidentified
  REGION 1..1113: note = Cas Enzyme sequence
MGYIFGMDIGVASVGVAVINNQTLEIEEVVSDLFESADASKNVERRSARQSRRLQRRRKNRVSDFNRLWIKSGYDIPEDNDENILLLRNEGIKKALSEKELYYVLRYMLQHRGISYLEDALGEEEAKGSYQKGIALNQKESENLLPCEIQQERMIRYGQYRGQYEITEEDGSKVTLSNIFTTSSYIKELNKLFEVQQKHGLVNEEFVNQYMEIFRRKRKYYEGPGNELSRTDYGKYTTKKNDDGKYITEKNIFEKLIGKCSVYKNEFRAAGASYTAQEFNILNDLNNITVDGKKLSKEQKVSIIESIKSANRVSVEKIIGDCIGNKKPFIEGARIDKNGKHIYHSFEQYNKMRKAFELINFDIAELSVDELDEIGRILTINTEKEGIEEAFKESKVSLTEEQINVLVDLRRKNSLAFNKWQSLSVKAMRELIPDLYERSVNQMVLLTEKGIFKEKENEFAKSVYIPKEIIISEIYNPVVKRSVSVALDALNALIKKYGYPDDVVVEMPRDKNEDEQKDRIKKFQKNRENELKEIKNKLKQEYNIELTDEYFRKHKGLELQLKLWVEQEEKCPYSGKYININDLLYHHDMFEVDHIIPLSISYDDGRNNKVLVYREENQSKRNNTPMTYLANVNRDYDMHEFMDYVLKNKKFPPKKKSNLLYGEDITKIDVVKGFINRNLNDTRYASRSILNAIQLYFSSRDCNTTVRVINGTVTHQLRNRLKLEKDRDKSYSHHAIDAAIICYTQLGLLKFKEIQSRFIDFDNEVYKEADIQSCYDEKYYDEALFSQILKIRNNLKKAEGDPQTTVVSRGIYAESEKNNGIVKYHHRVDKKANRGLSNATIYGTRNIHNKIYKIVSYDIRDNKDVDSIRKIIAGGKREYFLMYKNDPKTFEMLMSIYEQFNDEKNPFVAYEQETGEKIRKYSKKHNGPVIKKIKYADSEVGSCIDISANYGYNKDDKKVIMDTLKPYRADLYYNRRNNNYRIIGVKYADFKFVKGRYILDEASYEDILVKEEILKPGMKITDLESEGYEFRLSFYKNDIIQYEKDGDVYKERFLSRTMPKQKNYIETKPIVAAAYEKRIPIGLTKAKNIGKIYTDILGNEKIVYKERFKLSID

SEQ ID NO: 16386 - protein, 1158 aa, unidentified
  REGION 1..1158: note = Cas Enzyme sequence
MKSIWSFDLGIASIGEAVRNLSDDSFPHKASFLLPEEFGETKTASLRRRMKRTRDAHKARESWLNAVWEAAGLEILTGRQVTFLNGKWSPASESQKQKDYRSLLQREFPRKGESICYNSALLRIKLLRGEKLEPWQIYKALWSSIQKRGYGLVPWANRELGKKELTLEEAEKLQKKQDDELAKKDPAYRHTLEAWPMFKREVPKDFHFPCYYNAFKMGLWHPSMPDSFGERITCHATSTRNVRFDRIDVEREAELLARNAAAQLPQLASLLTKIKNDGWLASDSKAGKEKNFRVFAEDFGEFFVHGPAGAKSLAARNDFSAYLAFLKNRGIHPGAKDEWMGATAQKTPRFDNRIINDCALLDGLQVCNVAVRYDSKNNRPATDSLLATEVTFLMKLKNILVHGAGGQRKLTAAEIGTIFSTISAKAVAKDSSLKDYSTSVINCFALTASAWGKAEGIKKLTLFPLPGHEVVRSPKTEGRSRFSRPALRLLRALILGGAKPSVFHQRLLDRDPALLDEIGMDVLDAEPVRITNGAKNFTKQPRPWVLAGQLKFLSDLSRTNDTWEGIYIPEQRLDSLEARHSDEDGNVARDAAIRELIGSVNDPVVRHRLGVFSSRLATLQKEFGQPEEIVMEFIRTDFMGDKAKRDLATFQKKREEARSAAIQQVGKTDAIKYELAAAQGCSCIYCGAGTGMTGLDSFEREHIVPRSQGGPDAMVNYALACRSCNEKKGERTPFQWLRHEDSWDAFESRVNSRATELRNKKVQLLLREDAPDLVQRYTALAETAWISRLAQKIVWLHFGWRNGIDGEGKKRVTIISGGLTGRIRRKYRLNSLLSPCPEGEDPMAWEAKADIPKNRKDDRHHALDAMLINFLPQWSRDARKQHFFRFPDAIQANPQAFFRREIDSVTPCNIAFEKPALADTIYGARQDAGGKVIVQRVLLFALGMQSVGQSKVAFNAKYLAAQSKTVRDPRIVAEINRYLAEEDHSEASWKKFCDTLHLPQKDGSKGPRVIKVNVTAGTPSEYIDMSKDLSGAYRKGKKGHRGQIIYLLRKKDKKGAIKETVCVRPVYAFEARHQAEKSLREEHGDAITIYGFFQSGCLVSVDAEVEHDTLKLPAGVYVLNTIILPGTVKLTNQQGKTYPDIPKYSLTKLIAAGLKRLK

SEQ ID NO: 16387 - protein, 1158 aa, unidentified
  REGION 1..1158: note = Cas Enzyme sequence
MKTIWSFDLGIASIGEAVRNLSDNSFPHKASYLIPEEFGETKTARLRRRMKRTRDAHKAREDWLKAVWEAAGLEILAGRQVTFINGKWSPAAESQKQKEYRSLLQREFPKKGDSICYNSALLRIKLLRGEKLEPWQIYKALWSSIQKRGYGLVPWANRELGKKELTLEEAEKLQKKQDDELAKKDPSYRHTLEAWPMFKREVPKDFHFPCYYDAFKMGLWHPSMPDSFGERITCHAISTRNVRFDRIDVEREAELLARNAAAQLPQLASLLTKIKNDGWVASDSKAGKEKNFRVFAKDFGEFFVHGPAGAKSLAARNDFSAYLAFLKNRGIHPGAKDEWMGATAQKTPRFDNRIINDCALLDGLQVCNVAVRYDSKNNRPATDSLLATEVTFLMKLKNILVHGAGGQRKLTAAEIGTIFSILSAKAVAKDPSLKDYSTRVINCFALTASAWGKAEGIKKLALFPLPGHEVVRSPKTEGRSRFSRPALRLLRALILGGEKPSVFHQRLLDRDPALLDQIGMDVLDAEPVRIANGAKNFTKQPRPWVLASQLKFLSDLSRTNDTWEGIYIPEQRLDSLEARHSDGDGNVARDAAICELIGSVNDPVVRHRLGVFSGRLAALQKEFGQPEEIVMEFIRTDFMGDKAKRELAAFQKKREEARSAAIQQVGKTDAIKYELAAAQGCSCIYCGAGIGMTGLDSFEVEHIVPRSQGGPDAMVNYALACRSCNEKKGERTPFQWLRHEDSWDAFESRVNSRATDLRNKKVQLLLREDAPDLVQRYTALAETAWISRLAQKIVWLHFGWRNGIDGEGKKRVTIISGGLTGRVRRKYRLNSLLSPCPEGEDPMAWEAKADIPKNRKDDRHHALDAMLINFLPQWSRDTHKQHFFRFPDAIQANPQAFFRREIDSVTPCNIAFEKPALADTIYGARQDAEGKVIVQRAPLFALGMQSVGQSKVAFDAKYLAAQSKTVRDPRIVAEINRYLAEEDHSEASWKKFCDTLHLPQKDGSKGPRVIKVNVTAGTPSEYIDMSKDLSGAYRKGKKGHRGQIIYLLRKKDKRGAIKETVCVRPVYAFESRHQAEKSLREEHGDAITIYGFFQSGCLVAVNSEVEHDTLKLPAGVYVLNTIILPGTVKLTNQQGKTYPDIPKYSLTKLIAAGLKRLK

SEQ ID NO: 16388 - protein, 1158 aa, unidentified
  REGION 1..1158: note = Cas Enzyme sequence
MKTIWSFDLGIASIGEAVRNLSDNSFPHKASFLLPEEFGETKTARSRRRMKRTRDAHKARENWLNAVWQAAGLEILEGRQVTFLNGKWSPAAESQKQKEYRSLLQREFPRKGESICYNSALLRIKLLRGEKLEPWQIYKALWSSIQKRGYGLVPWANRELGKKELTLEEAEKLQKKQDDELAKKDPSYRHTLEAWPMFKREVPKDFHFPCYYDAFKMGLWHPSMPDSFGERITCHATSTRNVRFDRIDVEREAELLARNAAAQLPQLASLLTKIKNDGWVASDSKVGKEKNFRVFAEDFGEFFVHGPAGAKSLAARNDFSAYLAFLKNRGIHPGAKDEWMGATAQKTPRFDNRIINDCALLDGLQVCNVAVRYDSKNNRPATDSLLATEVTFLMKLKNILVHGAGGQRKLTAAEIGTIFSTLSAKAAAKDPSLKDYSTSVINCFALTASAWGKAEGIKRLALFPLPGHEVVRSPKTEGRSRFSRPALRLLRALILGGAKPSVFHQRLLDRDPALLDEIGMDVLDAEPVRITNGAKNFTKQPRPWVLTSQLKFLSDLSRTNDTWEGIYIPEQRLDSLEARHSDEDGNVARDAAIRELIGSVNDPVVRHRLGVFSGRLASLQKEFGQPEEIVMEFIRTDFMGDKAKRELAAFQKKREEARSAAIQQVGKTDAIKYELAAAQGCSCIYCGAGTGMTGLDAFEVEHIVPRSQGGPDAMVNYALACRSCNEKKGERTPFQWLRHEDSWDAFESRVNSRATELRNKKVQLLLREDAPDLVQRYTALAETAWISRLSQKIVWLHFGWRNGIDGEGKKRVTIISGGLTGRVRRKYRLNSLLSPCPEGEDPMAWEAKADIPKNRKDDRHHALDAMLINFLPQWSRDTHKQHFFRFPDAIQANPQAFFRREIDSVTPCNIAFEKPALADTIYGARQDAEGKVIVQRVLLFALGMQSVGQSKVAFDAKYLAAQSKTVRDPRIVAEINRYLAEEDHSEASWKKFCDTLHLPQKDGSKGPRVIKVNVTAGTPSEYIDMSKDLSGAYRKGKKGHRGQIIYLLRKKDKRGAIKETVCVRPVYAFESRHQAEKSLREEHGDAITIYGFFQSGCLVEVNSEVEHDTLKLPAGVYVLNTIILPGTVKLTNQQGKTYPDIPKYSLTKLIAAGLKRLK

SEQ ID NO: 16389 - protein, 1247 aa, unidentified
  REGION 1..1247: note = Cas Enzyme sequence
EANQFLHVAALLLPPDLARRGRADQTGTPASRYRAWKVRLAHRERERWLDTVWQAAGLTPLQKREVWRNPATGRWELKHPADYRLEREFAPALGEKTKDGAPSDAAGANLCYTSCLLRIKLLRWKRGDPPLEEWQVYKALRSAMQKRGYGRVPWAVKQARAQGKTPEELEAEEQKQLEQADPRYREAAGKWPEFKRAVPAEFHFPCYYDAFHMGLWSPDQPDQLRLRLDHRAASTRNVRFDRADVRKELIALGNNAAAMLPQLQQAFERWQRDGWTFRHPVTGKALTKPVHARTFGEFLCDGPAGQPDETSFEAFLNQRREAGIRIGTFEEWMAALGQKTPRFDNRILAPCVLIPRYHACKVYARLEKDRAGRLTGKLVPDSLLASEVTFLLKLKNLLVADPVKGQRKLTVEEVRDIFAFAQRRLKTLPLFTPEGEPAKEWPSKVANCFAINPSDWPKIAVETECLKGLARLTVSDNGAPRPLTREEAEALLHAVAGGRRAAQTALPAHLLPLVKRAAAAWKQAKQQAGEIMLRPLPGHEEVKAPRTSGRSAYSRVALRILKELILSGDAPSAFHARLVRRDPDLLQRLGPAPGQPLAIFDDSTASNEAQRKQHDAENRKRGLLVSELNFLLQMRKDDGSPDSWENLFIPAQTLEALQQRHTEDGRLDADAAVRELLGTIKDPLVRHRLGVFDERLRKLRFGDARKGLRGFGVPEAIVLEFVREDFMGEQAKRELQTFQKRREQARAEAEAEAAKLGLESRSSALRYELFKAQGGICLYTGRPLSETQLDQYEIDHIVPRSLGGPDAMVNYVLTFPEVNSAKEKGKLTPYALLHGTDGWDAYVARVKARAAALRNKKVQLLTREDAPELVERYTALAETAWISKLAQTIVNLRFGWRNGVDYSGPQPVKRVIVVSGGLTARVRAKYGLDKLLYGENTPPEVLAKKVKNRDDDRHHALDAMVMTFIPHWARDPNKQGFFRFPPAFRDANGREDYQQIQSLFARQLEKIVPRHLAYEPCALADTIYGRRLDKGEPVIVQRVPVRELAYKQEQQRPVFNLTYAKDQIAHLRDPRLRRVLEALVATGPDQVAWDNYCRALAAGTCPELPGRKVLKVTLNRDEDPAEFKDLSKDGCGAFRTRKGEHRGQFVYLDARGRVRVRPVRPFESLVAVKAEVERLAAGGRLIGFFQSMCPVELDQPVTHGNFVLRPGTYRLNTIKKDGRAQVTTAAGEKTPQINLAKLVAAGFRRIA

SEQ ID NO: 16390 - protein, 1063 aa, unidentified
  REGION 1..1063: note = Cas Enzyme sequence
MNHQETVWAFDLGKASIGEAVREGNKFLHKASLLIPAEFAETKTAASRRRMWRTRQAHKAREAWLDEVMRAAGIEPLPGRQIGKVDAQGKPIPREQWKKANGKWAIIAKGDERLEREFAKDGDNTCYTSCLLRIKLLRGEKLEPWQIYKAFHSAIQRRGYDPNIPWKTREQRRSEKPEDDEGKTLKRMTDFEEELKQMANGKPEYQWPCYFDAWKMGVWNPDKPNELKLKQDCQAQTTRNQIVPRTLVEKEVRALVEAAAKQIPALKGKADFLLFGPPQKAYASFYAEERKTHGLREGGANDWQGVVGQKIPRFDNRIIGKCVLIPRLNVCKIRKGDDGKLHPKAVIAAEVVFLMKLKNMRFQVARTVRGLSAKEITDIFTDPKRQKLGLTPTQWKKWCRGFGGDPLPGQHEEVAEPNFSGRSRFCRPALELLKRLILSGDTPQQAFEKECARLNGNTNPLKGLVEDDLRFLTKMGNTWEGIYIPNQKLDTLARSTEDKHEAIRQLISSQNDPIVRHRLSLFAERLNELAGKFGTPDFVVLEFVREDFMGRKAKREYFKFQRDRAAQRAKAREEAAKAGASEGAAGLKMELIEAQGGICLYTGEALVPTSLDEYVIDHIVPRAKGGPDSAMNYVLTTRRANDDKLDRTPYEWLSSTPGWAAYIERVKKRISTLRNKKAQLLTAPDAETLVQKYTALAETAWISKLAQTIIGLRFGWPGGIADGKRRVIVVSGGLTGRIRRKYKLNSLLNPDAKDEEEAEKKNRGDDRHHALDAMVISFLATWARDDRFTGFFRFPDGINRDLFGKEIAEVTPQNVCFETPALAETIYGARNDHGEKTIIQRAELVSLAMKPTAPGKTTFDLKYAVKQAQSVRDIVIRERLLEFLAGKPDEASWRKFCAEFHLKRKDGTPGPRVEYVRVNVGEPTEYKDMSKDGTGAYRKALKGHKGQIVFTLTNVDKKDDKKETVEVRPVYAFEAYAKVAAALKQQFGESMQIRGFFQSGCMIEVTSEVFHAQKPLPPGNYLLNTILTDSKAVKITSADGTTYPTIPRYSLANMLKAGMRRAT

SEQ ID NO: 16391 - protein, 1025 aa, unidentified
  REGION 1..1025: note = Cas Enzyme sequence
MLHLLIQSSYLEAGKETQDRLKKMDPYQLRYDALRRELTKEELSRIMLNLAARRGFKSNRKITPQKAEQLKEEKGLKGKIQTLEKRLSGKTLGEYLYELKVKLQGEKGRSIRFKPETSEFYPSREMYEQEFKAIKSIQLKIHPDFPWDQAFRTIFFQRPLRAPERGKCRFYTDKYRAYSCLPGSHRFRITQEVNNLWYFNEQGKEVPLERTQRQKLYELLEQKEELSFDQIRKVLNIDSKFNIEDERRTRLKGNSTGVTMSKIMKEKWNTLSWEDQDTLVEKIVTETNEDAVIQYFKSVGIPEKTTRQLLDIDFSVGVGSLSIEFMRDCTRIMREQNCRYDEAVRKLGLHHSDQRPEPSLSELPYYGQVLPETTSFKKENASTDEQRYGRIPNPTVHIVLNQLRKLINALINKYGKPNEIAIEVTRELKLSRKVKEAIRQIQTKNQKENKRIELKLKEIFGSSYRLTPIDRKKYILWEELGKNHLGHLCLYCGKPIGAAQLFNGEVEIEHILPFSRTLDDSMSNLTVAHKHCNAKKGNQTPFEAFGSASGPYAWNLIVERIQILPAQKKRKFSEHALEQYQKETDFIQRQLTDTAYISRIARKYLSYVCPFDSIWFVPGSLTGIFRAQWGFNTILNHSKQEYVKNRSDHRHHAIDALVIALTDRALLQKAAHQNANPYKYKYGVEAPPAPLDRAQIEEKLLHVLPSIRPDHRKTGQLLLETAYGYRNVVFEIPIQEIDLQTELDCIVDRTIREKLQKAENKREMMKNLATEHRLVRIVRKAFVARKPLKNLTMNEIAKGLIVDPCIRKALYSFLQQKYPTILNSNSNSDDVDSSKTSKKELETALRDFSERTGIRTIRYVNKNQEGLFQPQNQNKWYQYGDTAFCDIWAIPDKKGTFRYEGVFFNRLQWLLLEKNSKPYPRPSHPAAKKLMRLFKNDIIALEHSDGPVYCRIAGFSTTQNKFDIKPIFSATEDVKEWIEGTNTNFVHSYWKPKRGHYYVSINALFNAFRVHKTTLSILGASRYRY

SEQ ID NO: 16392 - protein, 1023 aa, unidentified
  REGION 1..1023: note = Cas Enzyme sequence
MPFRYRLALDSGPTSLGWAVFRLNPQNEPVALVVSGARIFSDGRNPKDGASLAVARRLARAMRRRRDRLLKRKSKLIVALIRHGFFPEDTQARKSLERLDPYSLRAEGLDRALTPHEFGRALFHLNQRRGFKSNRKTDQREADSSVMKSAITGVRTALAEGGFRTVGEWLHHRKRQGQTVRAKFRAQRTTTEAGRARIEKSYDLYIDRAMVEEEFDALWARQAELNPSVFHEQARTELRDVLLFQRRLRPVDPGRCTFYPDEARAPLALPSVQRFRLYQELNNLRWLDDGLQEQSLTLAQRDAMVQVLETGVRRTFQQLRKAAGLSSDATFSVEDVKRQELKGNSTSVVLAKKQHFGSRWAQFSEDLQDEVVERLLTEENESVLIAWLQAHTEVDEAQAEAIVNVALPEGYGRLSSKAIRQILPELRKEICTYDKAVIAAGFEHHSLLGARATGEILSSLPYYGTVLQRHVGFGTGRPEDSEERRHGRISNPTVHIALNQMRVVVNELIRRYGHPAQVVVELARELKQTWEEKRETERQQAANQQRNTRYRQEIAAVLGISAEQVKRDLIEKRILWEELNPADPLKRHCPYSGVQINLQMLLSDQVEIEHILPFSQTLDDSLNNKTVSLRSANRAKGNRTPWEAFGKQESAGFRYDDILQRAQVMPRNKRYRFAPDGKEQWLKNDKGFLDRALNDTRYLSRLAKEYLEFICPQDTWVIPGRLTGMLRRVYGLNSPDILGWQGQKNRDDHRHHAIDACVIGVTDRSLLKKVSDTSARARDQLQGRLLQEMPLPWPSYREHVKRVVNGIWVSHKPDHSYEKAMHNDTAYGLLPDGYVRVRKEVDGVRRRQPEKLKVIPVASTKAGERHGFLPDGSPRPYKGYKGDSNYCIEIVRDDVSGKWLSEVISTYQAYQVIREHGREEGWKRLRNPRHALDGRSLVMRLMINDVVRLEHEGGLRTWRVVTISGNGQIFFADIHEANVDARNRDKSDPFSYVSKMAGSLQKSKARRVTISPGGRLSDLGFTP

SEQ ID NO: 16393 - protein, 1018 aa, unidentified
  REGION 1..1018: note = Cas Enzyme sequence
MLPKMRYRLALDMGAASIGWCLIRLDLQHKPIAVIRMGARIFSDGRNPKDGSSLAVTRRDARQMRRRRDRLLKRKARLIAALTRLGFFPQDENQRRALVTLNPYALRKKGLYEPLSGPEFARALFHINQRRGFKSNRKTDKKDREHSVLNQAIAELREKLALENCQTLGEWLANRHEKGDSVRARLRGKTQKDRAYDFYADRAMIAHEFDALWAKQSHFNAERFNESARAELKDVLLYQRRLKPVRPGRCTLLPGEERAPLALPSVQRFRIYQEANHLRILGENLTEQPPLSLPQRDQLVSLLESGKNATFKTDLRKLLNLPPRTRFNLEDGKRDRLKGNATSAVLAKAEHFGERWHAFDLTMQDEIVEKLLDEASLSSLTAWLQARTGIDADRAEAIANAGLPEGYGNLSRAALARILPPLAGEVIVYSAAVARAGFDSHSALSHARQSGEIMDALPYYGVPLRRHVAFAKDNPRNDEERFGKIANPTVHIGLNELRKVVNALIKRYGHPSEIIVEVARELKLGRERKKQIHEEQAARQKLNDLHVTEACAVLGLTPDHLDRAKRRELSQKMQLWVELNPDILDRRCPYTGEPIGIARLLSSAVEIEHILPYSITLDDSLNNKTVCLRRANRDKGNRTPYAAFGEHPAPGYDYAAILQRAAHMPPEKAKRFAPDGYAHWLKENPDFLARALNDTAYLSRIATEYLSLICPPNQVRAIPGRMTALLRRQFGLNKNRNDHRHHALDAAVIGVTDQGLLQRFAKASASAREKQLDRLVEETPLPWPNYREHVERALRHVVVSHKPDHGYQGAMHEAHAWSLRADGTITRNVKPKNGGPRQREFRKNPDVIVAINSTRDPARHGIGTDGQPRAYKGYVGGSNDCIEIWRDGKGRWTGSVISTFQAYQTIRQWGETAGLQRLRSPEFTQDGKPLVMRLMINDLVRLNTDGGERTLRVVKISGNGQIFMCAHNEANADARNKDKDKADSFAYLSKYPGSLQKAKGRRVTVSAIGDLRDPGFRG

SEQ ID NO: 16394 - protein, 1539 aa, unidentified
  REGION 1..1539: note = Cas Enzyme sequence
GAPAGKPEDFEICYNSAQLRIKLLCGKPLADWQIYKALHASLQKRGYGRVAWANKEALREIKKDANEEKEVQALADKWNAFEKEVKEKLPASNGEHAPFLLPCYYDAWNMRLWDPSTPDTPTGKTDFHALSTQQVRFPRENVEKEIILLANLAAEKLDPLSSFFARVKNDGLIITDTISGQKANDEKYHDGERKRKVKVLAENFGLLLCHGPAGRAFATYAERQEGEELLSFEVISHPDPSKIGKIKNAIAGTPLDWCAATGQKIPRFDNRILAPCALIPRLNVCRVMPKFKHEQNAGKPKQIESKTLLAAEVIFLLQAKNLRLDDHSVRFLDKDELNELIGEARTRVEEALKQDKSEHHILEAYKLTSSQWKKWCVKKNCRALLDGKGAGDEDTAEDENQPDKEIKGKSTDAIKAPHASGRSRFSRPALAILRHLLLESSQGRLPSSILDQVVNGEKTVLDALDMDVLDALPLKDGKKGQFEKRGRPWILKAEVENLRLLWKSAKLDNGTERPYSPSQIHIPDLKLRYIKQKHGLTDKPFSEIFNKKDPEVGNRSDAIYELIREQNNPIVRDRLERFWKRLIAFRAEKELPDPECLVLEFVREDDNSLDSKKRKEAYSDSIKKNEARRDDARKALKTMNIENPTDSQILRFMLWKDQGCKCPYSDAGMGCTQVPDWDIEHIIPRSMGGPDAYWNWVLANPDANAEKGNRTPYQWFHEEKTESEWTAYKNRILNLRKELGSRKTDLLLREDAVSLIGEKYTALAVTSWISRLAQSIARLHFGWPLDDDAGKERVLTISGGLTGRIRRKYLLDSLLGPALPQGSHTEEDPDPATVRRGIDETLEALSKLKKQEGESDAEARLRQETRAGLRQKLIDLARLSEKLRSDKRHHALDAILLTFLPNWARDKKKEDFFRLTEMGDNPIYSDAGRQEKIQCENEIARLYSKNQEVFQKIKEARNGEDEAEFKKLKASVLEVRKRMAQLFETVEKRKQPRNIKAVRDWFRRQLWKEDNTTPNILPRHIAKRKAAIEKTSYSEGYCIQSENQRGDIKLSCLGLRSDFYDESVTVYDRRYLLTQIQAITAIPQDKTAAAHKQLKAYLRNEFTKNGIPDTAEAWQRICQRDEVRDFFPLKSKSPTHEDCLVRLKKIEILMASRPLGSGSIVDIAYGSGSSLVFDLEHLKQNAEKICVRMEKTNPTKGKKGEAEKKTPAPCGSADICPNWTNFRFESRLQEKFRTEKFQEELKQLAEKLPGPKPKDEIKEWKEKCDEWKKHQKEFASKHDISPNIFVYHESADEPKPREKSFWPQVLFRRVERQFSLDTLNKQADKIMHPDLIADLKSFASALKNLSDDKKRDHLWREFCKVWKAVKKGAKDQFIKQHPEPTAEQWVEFFAKQKGAVIRKINQRSGSDLTEYADLSKDGTGQYFKGNNQGYWLAKRKNGGDGKDECRAHPVRFFEAFESVKNRLKDQGWELIDELPWHWGILLNLSEKAGTPKKPVLRGYYCLGSFSNKGATVNLKSCFGEDVPQAISLSSLLEAGLKRA

SEQ ID NO: 16395 - protein, 1350 aa, unidentified
  REGION 1..1350: note = Cas Enzyme sequence
MKLNCEETVWAFDLGKGSIGEAVRQGTRFLHKESLLIPAELARRGPATVSGTPASRYRAMKTRQAHRKREEWLEKVWKAAGLTPLQARKPEYVGYQLRRKKKRVRGKSKWKNVKVGGRWILPPSGKADYRLEREFAPKQIEREGGQLVEVKYPEGKAADGAPAATAEDFGTCYTSCLLRIKLLEWKEGERKLAEWQIYKALRAALQRRGYGRVPWATKEARKQGKSAEELEAEEEKKLQQADPRYREAVDKWKQFKSEVPAEFQLPCYYDALHMGLWRYVPEQQQGHLGYWNPENEPAKPPHGSYRTDHKAESTRNIRSDRTAVRAELTRLGDQAAAMLPKLRDAFARWQREGWKFAHPFQEGKQLTYPIHAKSFGEFLCDGPAGQPVERSFEAFLKQRREAGVRRGSFEEWMAGLGQKTPSFDNRILNGCVLIPRYHVCKVDVRLETDGDGKPTGRLVPESLLASEVTLLLKLKNLLVADAKAGQRKLTVQEVRSVFDFAQRRLRSLALLTPEGELVKEWPQKVADRFAINKSHWQAIAAESELLARVRALTVTSKGAAQPLSTEDAELLLRAVATSKKGASVELPEPMKPLLKAAKAEWKKAKDAADQTLLRPMPGHEEVKAPKSSGRSAYSRVALRILKELILSGEAPSVFHDRLMRRDTELLQRLGPSPGKLLVIFNDSTAADEDQRKQEDTENRKRGLLVSELGFLRQMRKDNTAEDSWENIFIPSQTLEALQQRHTEDGKLDADAAIGELLGTIKDPIVRHRLEVFNQRLKKLQFGDEEEAIPAFGVPDAVVLEFVREDFMGEEAKRELKDFQSKREAARKTAREEAQKSGSTEKSAPLKYELCNTQGGICLYCGQPFSRARLDEYAIDHIVPLGEQGPDAMVNKVLAHRECNEAKGKQTPFQWWHHNTTGKAPTISWDGYTALVEKYRTTLRNKKVQLLTREDAPELVERYTALAETAWVSKLAQTIANLRFGWKNGTDYSGPKPVKRVIVVSGGLTARVRRKYGLDKLLYTEVTDAEVLAKKVKNRDDKRHHALDAMVLTFIPQWARDPNKEGFFRFPAAFRNAEGREDYQTIRKLFQQHLAEVMPRNIAYERAALADTSFGCRLDGGKPVIVQRVAVLDLRQKPAGAPGKTTFDLIYLVKQIQSVRDATIRRRLEEFAATNPDEPKWKAFCESFAQKREDGTTGARILKVCVNAAAPDEFKDLSKDGEGAWRKAKGDHQGQIIYTDADGNLAVKPVYVHASIRQELTRIVQTGGKSKVHCFVRSKCLFRLRKELPQPDYRLVIKNEQKQKRRVQATAPLAPGTFMLNTIITASMDVEFSSAGNQRVVAPLQALLVAGFETI

SEQ ID NO: 16396 - protein, 1662 aa, unidentified
  REGION 1..1662: note = Cas Enzyme sequence
MSKASTIWAFDLGKGSIGEAVREISQEGTKFLHKASLLIPADFAETKTAASRRRMWRTRQAHKARERWLDEVMRAANIEILKGRQVGKVDEYGKPIPQAEWKKKKGKWDVVAKGDYRLEREFPPAKFDRNGKRKLYPNGKAKDGAPAKTDDDFSISYNSALLRIKLLRGKKLEQWQIYKALHSAIQKRGYGRVPWAAKEAARQGMTPEELAKKEQADLEKKDLSYKAAVEAWPKFKAEVRDTNFHFPCYYDAAKMGLWDSATLNLVGEPVPHKARSTRKVRFSKDDVEREIYNLASQAAEQLPQIKSAFAEIKATGWRQDGKEPFPVAAATFAEFLVHGPAGEPTAEAKADFGKYLKFRKQCGIHPGSNADWMGATAQKTPRFDNRIVQACALIPRLQVCRIAPRWRATANGQKQIDPRSLLAAEVVFLLQLKNVQVDDPNESLLRFLKPSELTELLEFVRNETNAVPIADGWERKVLDCFKITKARWNKWCREKNLQPINTESSDNQSEQEPASETSHDVAAATAAENTATKQARSKSNDVVKAPKPTGRSRFCRPALAILRHLLTHDEKPTGFTERLRKQDKELLNELGFELLNSEPRRTPMKHRQQKRRERPWLLLDDLDFLDLAWKAKDEQGKPRQYSPHDLRIPDMALRHLRKKHSLTQTPFSELVHRADPELKRREQAISDLIGEQNNPIVRERLTRYWKRLQHFQNPTISPDAKKQKAGFGLTEPECLVLEFVRDDKDNSFDGQKRLETYQEVLRRNEDRRERARKALEASKLPTSDEMIVRWMLLEDQGPFCIYTSNAISCCDLANQTIQIEHIVPRALGGPDAYWNWALCTEEANAQKSNRIPYNWFREEKTDGEWAEYKRRVLDRASKLGRRKVDLLLRADACELVGEKYTSLAATAWIARLAQSVARLHFGWPLDDEREKERVIAISGGLTARIRRKYLLDSLLGSDEDAVKLRKDIDDTLAELDGLKADTSLGEMARKQKRADLRQKLQALASESGKNRDDQRHHALDAMVLSFLPNWARDRNKQDFFRFDEVGDNALYSEEGLKEVTLARKRIQQLAAETAPIRERIKAAKETGKWDEMQRLKDGIFPQRKEMAQCFQFLDKRKQPRNIRAVRDWFRQQLEVESPVLPRSVAFKKTPVEDTLYRRAYLIDRNHVELSRIPLIELGLRPDFHDVTRCLFDLKWLHTRIQSITDHADYDRNKLKAALDDKLKVACVSCCAKGRAFGDGDWRAIATQPDVQGLFRNGNSKRTATDPAECKVKVFQVALLPAKRYPLSDLAYGTGNVYVWNPDYFDDTTGKIVRKLDSSPRGRGRRQIRQAIASQPHPDALPWDNWKNFAWDRETQANVKTLRQQLEQELAPLLPGPKPKGMTASETEIWDEKQQAFKDALDKFRQEHKLPKALFLFTWQTDRPPKKPLALLRVLFERKDRVFSAHILQKRADKIVDQTLGNYFGWFADSLFQIPGGIQQESLWKEFCAVARTVDKQRVAEFVGSNSNLSARQWIDFLKRQSGPGVTQIQRTVGENLEEYCDLSKDGTGQFVRGGNRGYLICTKADRIQAFPIRFFQSKTLVREWLTGNKWELADSQIWRSGDLLRLSKPAGTTKKTVQPNYYFLGSFSNNGKTVNLNVCFGGDVPQGISLKSLWEAGLRREE

SEQ ID NO: 16397 - protein, 1029 aa, unidentified
  REGION 1..1029: note = Cas Enzyme sequence
EQGKPRQYSPHDLRIPDMALRHLRKKHSLTQTPFSELVHRADPELKRREQAISDLIGEQNNPIVRERLTRYWKRLQHFQNPTISPDAKKQKAGFGLTEPECLVLEFVRDDKDNSFDGQKRLETYQEVLRRNEDRRERARKALEASKLPTSDEMIVRWMLLEDQGPFCIYTSNAISCCDLANQTIQIEHIVPRALGGPDAYWNWALCTEEANAQKSNRIPYNWFREEKTDGEWAEYKRRVLDRASKLGRRKVDLLLRADACELVGEKYTSLAATAWIARLAQSVARLHFGWPLDDEREKERVIAISGGLTARIRRKYLLDSLLGSDEDAVKLRKDIDDTLAELDGLKADTSLGEMARKQKRADLRQKLQALASESGKNRDDQRHHALDAMVLSFLPNWARDRNKQDFFRFDEVGDNALYSEEGLKEVTLARKRIQQLAAETAPIRERIKAAKETGKWDEMQRLKDGIFPQRKEMAQCFQFLDKRKQPRNIRAVRDWFRQQLEVESPVLPRSVAFKKTPVEDTLYRRAYLIDRNHVELSRIPLIELGLRPDFHDVTRCLFDLKWLHTRIQSITDHADYDRNKLKAALDDKLKVACVSCCAKGRAFGDGDWRAIATQPDVQGLFRNGNSKRTATDPAECKVKVFQVALLPAKRYPLSDLAYGTGNVYVWNPDYFDDTTGKIVRKLDSSPRGRGRRQIRQAIASQPHPDALPWDNWKNFAWDRETQANVKTLRQQLEQELAPLLPGPKPKGMTASETEIWDEKQQAFKDALDKFRQEHKLPKALFLFTWQTDRPPKKPLALLRVLFERKDRVFSAHILQKRADKIVDQTLGNYFGWFADSLFQIPGGIQQESLWKEFCAVARTVDKQRVAEFVGSNSNLSARQWIDFLKRQSGPGVTQIQRTVGENLEEYCDLSKDGTGQFVRGGNRGYLICTKADRIQAFPIRFFQSKTLVREWLTGNKWELADSQIWRSGDLLRLSKPAGTTKKTVQPNYYFLGSFSNNGKTVNLNVCFGGDVPQGISLKSLWEAGLRREE

SEQ ID NO: 16398 - protein, 1018 aa, unidentified
  REGION 1..1018: note = Cas Enzyme sequence
RGYGRVPWAAREEKRRGKTEEEQEKELKKLDPDYREAVETWPKFKHAVSRVEFHLPCYYDAWKMGLWSVNKPDVLESRITCQAESTRKVRFDRVDVEREIATLAQQASVQLPQLADAFAKWKRDGWKSIDSFPVAAKTFGEFLVHGPAGEPKGDARNNFSDYLKFRASNKIHPGSSDDWMGATAQKTPRFDNRIINTCALIPRLQVCNVTIRFNKSDSKPIPESLLATEVTFLMKLKNTLVTGYPAQRKLTTEEIRKLFEVVTAEALAKALSVGLDDKYRERKVAECYALTKTDWARTKGIKELGLFPLPGHMEIKAPKTDGRSRFSRPALRLIRALILSGQSPSAFHQRLLGRDRHLITEIGMDVLDAEPVRFVGAAGGEKTFIKAERPWVVTSDLKFLVDLARSNDTWDNIYFPEQRLDALEARYTDIEGKINVPQAVRELLGSINDPVVKHRLGVFSDRLTKLQRGDDKEGIPACGIPETVVLEFVREDFMGERAKRELQKFISDREKARKEAGDQAAALGVHEKSGRLKYELFKSQGSVCLYCQQNFKETDLADYRIEHIVPRAQGGPDAMVNYVLAHDACNDAKGDRTPFEWKHGQQGWDGYKACVEKHGTLLRNKKVQLLLREDAAELVGRYTALAETAWITKLAQKIVSLHFGWPRGVDREGNRRVIAVSGGLTARIRRKYRLNSLLNPPPVGTIDLNEWEAKAEKNRKDNRHHALDAMVINFLPQWMRDEKKGWFFRFPEPVRKNPRATFEKEIADVMPRLLAFEKAPLAETIYGGRMEKGKTTIVQRVPLRKLAFNTIKQKEVFDRKYLAGQIKSVRDPHIAEMLLRFLGKESNGESEWHDFCEDLFQRRRDGTKGARISKINVNVGSADEYAEMSKDRGGAYRKGKKGHKGQIIYLELTPTKKGAAKEIIHVRPVYAFESRLTIERKLRKELGDSIKIYGFFQSGCLIAVKKEVAHDKKPLPAGSYLLNTIMADAKCMKVTTQNGVTYPDIPRYSLSSLIEAGLCRAD

SEQ ID NO: 16399 - protein, 1175 aa, unidentified
  REGION 1..1175: note = Cas Enzyme sequence
MSDHQTVWSFDLGKGSIGEAVRDIKSNKFLHKASLLIPAEFASTKEAAMRRRMERTRLAHKAREKWLDEVWLAAGLEPLQTRKVWKNPKTRKWELKQIGDYRMEREFAPQNRKPGRDGAPADDTICYTSCLLRIKLLRGEKLEAWQIYKALHSAIQKRGYGRVPWAAREEKRRGKTEEEQEKELKKLDPDYREAVETWPKFKHAVSWVEFHLPCYYDAWKMGLWSVNKPDVLESRITCQAESTRKVRFDRADVEREISTLAKQAAVQLHQLADSFAKWKRDGWKSIDSFPVAAKTFGEFLVYGPAGEPEGDARNNFSDYLKFRASNKIHPGSSDDWMGATAQKTPRFDNRIINTCALIPRLQVCNVTIRFNKSDSKPIPESLLATEVTFLMKLKNTLVTGYPAQRKLTTEEIRKLFEVVTAEALAKALSVGLDDKYRERKVAECYALTKTDWARTKGIKELGLFPLPGHMEIKAPKTDGRSRFSRPALRLIRALILSGQSPSAFHQRLLGRDRHLITEIGMDVLDAEPVRFVGAAGGEKTFIKAERPWVVTSDLKFLLDLARSNDTWDNIYFPEQRLDALEARYTDIKGKISVPQAVRELLGSINDPVVKHRLGVFSDRLTKLQRGDDKEGIPACGIPETVVLEFVREDFMGERAKRELQKFISDREKARKEAGDQAAALGVHEKSGRLKYELFKSQGSVCLYCQQNFKETDLADYRIEHIVPRAQGGPDAMVNYVLAHDACNDAKGDRTPFEWKHGQQGWDGYKACVEKHGTLLRNKKVQLLLREDAAELVGRYTALAETAWITKLAQKIVSLHFGWPSGVDREGKRRVIAVSGGLTARIRRKYRLNSLLNPPPVGTIDLNEWEAKAEKNRKDNRHHALDAMVINFLPQWMRDEKKGWFFRFPEPVRKNPRATFEKEIADVMPRLLAFEKAPLAETIYGGRMEKGKTTIVQRVPLRKLAFNTIKQKEVFDRKYLAGQIKSVRDPHIAEMLLRFLGKESNGESEWHDFCEDLFQRRRDGTKGARISKINVNVGSADEYAEMSKDRGGAYRKGKKGHKGQIIYLELTPTKKGAAKEIIHVRPVYAFESRLTIERKLRKELGDSIKIYGFFQSGCLIAVKKEVAHDKKPLPAGSYLLNTIMADAKCMKVTTQNGVTYPDIPRYSLSSLIEAGLCRAD

SEQ ID NO: 16400 - protein, 1022 aa, unidentified
  REGION 1..1022: note = Cas Enzyme sequence
VLRKMRYRLALDVGSTSIGWCLIRLNADDEPIAIIRMGVRIFSDGRNPKDGSSLAVTRRNARQMRRRRDRLLKRKERMLSALTRLGFFPLDEAKRRELVSLDPYALRKKGLYEALSGPEFARALFHINQRRGFLSNRKTDRKDSESGALKKAIKGLRGKLAEEGCRTLGEWLARRHEQRLSVRARLRGKTQKEKAYDFYADRAMIEHEFDALWDRQEALNPVLFNPAARDELKDILLHQRRLRPVRPGRCTLLPEEERAPLALPSTQRFRIYQEVNNLRVLSPADMCEKPLTLDQRNRVVELLERQGEVRFTRILKELNLSGATKFNLEDIKRDRLKGNSTSAVLAKENCFGERWYGFDGAVQDEIVDRLLNDASKSALVNWLQERTGVDEACAETIANVSLPEGYGNLSRKALSRILPELAADVTVYSDAVVRAGFDSHSALSSAEQTGEILGELPYYGIPLRRHVAFAKDHPRNDEERYGKIANPTVHIGLNELRKVVNALIRRYGHPSEVIVEVARELKLGRERKLEIQREQKERQDLNDKQVAEACAVLGWTPANLDRAKRRELSQKMQLWVELNPKNVADRQCPYTGEQIGIERLLSSEVEIEHILPYSATLDDSMNNKTVSLRRANRDKGNRTPYEAFGVQPIPGYDYQAILLRASNMPREKAKRFAPDGYQRWLKEDKDFLARALNDTAYLSRIAKEYLSLICPPNKVRVIPGRMTALLRGKFGLNQLLSGSEVKNRDDHRHHALDAAVIGVTDQGLLQRFAKASASARERQLDRLVEEMPLPWPSYREHAERALGGIVISHKPDHGYQGAMHEETAWGLCGDGVASRRVRLEDGGPRQREFRNKNLVEIDSTRDPNRHGMDEHGRPRHYKGYVGGSNYCIEIWRGEKGKWDGDVVSTFQAYQLIRQWGEIEGARRLRDLSFSQSGRPLVMRLMIDDLVRLQVDGKERTMRVAVISGNGQIFMCDHHEANVDARNRDKQNPFAYISKLPGSLQKAKGRRVTVSEIGELRDPGFKG

SEQ ID NO: 16401 - protein, 1028 aa, unidentified
  REGION 1..1028: note = Cas Enzyme sequence
MRYRLALDLGSTSLGWALFRTNRRDEPVAIIKAGVRIFSDGRNPKDGASLAVTRRAARAMRRRRDRLLKRKARMQDKLVKHGFFPSDMDERKALERLDPYALRAKGLREALTPGEFARALFHINQRRGFKSNRKTDKKDNDSGALKKAISHLRQQMEAGGHRTVGEHLWSRLQQGLGVRARYRETPFTNDEGKKRIDKSYDLYIDRAMIEQEFDALWAAQATFNPALFHEAARADLKDTLLHQRRLRPVKPGRCTLLPEEERAPLALPSTQRFRIYQEVNHLRLLGEDLREVALTLAQRDAVANALESKARLTFEQIRKLLKLSGSVQFNLEDAKRTELKGNTTSAALARKELFGAAWGGFGEALQDEIVWQLVTEEGEGALIAWLQAHTGVDEARAQAIADASLPEGYGSLSRKALARTVPALRAGVVTYDKAVQAAGFDHHSQLGFEYDAGEVEDWVHPDTGEIRPVFKQLPYYGKPLQRHVAFGSGKPEDPDERRYGKIANPTVHIGLNQVRTVVNALIRRYGRPTEVVIELARDLKQSREQKVEAQRKQAENQRRNARIRKSIAEVLGIGEERVRGADIQKWICWEELSFDVAERRCPYSGVQISARMLLSDEVEVEHILPFSKTLDDSLNNRTVAMRQANRIKRNRTPWAARDDFEAQGWSYEGILQRAERMPLRKRYRFAPDGYERWLGDDKDFLARALNDTRYLSRVAAEYLRLVCPGSGTRVIPGQMTARLRGKFGLNGVLGPDGEKNRNDHRHHAVDACVIGVTDQGLMQRFANASAQAREDGLTRLVDDMPRPWPTYRAHVERAVRHIWVSHRPDHGFEGAMMEETSYGIGKDGSIKQRRKADGSPGREITNLIRIHEATQPQRHGAGPDGQPLPYKGYVGGSNYCIEITRNDKGKWEGEVISTFRAYGIVRTSGLGQLRHPRVGQNGRELVMRLVIGDSVRLEIDGIERTMRIVKISGSNGQIFMAPIHEANVDARNSDKQDAFAYTSKYAGSLQKTKARFVTISPIGEVRDLGFKG

SEQ ID NO: 16402 - protein, 1022 aa, unidentified
  REGION 1..1022: note = Cas Enzyme sequence
MKYRLALDLGSTSLGWALVQLDKNAQPCAVIRAGVRIFSDGRNPKDGSSLAVTRRAARAMRRRRDRLLKRKARMQRLLVEYGFFPVNEASRKSLETLNPYQLRAKGLDEALKPEEFARAMFHISQRRGFKSNRKTDKKDSDSGALKAAIRGLRDQLDAAGTDGKARTVGELLWRRMSDASIPCHQRTVRARYRETRVQRENGKLGIEKSYDLYVDRAMIEAEFDALWASQALRNAAVFHEEARLALKDCLLHQRKLRPVKPGRCTLEPGEPRAAMALPSQQRFRILQETNNLRILGGRLLEQPLTLEQRDKLCAALEQGSKSFKSAIPKLLGLPGAVQFNLADAKRPELKGNTTSMLLGKKDFFGPAWHEMSEAHQDEIVTRILEEESEAVLVDWLQQKTGVDPIRAERIANAPLAEGYGSLSAKALARLLPELRLAVVTYDKAVVSAGYEHHSHISHAATSGEILPELPYYGEYLQRHVGFGTGDIRDSPEKRFGRIANPTVHIGLNQVRAVVNALIKRYGHPSEVIVEVARDLKQSQEQRREAQELQARNQRRNERLRSEVAEVLQIAQERVRHADIQKLILWEELSFDVADRRCPYSGVQLSKSMVLSEQVEIEHILPFSRTLDDSLNNKTVALRQANRVKHNRTPWEAREDFGAQGWDFDEILLRAELMPRSKRFRFAADGYEKWLRDDKDFLSRALNDTRHLSRVAREYLSLICPAGTRVIPGQMTAQLRAKFGLNDILGLQGEKNRHDHRHHAVDACVIAVTDQGMLQRFAQASAEARGKGLDKLVETMPDPWPTYRRHVRRAIEAIWVSHKPDHGHEGAMHNDTAYALLGNGKVAVHKIVEGQRRREESSMKVIEMTCARAAGRHGTLPDGAPMPYKGYKGDSNYCIEVVRSPAGKWSGEVISTFDAYRAVRTAGVGVLRGKDLSLRGEPLVARLMANDLVRLDHKGIERTLRIAYINSAGTIALCDHNEANVDKRTRSKELAYVFKTAGSLQASRGRKISVSPIGDLRDPGFRE

SEQ ID NO: 16403 - protein, 1005 aa, unidentified
  REGION 1..1005: note = Cas Enzyme sequence
MRYRLGIDLGTTSLGWVLIRLDSENKPCAVIKTGVRIFSSGRHPKTGASLAADRRLARSMRRRRDRLLKRKARMMRFLIDHGFFPKDAASRKKLEVLNPLQLRAEGLIRQLTPAEFARAIFHLNQRRGFKSNRKTDAADSDDSVMKSAIQKVRQELAQDGFKTVGQWLFDRQQKGQLVRARRREISVAGENGRNKIHKSYDLYIDRAMIEDEFDALWEKQSSLNPEVFNEKARHDLKDTLLFQRKLKPVIPGRCTLIPENYRAALALPSVQKFRIYQELNNLQIINSDLTTTLLTKEQRDIVAQTLDRKKELSFGAIRKLLHISEKFNLEDVKRDRLKGNLTNAILSNKDYFGAEWFNIAPELAAKIVEKLINEESLDELRKWLSSNTPVSQDNLDNICQVSLVSGYGNLSSEAIDKILPFLESEVITYDKAVVQAGFDSHSQLAHSSTGEVLPLLPYYGEYLSRYCGMGSGDPSDSLEKRFGKIANPTVHIGLNQVRVVVNKLIEKYGHPDEVVIELARDLKNSQKQKEEEHKCQAENAKRNRQFREKIASLLQIQESEVKRSDLEKMILWHELDPTNETNRRCPYSGVQISLTKLYSSEIEIEHILPFSRTLDDSLNNKTVSTREGNRIKGNMTPWEAKAAFAARGWSYDDILVRVGAMPLNKRGRFASDGYEKWLKTSEGFIARALVDTQYMSKVAKEYLSLICPHNIRAIPGRMTALLRAKFGLNKILSENGLKNREDHRHHAVDACVIAVTDQRLLQRFAQASASAREHQLERLVESMPEPWEDYAEHVSRSVASLKVSFRPDHGHQGAMHNATAYGLAEEGNVYYRKVVDGVRVRHVEKLDVIKIVNKQQSSRYGSLPDGSPKPYKGYLGDSNYCIDIVKEANGKWVGEVISTFEAYQYFRDMQNSTSELSKLSFSGKPLIMRLIRNDTVKLVHDNQSQYLRLCKVSQSGTMSFISLNESNVDARCRQKELAYIFKTAGSLQKSKCRKVMVNPIGETCK

SEQ ID NO: 16404 - protein, 1005 aa, unidentified
  REGION 1..1005: note = Cas Enzyme sequence
MRYRLGIDLGTTSLGWVLIRLDSENKPCAVIKTGVRIFSSGRHPKTGASLAADRRLARSMRRRRDRLLKRKARMMRFLIDHGFFPKDAASRKKLEVLNPLQLRAEGLIRQLTPAEFARAIFHLNQRRGFKSNRKTDAADSDDSVMKSAIQKVRQELAQDGFKTVGQWLFDRQQKGQLVRARRREISVAGENGRNKIHKSYDLYIDRAMIEDEFDALWEKQSSLNPEVFNEKARHDLKDTLLFQRKLKPVIPGRCTLIPENYRAALALPSVQKFRIYQELNNLQIINSDLTTTLLTKEQRDIVAQTLDRKKELSFGAIRKLLHISEKFNLEDVKRDRLKGNLTNAILSNKDYFGAEWFNIAPELAAKIVEKLINEESLDELRKWLSSNTPVSQDNLDNICQVSLVSGYGNLSSEAIDKILPFLESEVITYDKAVVQAGFDSHSQLAHSSTGEVLPLLPYYGEYLSRYCGMGSGDPSDSLEKRFGKIANPTVHIGLNQVRVVVNKLIEKYGHPDEVVIELARDLKNSQKQKEEEHKRQAENAKRNRQFREKIASLLQIQESEVKRSDLEKMILWHELDPTNETNRRCPYSGVQISLTKLYSSEIEIEHILPFSRTLDDSLNNKTVSTREGNRIKGNMTPWEAKAAFAARGWSYDDILVRVGAMPLNKRGRFASDGYEKWLKTSEGFIARALVDTQYMSKVAKEYLSLICPHNTRAIPGRMTALLRAKFGLNKILSENGLKNREDHRHHAVDACVIAVTDQRLLQRFAQASASAREHQLERLVESMPEPWEDYAEHVSRSVASLKVSFRPDHGHQGAMHNATAYGLAEEGNVYYRKVVDGVRVRHVEKLDVIKIVNKQQSSRYGSLPDGSPKPYKGYLGDSNYCIDIVKEANGKWVGEVISTFEAYQYFRDMQNSTSELSKLSFSGKPLIMRLIRNDTVKLVHDNQSQYLRLCKVSQSGTMSFISLNESNVDARCRQKELAYIFKTAGSLQKSKCRKVMVNPIGETCK

SEQ ID NO: 16405 - protein, 1106 aa, unidentified
  REGION 1..1106: note = Cas Enzyme sequence
MKYHLGLDLGTTSIGAVAIAPPNSHEPLTLLAQQLHIFPEPNERDNKGALVPKKAERRLARQQRTQLARRAQRLRHIAQLASLLGLNPKPLPPDNGQNLPRLRAIAASEPVAVADLLRIFIKMAKRRGYAGGFRTQTNKDVGEVKGGVERLQTLMQEHGCQTLGEYLYSRYQRGLPIHLKTQTAGNHGKKSTIITDPEHENLYATRELVEQEFAIIWATQARFHAILNTQHEGKPLQNIFHDVIFYQRPLKSVSTLVGKCPLQSNLPRAPRAHPSVQAFRIEKQLADMRWGMRKHAEPLSFVQKAIIREHLQQHDKLSFKQIETLLAQAGHPKPLGTGLNLEHLGRDQLHGNTTLSAWRKLGMESAWLALSHTAQTQVINLLADMGSPEQFDTPQWHTQIHGEKKNQPRHFDATTISFINALVATGKFGRLKRMGLEDGRAAYSISAANKLTAWLQSNTSAEPLSEYLAIDVCYPNAHQPVTLQERLPLPEKTGNQVVDSALRQLYRTLNQFHQQLGAYPDRIVVEMSRELGQGVTRRNEIHNQQTLNQNSRTAISKILQEANYPATERNIRRYWLAEEQDWHCPYCQGHNVFTLNEVMDGKITHFEHILPRSLTRIGLKNSEIVLAHSHCNDAKGNQTPYQAWGTQQPERWQAVEKMAAILQANAKKYRVKNPSRSAALYRKAKLLCLQDFENDVLTDESIADFSDRQFHDTSWIAKAATQWLRQICADVDVSRGQMTAHLRRIWGLETVIPEVRLAHGLPVLDENGKPITAEQFHDFRPAWEGHRYSHSGQTVDIRLEKRLDHRHHLIDALTIALTSRSLYQAMATHYRQDCERNQRPVQSRIRLYADPPCGDLRSAAVAMIRDCRIQHKPDHHPNGQLFDANAFGIAEHPETHKRLFTRRYAIAALITEKDKEEKARKAIQSIISNSVRELVMQHLDTGLSQGLTPYQALQVPLQHPQYSRENKPVYIKKVKCYDNSAENAKTITHCTRQGITLTKYLKSKGYAWLEIKVENGKLVGDPQLVPLHEATQRPTKVQGITRFYKGDIVFDPKDQRHYRIGYFTAEGNVFLIPNTDPRSFGAIEEKASGKKKLAFSQMARLILMNP

SEQ ID NO: 16406 - protein, 1057 aa, unidentified
  REGION 1..1057: note = Cas Enzyme sequence
MSVSSQPDEIVWAFDLGKGSIGEAVRQGTNFLHKASLLIPAEFAETKTAAKRRRMWRTRQAHKAREKWLDEVMRRTGIEVLHGRNYDKGGNWKPGEPADERLEREFAKPGDSTCYTSCLLRIKLLRGEKLEPWQVYKALHSAIQRRGYDPDIPWKNRAQRKSKSSDADDDEAGTQQRMEQFENDLKAMAPGQSEYRFPCYFDAWKMGLWNPAKPNELKDRTDCRAESTRNQITPRKLVEEEIRRLVTSAANHYPKLKDKAGYILYGPTETAYASFKAELRKKHDLKEGGVNDWQGVLGQKIPRFDNRIIGKCVLIPRLNVCKIRTDDSGELHPQSRIAAETVFLMRLKNMRFQTPKGQACLTAKQIAEVFNDPKRTKLGMTETQWKKYCLGFGAKPMLGQYQEVEEPSFSGRSRFCRPALEILKRLILSGDTPAQAYEREVARLNGNTNPVKGLVKDDLRFLLQMGTTWEGVYIPNQKLDALARSTDDPHEAISRLIGSQNDPIVRHRLALFGKRLDFLATTKKLGTPDYVVLEFVREDFMGKKARFEYFKFQRDRAHDRARAREEAAKAGAKERSAGLKMELLKAQVGECLYTNAKLIPEKLDEYVVDHIVPRAKGGPDAAVNYILTTRRANDDKGDRTPYEWLSGREGWDAYVERVKKRIGTLRNKKVQLLTSPDAERLVEKYTALAETAWISKLAQTIIGLRFGWVNGNDRDGKKRIIVVSGGLTGRIRRKYKLNSLLNPNAKSEEDAETKNRNDDRHHVLDAMVISFIPNWARNAKSTGFFRFPDGVHRELFGKEIAEVIPENVCFEKPALAETIYGARTDHGKKVIVQRAELVSLGMKPTALGKSVFDLKYAGKQIQSIRDPVIQGRLLEFLTTNPDEGAWRTFCAEFHIKHKDGSDGQSVESLTVNVGEPTEYMDMSKDGTGAYRKALKGHKGQIVYVLSRTDKKGVKKDVYAVRPIYAFESAAKVSAALRSEFGEELQVKEILQSGCLVQTDKETSHAKKPLPPGKYLLNTIITDSNAAKLTTMDGRTYPDIPRYSLASLFAAGMKRITL

SEQ ID NO: 16407 - protein, 940 aa, unidentified
  REGION 1..940: note = Cas Enzyme sequence
TYAVFLAKMPELIPDKWSNEETQALIRKEIELRVETYKEEKRRKAIVNDLIKRCRDEHPNDYYTYKINDNDKQNIVEKIYSVYGEKSFEEKDEQEKNEIIDWVTSQVKKNEFHEIKRLDEIIKDFFLSHPGLGIDEIKANKLYHPSDIEKFQEPIKKVDKDGIEREYPGSPISGSIKNPTVFRALFQLRKLINELIRKATIDHTARVHIELTRELNDMNYRWAIEKWQKELEVNRNNYREEIKNLYKAECEKDIEPTNDEILKYQLWIEQEKQCVYTGKSIGICDFIGPNPNYDIAHTLPRSKTNDNSQENKTLALKGYNQFQNNRIPFNLPNYNERCEIDLPGIGIIECEAILSVIKKWDKRCEELDAEIEKKKRSAAANKDDKEKHDTIIREKHLLTFERNYWKDKYERFTMEEIPEGFTNRNLVDTGIITRYAQQWLEKYFDKKVHAVNGKIVKDFRVIWGLQKEYEKKERTNHIHHCIDAITIACITKDKYDTLARAYREEEKMNVKEAKEILANSKPWHTFKEDLDKIENEVGVTHQMQDNVPKQLKKKVRVRGKIQYVVEYEKDLNDNFIRDKKGKKIIKKDVNGKIVYKLNDGKRITKIQQGDTTRGPLHKESFYGAIKIAKRDEDNKILRDDKGNIAFTEDKDGNEIFYVIRKELEKLNKDDVEKIVDGEIKKIIEQSIKDKLLTFKKNGAVIKEGATIWQNEPKLIPIKKVRVKVSLKNPLPDFKKHRDVSKHPHKQQYNVDNKENYCLAIYEGENQKGKIVRDSELVNVLDAGEYYKLSNKELRLQTSIVKRNKDGLKLKVVLKKGRKVLLYKEHQEEIWDLNDREKLERLYIITGLDEDGIKLYYHQEARSTTDVLAYMNEVINNYNKENNIVDKEGKTKESKLSSPKGGDVIGKYKEFPYIKFKPSNFNALIQDIDFRLSPTGIISKL

SEQ ID NO: 16408 - protein, 1096 aa, unidentified
  REGION 1..1096: note = Cas Enzyme sequence
MMNPVDSPVLEKDLQLAFDVGHSSIGWAVLQSKANTLNLLGCGSVIFAADDCLASQRRQFRRQRRHIRSTRQRIDQIKRLLATLGVLSSAELDAVSTSSPWFYAARVLRGGALLSWPQLWDVLRWYAHNRGYDGNKAWSRQEEDAAAQKDDTEKVEAARSLYQKYSTHTMAETWCAVCGLDPLGEKTSCALPGNKRPKGLNAAFPREDVEREVQTILEKHVGTLPKVDAALIQALMEDWQTLPCPEIHLPARFHGGLLFGQLVPRFENRIIARCPITYEQIYQQVLAEEGDMEKAKHEADRKSKVPNADCVEFFRYRWTMQLANVQVATDDPKRPRRLTAEERLTLDAKMKERGALTKGEFTKAVDQLTGGAATNVKQMMMHPDADKALVTDPVQRLVTGDELSAFYAVLPEPLQKRLKGKLRLGKRVTLADIRGWLEGTTSSVAFDGVLARKLEAAATKRSKKMATPTRESLLEARFQVDPASGRAPHSRAIMQAVADFVFTSNRHPAEGRDGAKDNGPLFRSEAIRTAQLQRAIDDQTNNHLVRHRLRILERLHTDILKEYAGEEEARIGRVTIEVNRDLRELSGKTAKQIAQDQGLRLSNFKSVSAKLEKQLEGKNVPITPGLIRKARIAEDLGWTCPYTGKPYDVFDLISRRVDKDHIIPRSERASDSLDSLVITFAEVNRMKGKRTAAKFVEDCQSQVLEGAPHLSIKPLSLFLKDVDSLEAFKGHDDDKRRKRNRKRLLLIRDYVEKEFKPADLTQTSQLVRLGAESLQRHYVELKEKPVIVSLPGSVTGAVRKSWDVLGCLAAANKLVIDPETGQVRTKTEIRDITHLHHALDASVIAYTSRLLPRDGGAWELLVKRRLNAEEQVQARKHFGSSVEFEKDGTLRLADLPISYKENIRKCLAERRVVQHIPAEMEGLRAEMNAWRVIGIEGAEAKLRQRIRQTDGTRPVKDKKEKVSKLIGLRPGKLQDLKAALVVADNYGLALDPEPQIIPFHKVWTRLRELRNNNSGKGVRVLRNGMLVNVPQGKYQGTWKVFSVKNNSSGMALDLGKSDVTRLQNKTEGHKINVLLASLMRDGLQICRTPLTGLNSL

SEQ ID NO: 16409 - protein, 1118 aa, unidentified
  REGION 1..1118: note = Cas Enzyme sequence
MMNPVDSPVLEKDLQLAFDVGHSSIGWAVLQSKANTLNLLGCGSVIFAADDCLASQRRQFRRQRRHIRSTRQRIDQIKRLLATLGVLSSAELDAVSTSSPWFYAARVLRGGALLSWPQLWDVLRWYAHNRGYDGNKAWSRQEEDAAAQKDDTEKVEAARSLYQKYSTHTMAETWCAVCGLDPLGEKTSCALPGNKRPKGLNAAFPREDVEREVQTILEKHVGTLPKVDAALIQALMEDWQTLPCPEIHLPARFHGGLLFGQLVPRFENRIIARCPITYEQIYQQVLAEEGDMEKAKHEADRKSKVPNADCVEFFRYRWTMQLANVQVATDDPKRPRRLTAEERLTLDAKMKERGALTKGEFTKAVDQLTGGAATNVKQMMMHPDADKALVTDPVQRLVTGDELSAFYAVLPEPLQKRLKGKLRLGKRVTLADIRGWLEGTTSSVAFDGVLARKLEAAATKRSKKMATPTRESLLEARFQVDPASGRAPHSRAIMQAVADFVFTSNRHPAEGRDGAKDNGPLFRSEAIRTAQLQRAIDDQTNNHLVRHRLRILERLHTDILKEYAGEEEARIGRVTIEVNRDLRELSGKTAKQIAQDQGLRLSNFKSVSSKLEKQLEGKNVPITPGLIRKARIAEDLGWTCPYTGKPYDVFDLISRRVDKDHIIPRSERASDSLDSLVITFAEVNRMKGKRTAAKFVEDCQSQVLEGAPHLSIKPLSLFLKDVDSLEAFKGHDDDKRRKRNRKRLLLIRDYVEKEFKPADLTQTSQLVRLGAETLQRHYVELKEKPVIVSLPGSVTGVVRKSWDVLGCLSAANKQVLDPETGQVRTKTEIRDITHLHHALDASVIAYTSRLLPRDGSAWELLVKRRLNAEEQAQARKYFGSSVEFEKDGTLRLVDLPTSYKDNIRKCLAERRVVQHVPAEMEGLPAQLNAWRIKQVEENRVKLLQFIRQPDGSRKRNEKDVDRHKIIGLHPEGSLSKLSKIKAALIIDHNYGIAILDRAEKPIESKITSKGKTLPFPLELIPFHKVWHRLNILKITNKGVSPKVLRCGDVIIVPRGTHLGAWRIFSVKNNADGLAVSLGDVDAIHYRNDKQNVRMSSLLRDGMSMTNTAFCGVAHTPLR

SEQ ID NO: 16410 - protein, 1083 aa, unidentified
  REGION 1..1083: note = Cas Enzyme sequence
MKQEMKQGLDLAFDVGHSSIGWAVLQTNPSLEIKGCGAVIFRADDCLASARRGYRRQRRHIRSTRQRIARVKRLIAHLGVLTEGQLNRPGCAWPWKLAARVLCGGKPLTWPELWDVLRWYAHNRGYDGNRRWSHAAHDFDGLDEAALSQLANDASLTEDEKDDAKKVKEAKRLMRETHTATMAETFCKVLKIDPLGAKNSSTVRFKGLNAAFPRRTVEREVQRILQAHFGKLPGVDEDFARALCGRDANDKDAWKAIPWFTEPLPKRYEGGLLFGQLVPRFDNRIISTCPITSQKVPSRNTPEFLNFRWGMLLANVRVARLGHTDLKPLTPDERKELDKRMRTVGSMTEKQFKDAVRDVSGAIRGNFDAMFMEVNQKEALILDPVQDCLTSGHAAPLFPTLPERIQKRARGQLRRGKTLTLGEYGKGIPAFDAEVHRIIDRASGKGRKKDKALTREAILSERLAAHKLSGRAAYSRPILRKAFEEVMAGRHPKEEGGCLFVTEQMRQAQLNRSLAEQTNNHLVRHRLLILERLLRDIIKEYAAGDKAGIRKVTVEVNRDLQEFSGLDVQGKAKLQGLKLSNHKKVSAKLEAVLSANNRLDAMSASLIRKARIADDLGCVCPYVGPKKPFEMIDLVNNRVDLDHIVPKTERQSDSLDSLVVTYSEINKWKGKRTAWQFVRDEQGKQVPGRPDLSIQSLAHYEKFVISLPPDRDPFKRQMDNERRFLDDDKRRWRRKKLLLLPEYTGKTFTPRDLTQTSQITRLAQQTILKRLDHLAPYNVIPIPGSLTGLVRKAWEILGCLNLACPQAEGRNKTEIRDITHLHHAMDACVLGLTSHFIPNDGRVWELIGKRSLDPAECRELDMLGIFDFNDKRLFRLRDLDKGIKEQIRQRLAEKRVVQHIPKRMHGLHVEQNTWRVRNVENGDVTIEQRIRQPDGKRPLKQTVERTTKLLGLEKGKLAALKGALVVGDNFGVALDPTPTVIPFHKVWPRLMELKAKNGGKTPRVLRNGQLIQVPSGRYRGTWRIFSAKNNRRGIAVDMAYPDVIRPENGVEGHKINVLLSTLLRDGMTILNAPLTGVASPPSI

SEQ ID NO: 16411 - protein, 1471 aa, unidentified
  REGION 1..1471: note = Cas Enzyme sequence
MGNRADLELAFDVGHSSIGWAVLKTQPELEMKGCGTVIFRPDDCLASKRRDYRRQRRHIRSTRLRIERMTNLLLGIGAITQSDVESGKKQHKGEPPPWLLAARVLAARTETEKAKALLTWPELWKVLRWYAHNRGYDANVRWSGESKVEAFSPSPQINTEDVEEQAVEAEESELADVEVAEDSDSDSDKLRAGKHLMSSKYGFHTATFAETVAKILLGPKRDVKPGQAGKTGKLAETTESFSESDFRKLLFDTPTESWSHPRHLSIYFKGIRAAFPRRIVKVIGGQRTLVGGTEWEVRAILRAHFDAPKGKALCDETFEAAICGRLPKTRENWRAYAETHPTLYLSSDDQAKLRSLRAPPKASQEKSERIRQQRRNILTGKLFLPSRYEGGLLFGQLGTRFFNRIISRCPFSFARIVAAILSGDENTLRLYGTTLAAVNRSRHSRNGVMETDLDLARRWAAKLSKVPAAKSREFLLYRWAMTLANVIVARPGRERLTGYERRCIHRRLRRTGYFTKDSFKEAVRQTTGCEPANLDQMFDTTTEAENSLFIDPVRKYLATNEVAGVVLPVLSQFLQVRLARLLQKGKGVRVREIAEWLDETAKRELSQRIEQYVQENNAKAKAAKKKPHDTHSPDEDRRKKQNKLTAAAVLRVRLEAPLPKGRASYHRVVLRKAVAEVLKGFDPRKPKRDRSNPDGENKPSHGCLFRTPETNRQLLGNPNNEAEYERWKQRWLSHQKNYQRYIARERLSPGSGEAFVRSEYHAAQSYRWLASQSNNHIVRHRLTILDRLLRDIIADQNYCAGDPKRIRRISIEVANDILTFSGLERKQLSGQVMPSLREHHDHVVRLLQQELKGTQWENKIDGELIWKAKIADDLGWWCPYTGKKYSPCELASGEMDVDHIIPKSRRLTNAMSAVVVTFKTINNLKGDLTAWEFVERYQDQPVGPHGEKVRKLWDYERFVKNPDNEMDKPRLSGETGHSDYPRWPKYLPGSRRKLHPDYVRRKLRRRYLLLKHYEKDKDTFTPRDLTITSHLNRLAQQVLLRSLPHLAEHQITAIPGSVIGVLRDAPGWRLLGCLDGAATADVIRKVLQLDHEGKPMCASDVAPLMKRIPKPKGEIRELTHLHHAVDACAIAIINHLLPKDGKLWELVAKRELTDADKNAYDDLRQKNQSQWQPRRLARLFSIVPNLDDKGQQPKHDHKWRIRPCRLKDVLPDIGAQVNKCLRERRVVEHTPADMSGLAAEETVWRIFDPSDNHPSARRLKQWFEKKIKDGEIQKLPDPTNEADKTVLIVCRKRRDAKSNDKGKTLHDTGNVWRWVYDEVNKVRVVGLNPGKLHRIKAVKLIRENFGIALDPEPTIVPFHKVWQRLMELKAKNGGKMPRVLRNGQLIRVLSGSRAGLWRVTSVKQTEAYGLVLDLAYPDSVHLSRPNAPVEQLLKEGLEILKHSLTGYDASVVAYAPVKRRPRKPKAAQSEQ

SEQ ID NO: 16412 - protein, 1069 aa, unidentified
  REGION 1..1069: note = Cas Enzyme sequence
MRRHVRSTRVRVERIKRLLAHTGVLSLEALNKVESSSPWQMAAYVLSGGGVMTWPQLWDVLRWYAHNRGYDGNRRWSRESAEQAEDTEKVTNARALYETHGTNTMAETLCKHLGIDPLGQVAASNVRFKDLNAAFPREDVEAEVRSILTKHMGKLSSVTPELVRALIGNDRDDEHAWSAVECPSLKMRLNYFGSLLFGQLIPRFQNRIIATCPISFERRYQAVLDATGDPSKANHEAERDAKVPSKECVEFYRYRWAMQVANIRISTGEKQTRPLSKEERRALNAKIEERGFFTAGELRSTVQQITGSVTSNLSQMLLHPDAQEALILDPVRKLVYSKLDNIWPTLPLQAQKRAIGKWRRGASIKLAALGDWCEAERGAFDDAIKRRLDGEGTRRTKKQQPVHVADVLNESFSADLISGRAPFHRSILKEVVEFVFSTNKHPAEEGGPLFRSESLRQTQLQRAIEDQTNNHLIRNRLTLLDRLHQDVIKEYAGGDPSKVSRITIEVNRDIREFSGKTAKDIAMDLGSRLSNFKGVVKKLESDFEGQNIRISPGLIRKARIAEDLGWRCPYTGKDYDSFALAHTRVDKDHIIPRSLKPSDGLDALVITFPEVNKLKGNRTALRFVEEFQGQAVPGRPDLTVVTLKQYQAFLDRLDTGRGHDDDKKRKKRRKEALQLKDYVDKEFTPRDLTQTSHLVRLGAQLLERVYLPQKQKPVITSIPGSVTGAVRKSWRLIGCLAGINQSLPADSEDISKSDLRESTHMHHALDACVQVLASHLLPRDGGIWEILLKRRLNVQEQQIAKARLKGIAEIDSEGRLRLADLPVPLKAQIRERLFEKRVFQHIPADQGGLACDQTVWRVFDPLDEHPSAQRLAKWFNALKIEIPAADAETVLIVCRKRKDGLGAEGGKLLHAGKTWRWVYDLKAKSALIGLSPKDPERAKLKQIKAVKVLGDNYGLALDPEPTILRPIKVWEQLAELRAKNGGKRPRVLRKGSLFHIPNKTGRADYRGTWVVRSIKSKANGLHLAICTPDRVDCDGAGQTDAFGNVKLATLLADGLVVFHRPQLTGFQLS

SEQ ID NO: 16413 - protein, 1069 aa, unidentified
  REGION 1..1069: note = Cas Enzyme sequence
MRRHVRSTRLRVERIKRLLAHAGVLSLEALNKVESSSPWQMAAYVLSGGGVLTWPQLWDVLRWYAHNRGYDGNRRWSRESAEQAEDTEKVTNARALYETHGTNTMAETLCKHLGIDPLGQEAASNVRFKDLNAAFPREDVEAEVRSILTKHMGKLSSVTPELVRALIGNDRDDEHAWSAVECPSLKMRLNYFGSLLFGQLIPRFENRIIATCPISFERRYQAVLDATGDPSKANHEAERDAKVPSKECVEFYRYRWAMQVANIRISTGEKQTRPLSNEERRALNAKIEERGFFTAGELRSTVQQITGSVTSNLSQMLLHPDAQEALILDPVRKLVHSKLENIWPTLSSQAQKRAIGKWRRGASIKLAALGDWCEAERGAFDDAIKRRLDGEGTRRTKKQQPVHVADVLNESFSADLISGRAPFHRSILKEVVEFVFSTNKHPAEEGGPLFRSESLRQTQLQRAIEDQTNNHLIRNRLTLLDRLHQDVIKEYAGGDPSKVSRITIEVNRDIREFSGKTAKDIAMDLGSRLSNFKGVVKKLESDFEGQNIRISPGLIRKARIAEDLGWRCPYTGKDYDSFALAHTRVDKDHIIPRSLKPSDGLDALVITFPEVNKLKGNRTALRFVEEFQGQAVPGRPDLTVVTLKQYQAFLDRLDTGRGHDDDKKRKKRRKEALQLKDYVDKEFTPRDLTQTSHLVRLGAQLLERVYLPQKQKPVITSIPGSVTGAVRKSWRLIGCLAGINQSLPADSEDISKSDLRESTHMHHALDACVQVLASHLLPRDGGIWEILLKRRLNVQEQQIAKARLKGIAEIDSEGRLRLADLPVLLKAQIRERLFEKRVFQHIPADQGGLACDQTVWRVFDPLDEHPSAQRLAKWFKALKIEIPAADAETVLIVCRKRKDGLGAEGGKLLHAGKTWRWVYDLKAKSALIGLSPKDPEKAKLKQIKAVKVLGDNYGLALDPEPTILRPIKVWEQLAELRAKNGGKRPRVLRKGSLFHIPNKTGRADYRGTWVVRSIKSKANGLHLAICTPDRVDCDGAGQTDAFGNVKLATLLADGLVVFHRPQLTGFQLS

SEQ ID NO: 16414 - protein, 1080 aa, unidentified
  REGION 1..1080: note = Cas Enzyme sequence
MNGKGKVLAAKPNFGIAFDVGHSSIGWAVLQTEGRAEIAGCGAVTFRADDCLASARRGYRRQRRHIRSTRQRIARMKVLLKHLGALKPEQLDQPGCAWPWQLAARVLCGGKLLTWPELWDVLRWYAHNRGYDGNRRWSAADAEAIADDTEKEENAKTLMGKHRVGSMAETFCMELGVDPLGQKRASTVRFKGLNAAFPRAIVEGEVRRILQAHSGKLPKVDAALERALLGRDNRDRTAWQSIPCPALRLPKRYEGALLFGQLVPRFDNRIISKCPVSGEKVPSRNCAEFLNFRWAMQLANVRVARFGEKELTPLTAPERRQLDAAMRKQGGMGAEEFKKHVRQAAGAIRDNLDTMLLHPDAKEALLLDPVQKIVQSSDLRPLWQILPERLQKRARGQLRRGKTITPARLRAQLEELGLSVSAFDAEVTRQLDAANTRNRKNDERISRQGLLNRPFAAKRLDGRAAFARPLLKRAAEEVMAGKHPKEEGGCLFVTEEMRQAQLSREIAEQTNNHLVRHRLLILERLVGDIIKEYAGGDKARVAGITVEVNRDLREMSGMTAKQKAQDLGLRIANHHHVVKKLEEDESLMRVLRKQGTRITAGLIRKARVADDLGWACPYTGQRFEPVDLVTKRVDKDHIVPRASRASDSLESLVMTFSAINKWKGKRTAWQFVEQEQGKPVPDLPNLSITSLSRYKQLVESIETFKGHDDDKRRKKRRKDLMLLPVYEEKEFTPRDLTTTSQLVRLGAMALRKAFLGCKRQPVVVSLPGSVTGAVRKAWKVLGCLSLAAPGVLDENGEVKTKQEIREVTHLHHALDACVLALASHFIPNNGRIWELIVKGRWTPAEERELKTLGIFSWDSEGRFQVRDLDKTLKEQIRQRLGERRVVQHIPARMEGLRVEQNTWRVVSVKDGEATLRQRVRAADGSRPGKTTAEKVTKLLGLQPVSGRGKLLVNRGTLVIPDNFGVALVEPEPVIIPFHKVWPRLSELRAANGGRMPMVLRNGQLIRVPGGKSFKGVWRVFATKNNASGMALDIGSPDVVRLKNKTEGHKINVRLATLIRDGMEVLRTPLTGFAACPAPSS

SEQ ID NO: 16415 - protein, 1200 aa, unidentified
  REGION 1..1200: note = Cas Enzyme sequence
MNATKKIESTKADLDLAFDVGHSSIGWAVLQSVGQATAQATNPFDINILGCGVVTFGADDCLASKRRDFRRQRRHARSTRQRIARMEKLLAHFKALTPEQIASKHKQAGGHPAPWLLAARILASNGEFLLGWPELWDVLRWYAHNRGYDGNARWANVSDDALAPAEQEEKRSDLEKEQNAIKLMNDYGKQTMAETVFADLFAEFGIAEPTKVKALPYLQKRFKGNQCAFPRKTVEAEVLRILQVHNFCDAKLIHLLVARKLSDEDRAFLTSIDIHLPKRFQGGLLFGQLVPRFENRIIAQCPITGAKVPGRHCHEFLEFRWAMTLANIRIGFGDEKYEEDANLRSLTAAERHKVDARVRRLGFLKIEPDKAGKDGVVRPGKNELRAIVIEETKCERHNLDTLLLHPDAKDGLKLLPIKGDTTAFRVAWSCFDDPQHDANGRYVDDQLRRRYTTQLLRGTKERPRKLTIQRILEDLERIKRSEIAARLRQTATREAQGKKAKPDSGKLYALFNAEFYCDKLNGRARYSRDMLNSAIQQVFDKIKPAHPLEKGGCLEQTEKIRREALEKPLDRQTNNHLVRHRLLILKRLHEHIVQDFAMGDKARISRVTVEVARDLQTMSGMNNKEKAKELTGKLKHHHKIAAHLAEELKDERDENGRPFVISPGLIRKARVADDLKWQCPYTGRIFGPPSLVHRLFDKDHVIPRSKRLSDALEALVITTREVNAEKKARTALQFVKEMNQSENLAKRDQLGIRTEAQFREFVDSLWPKSDPFRRARAGGARATDDEARCWRRKQLLLTETWEENEFTPADLTKTRQIVKLAAQQLEATFKDSPEMQKPAIISIPGAVTAAFRDKSWKLLPLLGNANPKVNNLHQQKIESEKCGRDFNFKKAVREVTHLHHALDAVSLGMITALLVPAGDAGHAGLNGDLARFIHKTKLTAEERSQFEVIRHKLGLPKFYRWAPSGYDSEKKQQSTASEGFTLRISELPDSVKRQISERLIEKRVVQHIPADMSGLKVEENTRGIVRIENGRVHLRQQKRDDKTGKLIHNPSDEVQNKLVGLPSDQASSKLKAVKGVRVINDNFGVAYLNQSDDPGSPFVIIPHHKVWHRLKELKIRNHGKRPIILRKGDIIEFKKGDQLLRYRIFGAGQRARGLYLDAAFLDELDRSVELYPATLLRGSFRLVQTSLTGAERKSCPTTSS

SEQ ID NO: 16416 - protein, 1129 aa, unidentified
  REGION 1..1129: note = Cas Enzyme sequence
MKTYTLEKSPATTNFLTASEGIHLAFDVGHSSIGWAVLDVHGSSSPQLLGTGVVTFSADDCLASQRRGFRRQRRHIRATRQRIFRIERLLAHLGVITTDALEAKHKQGGGHSAPWFLAARVLRGGDLLTWPELWDVIRWYAHNRGYDGNKAWSAHETEADKEDTEKVERAKNLLTDFSKKYSRSGSMAEVFCDVSGLDPLGTKMSCHLAGDKRPKALNAAFPREDVENEVRTILQKHIGTLPRLDADFIRALMEDWTTVPCESIRLPGRYGQILSSGKRTPGGLLFGQLVPRFDNRIIATCPITFEHVYQRVLAETGDAAKAKHEAEKLAKVPAKDCPEFLRYRWAMQVANIQVATGERRKTRALSVDERNRLDAKMRERGFLGKAEFAKVVREITGESADNIEQMLTHPDADKALILEPARKALAKSPWNIFFPLLSQAIQKRAVGKLRLGKTVKLGTLIADTPFALDAGIEALLSAANSKKGKGQKSTTREEIFYATARCDSLPGRAPYSRVVMREAADFVFATDRHPTEGSPDAHDNGPLYRSEAIRNAQLQRAIADQTNNHLVRHRLLILERLHRDILKEYAAAEPARIARVTIEVNRDLREFSGKTAKQVAQDFGQRLANFKNVAARLEKAFDGKNIRLTPGLIRKARIAEDLGWKCPYTGQSYDEFDLLHRRVDKDHIIPRSERASDSLDALVITFSEVNRMKGKRTAVRFIEECGGQTVEGRPQTSIKPLANFHKDVAALEVFKGHDDDKRRKKNRKRLLELRDYVEKEFTPGDLTQTSQLVRLGAQMLERAYTDQTKRPTIVSLPGSVTGTIRKSWRLLGCLATANPLVVNNDDLDEHGKPRIHSKTDIRGITHLHHALDACVIALSSLLFPRDGGVWELLIKRKLNQQEQATLKSRIGNAVEFAQDGSLHLTDLPAELKDQIRTRLAERRVVQHIPKEMTGLSVEQNSWRVVSIKDGEALLRQRMRQPDGTRPVKETKEKIGKLLGLFPGGGIGKLQRNKAALVIPDNYGLALDPEPQIIPFHKVPVRLRELRDKNGGKWPRVLRNGMLIRIPAGLYAGTWRVFSTKASLTLDLGATDKVTLGSKGDGQKREVRVKTLIRDGLEIVDFSLTGVSTPPKEL

SEQ ID NO: 16417 - protein, 1116 aa, unidentified
  REGION 1..1116: note = Cas Enzyme sequence
MKVSPDLHLAFDVGHSSIGWAVLQHDGNRAPNLLGCGSVIFQADDCLASQRRQFRRQRRHIRATRLRIARMKRLLAHLGVLTQPQLDKPGCAWPWLLAARVLRGGDKLTWPELWDVLRWYAHNRGYDGNKAWSAHEADIAANEEDTEKVENARALYTKHGTRTMAETWCSVCGLDPLGEKKSVALPGHLRPRGLNAAFPREDVEAEVERILRAHLGGLPGMDESLITALLRDHTAVAGVDLHLPRRYGQILADWSRSPGGVLFGQLMPRFDNRIIARCPITWQRVHDRMLAEGKDAERAKHEADKLAKVPAKDCPEFYRFRWAMQLANVQIATGVKRDTRPLEKDERAKVNAVMEAAGFLTPGDFKKTVREITGTKLDNLDQMLTHPDAGDALILDPARKAVASGVWETLFPTFDERVRKHALTKLRRGHSLRLGELVVEGDAEKFNAAADALLTAANTKKARGQRVSTRDELLALTVSAKLPTGRAPFSREVMCDAAKFVFDTGRHPTEGTEKSKDNGPLFRSEAIRHAQLQRAIDEQTNNHLVRHRLRLLEKLHEDLVKSPDYANGDSLRIARIAIEVNRDLRELSGKTAKQVAQDLGQRLANFKSVVARLEKAFDGKNVRITPGLIRKARIAEDLGWKCPYTGQSYDEFDLLHRKVDKDHIIPRSDRASDSLDSLAITFSAVNKMKGKRTAALFIEECQSQPVEGMANVSIRPLNDYKAFVEKLETFKGHDDDKRRKKRRKEKLLLRDYVEKTFTPGDLTQTSQLVRLGAEMLGRSYLGAQKPPVITSIPGSVTGAVRKSWDLIGCLATANPGVINPDEKDEHDRPKLRTKTEIRDITHLHHALDACVLGFADIFIPRDGGVWELLVQRRLDAGQQAQLRKGLGTMISFSKAGQPELQELPKVLREQIRKRLAERRVVQHIPAEIAGLSVEQNAWRVVDVKDGVATIRQRNRQPDGSRPQKQTTEKVSKLLGLSPEGKDGGEGKLAKLKAALVIPSNYGLALDPEPEIIPFHKVWNRLRELREKNGGKAVRVLRNGMLIQIPNKTGRGDYRGIWRITSTKRTEAYGLCFDLAPPDGIGMARGNAKLDVLLRDGLTILRPGLCGVAAVQTAAEH

SEQ ID NO: 16418 - protein, 1077 aa, unidentified
  REGION 1..1077: note = Cas Enzyme sequence
MSLYFIEQISDWKIMKVIEDEGGNHIWGFDIGKGSLGEAVLDGSEFKHVASLLLDADFGEIKTAAGLRRQMRTRKAHKAREKWLERCLSGFGMETLKRREVGIVNGQWTLISKGDERLEREFPPDGENICYNSIALRCKLLLGEKLEGWQIFKALNSAIQNRGYDENIPWNKSDASPSKKEDGDYAQKLSQYSREKSELFESFEGGEKYDYPCFFKAYKMGLWSPDNPERVEVRIGSDAQKAKGYVIPRKDVEREFERLVEAASKWYPAMKGKAMYIMYGIAETPYASFKPLLRKKFDLKRGAESDWTALGQKIPRFDNRIIDKCRLIPRLNVCKIRPLSEIRGEADLLHYEITLSLKLLNLRFFRNSNVESLSFGEFKAAFEIAKGAKYKMGKAALKKFLKSISASVLSEDQSEIEAPRESGRAAFSRPAMLLLKELIFSGMTPAEFYAKKSGEISNADPNKGLVASDLDFIKLMGNCGWSGIFIPDVDTFHFANKGAEPAKLINELIGSQNNPIVRHRLSFFYERIKFLESKFGIPDKVVLEFVREDFMGKEQKKRMQIEMKKRASEKMLIAKKLDEAGYKGGNLLLKMELLEKQGGVCLYTGEPLLPSELGVLEIEHIVPRSRGGPDAQYNYVLTREKTNKEKADRTPFEWLSSDPVKWAGYSDRVKARAGQLGRKRCELLLEKNAEELVEKYTALAETAHISKLAQKIVCLHFGFQFGGLSGTKRVFTVPGALTARIRTFYGLNKILHNEDLAHETLSYEGFLKRGEELDKKNRANKKHHALDAMCLCFAPTGVNSKRARVDMLLPPKIRSEKDAELFFRKYLDKLIPVDVAPKKPKLEDGIYSMRMVGGKKIMARRVNLVDLAYKGGQGQKPVYDISVLMDKKNPKEKKIINPQIRKLVADFARTNPSEDEWKKWCGECRLPSKNGLGTRVIRVLLNYGEPAEYKDLSKDGCGAFRKGKEHKGQIVWESTDGKYYVLPIYVHASKAKLLAELCANPKKKRICGIFTSHCMVKVGNTYNNKGELLLPEGVYMLNTIKTDGRGKLTNANGEESKPININYLMKAGMKKVSIKEL

SEQ ID NO: 16419 - protein, 1075 aa, unidentified
  REGION 1..1075: note = Cas Enzyme sequence
MLEHLFQRYEKIKNARYVLGLDLGVASIGWAIVDTSQQRIVKLGVVKFREGSASDNQDRRQKRGARRNRTRFLNRREKLRNLCQKYLTNGEPVLTTGSKNIWELRVKGLFEKLDNQEFAHILLHFNRHRGFKSNRKTDKGADTSAMKKTIAETRQKLEEKKQTLSQYYLDLIKDGQKIRANFTENDLCPDRAMYQEELDKIWEKQKEFEPYNQILTDELYQKIIEETIFYQRDFHQKKDKRNVGKCPFFPQNLRAPIYSMEYQEFRVRQIINNLRLTDDRNGVVDEFLPEKVKNYIYDRMTFQTKSKIKASEIISLIRKNKDCYRGSLLNYDKKEAFYGNRIGYELTQIFGETQAKKLIVEYDQKGENSALHKLIHTLRSCPFSENDKAEEWLRNYALNLKNEEGKSWITPEEAEKFALLNPDSGYGNLSTKALRLILPYLRQGFIYSEACEKAGLNHTDPNDEKDRKLIEKLEPIPAQERLNATVKKALNQMISLVNTIKKDKELPEIDAVVLETVRELKMPEEKRNGLKRRNDAKARRREEYAQILRQEGVRESGRNIRKYELWLELGLQDSEALNAIDIKNFSDFTRKVSAKAHEKYQLWKEANRRCPYTGEIIRLSDLFNTQLVDIEHIYPRSKTLDDSFMNKTIALRTANAQKENRLPLEYLKATGGNIEAFRTRVQHFQKGKRERFLATEIPEGFIARNYTDTAQITKVALDKLQEIFPDVIATNGSVTAVLRNAWKLQKSRDTLVHHAMDAVVISWTSRNIIQALSTISGQGGNIYNPQNERKQGWRKLPFSGFTEYVERELDKITVYHYNRKRLVQDKLDLKDKNPKKKPVVRGALHKETLYGKATVIHTDKKGKTKEVEVSTKRIKVKDDKGKPLPKSTLAKILSSDVRESVHQWLESPDSEYPKHPKTGHPIRKVRIDARLNPDKLLEICSHNLEKGQNAHFVANDQIYIAGIYQNAKGKRKLAYFSLYESLQNHKNKYPLLPETHPENPSFHLWLPVKAGDMFRFEEQEINGIYRVLSFSENSIVFAHHTKPIAEKDFKRSVDKFEYVTPVKVDILGNVTPKIT

SEQ ID NO: 16420 - protein, 1210 aa, unidentified
  REGION 1..1210: note = Cas Enzyme sequence
MKKRILGIDTGTNSLGWAVVDKNEDGSYSLINKGSLIFQEGVKVEKGIESSKAADRTSHRALRKQYFRRRLRKIEVLKVLIEFDWCPYLSPEDLHLWHVKKTYPMNEAFMSWQRTNDNFDENPYFYRHACLHRQLDLNEKSERYVLGRAIYHLAQRRGFLSNRLDQGNEDETGKVKDAISTLSKSMSDAGCDYLGDYFYKIYKEKGNTERIRTRYTDREEHYKREFYAICERQSLSKEQITKLEKALYFQRPLKGQRQGVGKCTFEPKKARVADSHPAFEMFRMLSFVNNIKIKGPHDVELRPLSAEEYEKARPMFFRKSKPQFDFEDIAKAVAGKGRYQHIKDDGDKEYKFNYRMTQSVTGCPTIASLMSVLGDDYENAIAERYTLSEGKTVKQMVNDVWNVLYSFSDKDKVRLWGKEKLQMNDEEAEKFSKIKLSHSFGSLSLAAVNKILPWLEQGLIYPHAVLMAKVPDIVSEEVWKTRGESITQELYNLIINFNPKDEAMQGTLDFCIKDVLKDMCDLAPGAVEKLYHPSMIETYPDAKKNAQGVYLLGSPRTNAVRNPMAMRSLHQLRKVINSLLREGTIDSQTEVHIEYARELNDANKRKAIAQWNKNRETLRKKYADDIRTLYKQACGKDIDPTDDDLVKFQLWEEQNHICLYTGDSIGITEFIGPNPSYDIEHTVPRSVGGDSTFENMTLCSSKFNREIKKAKLPTQLANHDAIMDRLEEWREKIEMLRKDVDRVKTHSGMDKQVKDRLIQKRHLLKLELDYFVGKYKRFQMEDVPEGFARRQGAGIGLVGKYAGLYLKSLFHKADDRTKSNVRVVKGATTAEYRKMWGIQEEYVKKSRDNHVHHCIDAVTIACIEPGEYNATARYYQQLEEYERTKSAKPSFPKPWATFTEDIKAIAQEMLVVHSTPDNMPKHARKYVKTSKGRKLALGDSARGSLHNDSYYGAIERDGEIKYVIRKELRSLKESDVENIVDEAVREKVKQAIAEKGFKQAMEDDIFMNQEKGIKIKKVRCFTSSVTNPLHIRTHRDESRKEYKRQFHVMPDGNYCMAIYEGEVKGKMKRTYEIVNMIDAAAYFKKSADMTKRYPIAPENKNGLKYRCTVRTGTQIILLQSDDEDINLKNIEDIARRFYYVAVMRSDGRIVLRYNQDARDATTLKKERKSGAYKVGELYRSEVMLSLSDFHALVEGVDFKINVLGEIVMLK

SEQ ID NO: 16421 - protein, 1104 aa, unidentified
  REGION 1..1104: note = Cas Enzyme sequence
MQYIVALDIGVASVGFAVIDKKTETVIEAGSNIFPEASATDNQMRRGMRQARRLKRRKRTRLDDFTKLWEEYAFAIPQVQENDIVGLKVKALRESISLDELYLILYSYLKYRGISYLEDAEDTSLSGTSAYANGLKLNAKELETNYPCEIQKQRLEQVGKYRGQIQIEDAQGEKLDLSNVFTIGAYTKEIQQVLCTQKNYHSEISDEFCEDYLEIFTRKRKYYEGPGNEKSRTDYGRFTTRLDENGDYITEKNIFEKLIGKCSVYKEELRAASASYTAQEFNLLNDLNNLTINGRKLEEHEKRIIIDKVKTSNTINMRKIIADVMGEKIEEFYGARIDKSEKEIFHKMEVYNKMRKALAEIHVNIEEFSRENLDEIGYILTINTDQEAMMEAFEHANVKLSEEIKDCLISLRKTNGALFSKWHSFSLKIMKELIPEMYQQPKEQMTLLTEMGVMRGQMDKFEKNKYIPVDAADEDIFNPVVRRAVRISFKILNALMKKYGTLEEVVIEMPRDQNSEEQKKWEKERQKKNEKELAYIEKKLAAEYNILLSPTDFSNQKQLGLKLKLWNEQDGKCLYSGKTIEPEDLIKHSELFQIDHIIPRSISFDDSRNNKVLVYGEENQKKGNQTPYYYLIHANNQWSFEQYKALVMKLSKKKEYGISKKKVQNLLYSEDITKAEVLRGFINRNINDTGYAARVVLNTVQGYFRAKEINTKVKVIRGSYTYQMRVNMKLDKNREESYAHHAVDAMLIAFSQLGYEAYRKLQGEFIDFETGEILNAEKWNAQMSDEIYEQYLYGKKWSNIRTQITKAEKQVKYWYHVDHKSNRGLCNQTIRGTRTYEGKTYKINKLDIRTKEGAALFKKLAFSEKESDREKLLVYKNDKKTYENLIQIAQEYSDSNNPFVQYEKETGDCVRKYAKNHNGPRIDKLKYTDGEVGSCIDISHKYGYEKGSQKVVLESLVPYRMDVYYKKEEQTYYLVGIKQSDVKCDNGEYVIDEDAYAINLVREKMIQPGQKRGDLEALGFEFQLSFYKNDIIEYEKDGEIVRERFLSRTMPKVKNYIETKPIDRAKYEKQKLVGLSKTKMIRKYRMDILGNYYMCSRENFSKYC

SEQ ID NO: 16422 - protein, 1104 aa, unidentified
  REGION 1..1104: note = Cas Enzyme sequence
MQYIVALDIGVASVGFAVIDKKTETVIEAGSNIFPEASATDNQMRRGMRQARRLKRRKRTRLDDFTKLWEEYAFAIPQVQENDIVGLKVKALRESISLDELYLILYSYLKYRGISYLEDAEDTSLSGTSAYANGLKLNAKELETNYPCEIQKQRLEQVGKYRGQIQIEDAQGEKVDLSNVFTIGAYTKEIQQVLCTQKNYHSEISDEFCEDYLEIFTRKRKYYEGPGNEKSRTDYGRFTTRLDENGDYITEKNIFEKLIGKCSVYKEELRAASASYTAQEFNLLNDLNNLTINGRKLEEHEKRIIIDKVKTSNTINMRKIIADVMGEKIEEFYGARIDKSEKEIFHKMEVYNKMRKTLADIHVNIEEFSRENLDEIGYILTINTDKEAMMEAFEHANVKLSEEIKDCLISLRKTNGALFSKWHSFSLKIMKELIPEMYQQPKEQMTLLTEMGVMRGQTDKFEKNKYIPVDAADEDIFNPVVRRAVRISFKILNALMKKYGTLEEVVIEMPRDQNSEEQKKWEKERQKKNEKELAYIEKKLAAEYNILLSPTDFSNQKQLGLKLKLWNEQDGKCLYSGKTIEPEDLIKHSELFQIDHIIPRSISFDDSRNNKVLVYGEENQKKGNQTPYYYLIHANNQWSFEQYKALVMKLSKKKEYGISKKKVQNLLYSEDITKAEVLRGFINRNINDTGYAARVVLNTVQGYFRAKEINTKVKVIRGSYTYQMRVNMKLDKNREESYAHHAVDAMLIAFSQLGYEAYRKLQGEFIDFETGEILNAEKWNAQMSDEIYEQYLYGKKWSNIRTQITKAEKQVKYWYHVDHKSNRGLCNQTIRGTRTYEGKTYKINKLDIRTKEGAALFKKLAFSEKESDREKLLVYKNDKKTYENLIQIAQEYSDSNNPFVQYEKETGDCVRKYAKNHNGPRIDKLKYTDGEVGSCIDISHKYGYEKGSQKVVLESLVPYRMDVYYKKEEQTYYLVGIKQSDVKCDNGEYVIDEDAYAINLVREKMIQPGQKRGDLEALGFEFQLSFYKNDIIEYEKDGEIVRERFLSRTMPKVKNYIETKPIDRAKYEKQKLVGLSKTKMIRKYRMDILGNYYMCSRENFSKYC

SEQ ID NO: 16423 - protein, 1130 aa, unidentified
  REGION 1..1130: note = Cas Enzyme sequence
MKNYRIGVDVGDRSVGLAAIEFDDAGLPIKKLALVTFRHDGGLDPTKNKTPMSRKETRGIARRTMRMTRRRKQRLRDLDKVLEKLGYTVPEGPEPETYEAWTSRALLASIKLASADELNEHLVRAVRHMARHRGWANPWWSLDQLEKASQEPSETFEIILARARELFGEKVPANPTLGMLGALAANNEVLLRPRAEKKRKTGYVRGTPLMDAQVRQGDQLAELRRICEVQGIEDQYEVLRMAVFYHKPPYVPKDRVGKDPLNPDEIRASRASLEFQEFRILDSVANLRVRTGSRTKRELSESEYDTAVDFLMSYTGKEQPSWADVAEEIGVPGNRLIAPVLEDVQQKTAPFDRSSAAFEKAMKAKTEARKWWESNDDDQLRSLFIMFLADATDDTTAAAEQAGLYDLFASWPEEERETLSNIAFESGRAGYSATTLSKLSEYMHEYRVGLHEARKAVFGVDDTWRPPLDKLEEPTGQPAVDRVLTILRRFVLDCERQWGRPHAITVEHARTGLMGPTQRQKILNEQKKNRADNERIRGELRESGVDNPSRAEVRRHSIVQEQECQCLYCGTMITTTTSELDHIVSRAGGGSSRRENLAAVCRRCNGKKNRELFYRWAGPVRLQETIDRVRQLKAFKDPKKAKMFKNQIRRLKQTEADEPIDERSLASTSYAAVAVRERLEQHFNEGLAPDDKSRVVLDVYAGSVTRESRRAGDIDERILLRGERDKNRFDVRHHAIDAAVMTLLNRSVALTLEQRSQLRRAFYEQGLDKLDRDQLKPEEDWRDFIGLYPASQEKFLEWRKAATVLGDLLAEAIEDDSIAVVSPLRLRPQNGAVHKDTIAAVKKQTLGSAWSADAVKRIVDPEIYLAMKDALGKLKKLPEDSARTLELPDGRCIEADDEVLFFPENAASILTPRGVAEIGGSIHHARLYGWLTKKGELKVGMLRVYGAEFPWLMRESGSRDVLSMPIHPGSQSFRGMQDAVRKVVESGEAVEFAWITQNDELEFDPDDYIAHGGKDELRQFLEFMPECRWRVDGFYDARRLRIRPALLSREQLPSEIQARLDAKNLSTEESVLIKALDNGLFISTSGLLPLGSLKVIRRNNLGFPRWRGNGSLPTSFEVRSSALRALGAEG

SEQ ID NO: 16424 - protein, 1063 aa, unidentified
  REGION 1..1063: note = Cas Enzyme sequence
MKYRIGIDLGTNSLGWAAVQLSEDLKPRQLMDMGSRIFSDSRHPKDKSSNASKRREPRSSRRNRDRKLARGRAMMHVLIEAGLMPKKESDRKILEAHDPWVLRARGLHEKLTPHELGRALFHLQQRRGFKSNRKTDGVGGGAMLDAIKKSKTLMSQHGVKTLGELFGKPRLEQIKKNETSTYGKRKPLPQARVKAQMNGSKMAYDYYPSRDLILDEFEKIWDAQTIYHPNELNNKFKKSIRKIIEYQRPLKPQKVGRCTFLEEEPRAPKALPTAQYARILQEVNALKVGATGEVPRPLNENERTSLIELLITPTSKTSKRTYKTIRKALNLPDSQKFSHESNKRDHLMGDTTAARLMQEDSWGKSWLSLTREEQDIITIQLLEVEQSDDLINWLNKRHDIDQERANNIEKTILVDSHGKLSKAALEKILPHLENGLRYDEAVQCAFGDNAGKGDGVIYDEALPYYGEVLSRHTAFAKDNPRNDEERFGRVANPTVHVAMNELRKVVNDLIKRWGSPEQVVLELARDLPLSGRGLKELDRQQTKSQNANEERNAWLEKNGLKPNYDNRFKLRLFEENLESNGGIAVCVFSGKTISKTDCFSSEIEIEHLLPLSKTLDDSLANKVLCYREANRLKGNKSPHEAFGNSPSGYDWESISQRASQLKSNKAWRFTPNAMKQWEERGGDFLDRQLNDTRYISRLGKTFIESLFGGQGSKGQSRQVWVVPGRLTSNLRQYAGFNSLVGLTGGNRKDRTDHRHHAVDALVIALTDQSMVHRAANLAKNEDQLKYSEIMKTMAEPLKRYRLSAEDRLSKLIVSHKPDHGIYGGMHNDTALGITSEVNSNGMNMLVTRKSLSDLTDINKILDEKLRTKFESNIKGLPQKDIPQALVNAGMAMTPPVYKVRIKEYAKPSSFVTIEHGKKNEFKKAYKGDSNYCYDIFIGQNGKWDGEIVTTFQAYQYSRSRAKGTTKSEWWKTNKRPDGSPLVMRIRKGDMLEINSGDGMQRVVIVYKFSKGAICMSDHFEANASSRIRSKDLLGLVKSPLALQKCNAIKITVSPSGKIKRFKY

SEQ ID NO: 16425 - protein, 1050 aa, unidentified
  REGION 1..1050: note = Cas Enzyme sequence
SNRLDQGNEDETGKVKEGISSLSKSMEEAGCEYLGDFFYKIYKEKGNTERIRTRYTDREEHYKKEFYAICKQQRLSEEQISKLEKALYFQRPLKSQRQGVGKCTFEPKKSRVADSHPSFELFRMLSFVNNIKVKGPHDVELRPLTTEEFEMAKPAFFRKSKPQFDFEDIAKSIAGKGKYQYIKEIGEKPYKFNYRMSQSVTGCPTIANLMSLFGDDYEEGIAERYTLSEGKTPKQMLNDVWNVLYSFSDKDKVKQWGKEKLQLSDEEAEKFSKIRLTHAFASLSLAAINKILPWLEQGLIYPHAVLMAKVPDIVGEEVWKSRGEAITKELLSLISNFNPKDIGMTGTLDFCIKDILKDMCDLAPGAVEKLYHPSMIETYPDAKKNSQGIYQLGSPRTNAIRNPMAMRSLHQLRKVINTLLQEGTIDNQTEVHIEYARELNDANKRKAIAQWNKDRENKRKKYAEDIRSLYKQESGKAIEPTEDDIVKFQLWEEQNHICLYTGESIGITDFIGPNPSYDIEHTVPRSVGGDSTLENMTLCSSKFNRDVKKAKLPTELPNHDDILGRLEGWREKIEKLRKDADHVKTYSSMDKATKDRLIQKRHLIRLELDYWVGKYKRFQMEEVPEGFARRQGAGIGLVGKYAGLYLKSLFHKADDRSKSNVRVVKGATTAEYRKMWGIQDEYVKKSRDNHVHHCIDAITIACIEPGEYNSTARYYQQLEEYERNNAPKPSFPKPWPTFTEDIKAIAQEMLVVHSTPDNMPKRARKYVQTSNGRKLAMGDSARGSLHNDTYYGAIERDGEIKYVVRKTLSSLKETDIENIVDDAVKEKVKHAVAEKGFKEAVAGDIFMNEMKGIKIKKVRCFTPAVTNPLHIRTHRDESRKEYKRQYHVTLDGNYCMAIYEGEVKGKLKRTYEIVNMMDAAAYYKKSAGMTSLYPIAPENKNGLRFRCVVRTGTQIILLQSDNEEINLTDKEDLAKRFYFVAVMRSDGRLVLRYNQDARDATTLKKERKSGAYKTGEQYRSEIMLSLSDFHALIEGVDFKINVLGEIVMFK

SEQ ID NO: 16426 - protein, 1210 aa, unidentified
  REGION 1..1210: note = Cas Enzyme sequence
MKKRILGIDTGTNSLGWAVVDKNDDGEYSLIHKGSLIFQEGVKVEKGIESSKAADRTAHRSLRKQYFRRRLRKIKVLEVLVEFGWCPYLSSEALHLWHVNKTYPMDEAFMSWQRTNDNFEENPYYYRHLCLHRYLDLNEQSNRYILGRAMYHLAQRRGFLSNRLDQGNEDETGKVKEGISSLSKSMEEAGCEYLGDFFYKIYKEKGNTERIRTRYTDREEHYKKEFYAICKQQRLSEEQISKLEKALYFQRPLKSQRQGVGKCTFEPKKSRVADSHPSFELFRMLSFVNNIKVKGPHDVELRPLTTEEFEMAKPAFFRKSKPQFDFEDIAKAIAGKGKYQYIKEIGEKPYKFNYRMSQSVTGCPTIANLMSLFGDDYEEGIAERYTLSEGKTPKQMLNDVWNVLYSFSDKDKVKQWGKEKLQLSDEEAEKFSKIRLTHAFASLSLAAINKIFPWLEQGLIYPHAVLMAKVPDIVGEEVWKSRGEAITKELLSLISNFNPKDIGMTGTLDFCIKDILKDMCDLAPGAVEKLYHPSMIETYPDAKKNSQGIYQLGSPRTNAIRNPMAMRSLHQLRKVINTLLQEGTIDNQTEVHIEYARELNDANKRKAIAQWNKDRENKRKKYAEDIRSLYKQESGKAIEPTEDDIVKFQLWEEQNHICLYTGESIGIRDFIGPNPSYDIEHTVPRSVGGDSTLENMTLCSSKFNRDVKKAKLPTELPNHDDILGRLEGWREKIEKLRKDADHVKTYSSMDKATKDRLIQKRHLIRLELDYWVGKYKRFQMEEVPEGFARRQGAGIGLVGKYAGLYLKSLFHKADDRSKSNVRVVKGATTAEYRKMWGIQDEYVKKSRDNHVHHCIDAITIACIEPGEYNATARYYQQLEEYERNNAPKPSFPKPWPTFTEDIKAIAQEMLVVHSTPDNMPKRARKYVQTSNGRKLAMGDSARGSLHNDTYYGAIERDGEIKYVVRKTLSSLKETDIENIVDDAVKERVKNAVAEKGFKEAMAGDIFMNEIKGIKIKKVRCFTPAVTNPLHIRTHRDESRKEYKRQYHVTLDGNYCMAIYEGEVKGKMKRSYEIVNMMDAAAYYKKSAGMTSQYPIAPENKNGLRFRCVVRTGTQIILLQSDNEEININNKEDLARRFYFVAVMQKDGRLVLRYNQDARDATTLKKERKSGAYKVGEQYRSEIMLSLSDFHALVEGVDFKINVLGEIVMFK

SEQ ID NO: 16427 - protein, 1216 aa, unidentified
  REGION 1..1216: note = Cas Enzyme sequence
MKKRILGIDTGTNSLGWAVVDKNDDGEYSLIHKGSLIFQEGVKVEKGIESSKAADRTAHRSLRKQYFRRRLRKIKVLEVLVEFGWCPYLSSEALHLWHVNKTYPMDEAFMSWQRTNDNFEENPYYYRHLCLHRYLDLNEQSNRYILGRAMYHLAQRRGFLSNRLDQGNEDETGKVKEGISSLSKSMEEAGCEYLGDFFYKIYKEKGNTERIRTRYTDREEHYKKEFYAICKQQRLSEEQISKLEKALYFQRPLKSQRQGVGKCTFEPKKSRVADSHPLFELFRMLSFVNNIKVKGPHDVELRPLTTEEFEMAKPAFFRKSKPQFDFEDIAKAIAGKGKYQYIKEIGEKPYKFNYRMSQSVTGCPTIANLMSLFGDDYEEGIAERYTLSEGKTPKQMLNDVWNVLYSFSDKDKVKQWGKEKLQLSDEEAEKFSKIRLTHAFASLSLAAINKILPWLEQGLIYPHAVLMAKVPDIVGEEVWKSRGEAITKELLSLISNFNPKDIGMTGTLDFCIKDILKDMCDLAPGAVEKLYHPSMIETYPDAKKNSQGIYQLGSPRTNAIRNPMAMRSLHQLRKVINTLLQEGTIDNQTEVHIEYARELNDANKRKAIAQWNKDRENKRKKYAEDIRSLYKQESGKAIEPTEDDIVKFQLWEEQNHICLYTGESIGITDFIGPNPSYDIEHTVPRSVGGDSTLENMTLCSSKFNRDVKKAKLPTELPNHDDILGRLEGWREKIEKLRKDADHVKTYSSMDKTTKDRLIQKRHLIRLELDYWVGKYKRFLMEEVPEGFARRQGAGIGLVGKYAGLYLKSLFHKADDRSKSNVRVVKGATTAEYRKMWGIQDEYVKKSRDNHVHHCIDAITIACIEPGEYNATARYYQQLEEYERNNAPKPSFPKPWPTFTEDIKAIAQEMLVVHSTPDNMPKRARKYVQTSNGRKLAMGDSARGSLHNDTYYGAIERDGEIKYVVRRPINSFEKESDIESIVDPSVREIVRKAIAKKGLKQAVSEDIYMNEEKRIKINKVRCYAKTVKNPINIRKQRDLSQKEYKQQFHVQNESNYILAIYEGLVKGKAKRTYELVKSIEAVEFYKKSTDRADFPSMVPQSKNDLPLRYKLKIGQHVLLYENSALEINLSDIRDIAKRLYVITGLSYLPVGKGFGTIVMRHHQESRMAKDIKTTNGNFKNRDSYRPSIIQLHTQFKALVEGEDFHINSLGEIKPIRE

SEQ ID NO: 16428 - protein, 1210 aa, unidentified
  REGION 1..1210: note = Cas Enzyme sequence
MKKRILGIDTGTNSLGWAVVDKNDDGKYSLIHKGSLIFQEGVKVEKGIESSKAADRTAHRSLRKQYFRRRLRKIKVLEVLVEFGWCPYLSSEALHLWHVKKTYPMDEAFMSWQRTNDNFEENPYYYRHLCLHRYLDLNEQSNRYILGRAMYHLAQRRGFLSNRLDQGNEDETGKVKEGISSLSKSMEEAGCEYLGDFFYKIYKEKGNTERIRTRYTDREEHYKKEFYAICKQQRLSEEQISKLEKALYFQRPLKSQRQGVGKCTFEPKKSRVADSHPSFELFRMLSFVNNIKVKGPHDVELRPLTTEEFEMAKPAFFRKSKPQFDFEDIAKAIAGKGKYQYIKEIGEKPYKFNYRMSQSVTGCPTIANLMSLFGDDYEEGIAERYTLSEGKTPKQMLNDVWNVLYSFSDKDKVKQWGKEKLQLSDEEAEKFSKIRLTHAFASLSLAAINKILPWLEQGLIYPHAVLMAKVPDIVGEEVWKSRGEAITKELLSLISNFNPKDIGMTGTLDFCIKDILKDMCDLAPGAVEKLYHPSMIETYPDAKKNSQGIYQLGSPRTNAIRNPMAMRSLHQLRKVINTLLQEGTIDNQTEVHIEYARELNDANKRKAIAQWNKDRENKRKKYAEDIRSLYKQESGKAIEPTEDDIVKFQLWEEQNHICLYTGESIGITDFIGPNPSYDIEHTVPRSVGGDSTLENMTLCSSKFNRDVKKAKLPTELPNHDDILGRLEGWREKIEKLRKDADHVKTYSSMDKATKDRLIQKRHLIRLELDYWVGKYKRFQMEEVPEGFARRQGAGIGLVGKYAGLYLKSLFHKADDRSKSNVRVVKGATTAEYRKMWGIQDEYVKKSRDNHVHHCIDAITIACIEPGEYNSTARYYQQLEEYERNNAPKPSFPKPWPTFTEDIKAIAQEMLVVHSTPDNMPKRARKYVQTSNGRKLAMGDSARGSLHNDTYYGAIERDGEIKYVVRKTLSSLKETDIENIVDDAVKERVKNAVAEKGFKEAMAGDIFMNEIKGIKIKKVRCFTPAVTNPLHIRTHRDESRKEYKRQYHVTLDGNYCMAIYEGEVKGKLKRTYEIVNMMDAAAYYKKSAGMTSLYPIAPENKNGLRFRCVVRTGTQIILLQSDNEEININNKEDLARRFYFVAVMQKDGRLVLRYNQDARDATTLKKERKSGAYKTGEQYRSEIMLSLSDFHALIEGVDFKINVLGEIVMFK

SEQ ID NO: 16429 - protein, 1222 aa, unidentified; identical to SEQ ID NO: 15068
  REGION 1..1222: note = Cas Enzyme sequence

SEQ ID NO: 16430 - protein, 1222 aa, unidentified
  REGION 1..1222: note = Cas Enzyme sequence
MEKRILGIDTGTNSLGWAVVDKKEDGTYSLIRRGSLIFQEGVKIEKGIESSKAAERTSHRSLRKQYFRRRLRKIEVLKVLIEFGWCPYLTPEALHQWHVKKEYPMDEAFIAWQRTNDNYDENPYYYRHVCLHEKLDLNEKSGRYMLGRAMYHLAQRRGFLSNRLEQGDDEETGKVKEGISSLSKSMLEADCEYLGDYFYKICKEQGNTERIRTRYTDREEHYKKEFYAICKRQSLSESQVSKLEKALYFQRPLKSQRQRVGKCTFEPKKARMADSHPTFELFRMLSFVNNIKVKGPYDVELRPLTTEEFERARPMFFRKTKSQFDFEDIAKAIAGKGKYQYIKEIGDRPYKFNYRMTQSVTGCPTIASLISVFGDDYEAAIAERYTLSDGKTPEQMVNDVWNVLYSFSDKSKVKQWGQEKLQMNEDEAEKFAKIRLTHSFVSMSLAAVKKILPWLEQGLIYSHAVLMAKVPDIVGEDVWKSRGESITKELLSLMSNFNPKDVAMTGTLDFCIKDVLKDICDLEPGAVERLYHPSMIETYPDAKKNSQGVYQLGSPKTNAVRNPMAMRSLHQLRKVINALLRDGTINNQTEVHIEYARELNDANKRKAIALWNKNRENLRKKYAEDIRALYKQECGKMIEPTEDDIVKFQLWEEQGHICLYTGESIGIADFIGPNPNYDIEHTIPRSVGGDSTLENMTLCSSKFNRDIKKAKLPSQLPNYDTIISRLEGWREKIEKLRKEVDRVKTHSGMEKSVKDRLIQKRHLLRLELDYFVGKYKRFQMEEVPEGFARRQGAGIGLVGKYAGLYLRSLFHKADDRNKSNVRVVKGATTAEYRKMWGIQDEYEKKSRDNHVHHCIDAITIACIEPGEYNATARYYQQLEEYERSKAVKPSFCKPWPTFTEDIKVIAQEMLVVHSTPDNMPKHARKYVQTSNGRKLAKGDSARGSLHNDTYYGAIEREGEIKYVVRRPISSFEKVSDIESIVDPVVREIVMRAVEKKGLKQAVSEVIYMNEEKGIKINKVRCYVSGSISGKIIDVRNQRDKSLKEYKRRYYVENGDNYVMGIYEGLKGKKVCREYELANMLDASTFYNKKADDSILPQKSVIGVLDLPLKYRLFKGLHVILYEKSREEVDILNTQDLVPRLYVITGLSTSSTTTGGKTYRYGMVSLKHAQEARPSSECKEKKGVYKNGEEYRAKIVMNHNQFDALVEGVDFNISVLGEIVLLK

SEQ ID NO: 16431 - protein, 1227 aa, unidentified
  REGION 1..1227: note = Cas Enzyme sequence
MKKTLGLDLGSNSLGWAILDDATGDILDKGVVVFPEGMDPTADSTETPAAIRRAARMARRMKFRRKIRKWRLLKLLLDNKMCPLKEEELEGWKKEGRYPTGNAAFIGWLKASDTKNPYCDRAAAADGPVPPEVLGRALYHLAQRRGFKSSRKDEADGEEEGTSSAREKELGAVKAGIKALDEEIRASGCKTLGQYFRKILDEDLGKPARRRIRKRYTGRIEHYEKEFEAIMDAQGDAVPADLRKKLHDAIFDQRPLRSQAHLVGPCPLEPKNPRAQIAHPAFEEFRMLAFVNNLTLEDKNREWRDATGAPLYPLSAEDRAKICKAFMKAAPTFKFKDISKLFKKDPRFKTEKMRFHYYRDDETLSSCSLWHRLEGIFGADGGDGPFQYQAAFDALTFYNDEDKLRGWLAKHHPELGEDAAKSFLKIHPREGNAQYSLKAIRLILPWLRKGYQLSDARFFAKLPEVVPGFAENEERIIRDLLDLEDAYRRERANRAGENVRANERPLVPLSDRWKDYLAETWGVDEAGWKRLYLRGEDPYEAQTEIRRGGETVRLAKPRLPRVELGMIRNPLVQRSMTTLRRLVNYLGDHGKIDSDTTIRLELARDVNDFATRKGWQEWQKSRQKLREEAREAVVSLGADPTEDALDRYVLWKEQGEKCLYTARAISLRDLLGGNEFDIEHTIPRSLSGDDSMANKTICEAAYNRQTKMGRIPRECPNWDEIDVRLKPWRDNLERLEKGVKAKSAAARAATDPKAKASARAKAVELRFERDYWRDKLRRFDATREQLEFGTGDLTGFKKRQLVDTGIMTRHAVDLLKCVYPRVFTVNGAATAFARKAWGIQGDEAKSRDEHTHHATDAMVIAALSPARFTAICSALKDDGQARRRPCDVCPPPYADFAEKVRRATGEILVKHVLRQTTLRQSSKRNILAKAHPPKGNPEGKKIKAVLSRGDTVRGQLHKDTFYGKIQPPGGGEQTFVVRKPLIGKVADAKALAKDIVDPAIKGIVEAAVQAAEASGKSVFEPGDIAMPSGVPILKVRVYTKPGQVKLRDHAMPSRQEYKTPYYVNTAEGSNFRLALFLRQGEFSVVADNALRWAQDHKKSGYVPLHEQAGFLGYVMPGTMALVHAPGNPGELRTLSQTELRKRLYRVVKFRKDGLITLRFHTEARPSTVLAKVLVEAGKHAAGESSISLETPHELLLIRPSTFQNQVLFEGIHFRMMLDGSIQFLDPA

SEQ ID NO: 16432 - protein, 1056 aa, unidentified
  REGION 1..1056: note = Cas Enzyme sequence
MATVLGLDVGPNSIGWALLEENNENPHIIDMGVRVFEAGVNDLNTGKEQSKNAARRDKRQIRKMLKRKKSRRNKLLLYLQQHKLLSEVDLEIFFNNTNPYELRRKAIYEKISLDEFSRALYHICQRRGFLSNRKTDSDEETGAIYQGGKSGATGISELQQGIEEGGFLTLGEYLCSLDPKEKRLRNRYTLRKMYQNEFEVIWAKQAEFYPDVLTEERRKHISDVIIFFQRPLKSQKRNVGKCKFEKEKNRCHLSSFEFQEFRMLQQVNQLRIRMKNRFGEDAEQLTYNEREKLINYLSANTELKFGDNYKKFKKVLGIEEGAWLRLNLEHLDKLIGLKTKCAFKKLLDKKFETFTNEQIQAMYHTSLFAESNEWLIEYAQSKWNLTEDEAIAYSKIKLEKGYGSLSIKAINKMLPYLRDGLMYHEAAASAGYEHNLFEEQDKVEILDKLPEPEKVANPIVMTALYEIRKVVNCLIEHYQFKPDVVRLEMARDLKIPLQKRLDIASENKKRQSRHNEIADILNKEFGIKYPSRNDIIKYKLWEECKHTCPYTGKPIALKQIFGDSIEYEVEHIIPYSRCLDDSFMNKTLCERHENSKIKGNKTPYEAYHNDKAKYESILQRVNEFPNRKANKFKEKEIAQLDDFISTQLNDTRYISKIAKQYLRHITPEVNVGNGTITALLRHLWGMNSVLTNPFLGLDEKSTDKSEKNRSDHRHHAIDAVAIACTTRSIFQKLSSLHNEFDLQFLDTREKAEYLDKEKFPFPWEGFRDEVKKMAARIIVSHRFKYKVSGPMHEETLYGKLYNIDGSERLNKKGVPLYTVRKPLTSLTENEILSIADPVVKEVVLERIMEFGGKIDAKGKLVNVSKESFKEPIYLPNPVKGYPNIINKVRVLKPFSNPIQIRDYNIWAESGNNHHSIIYTDETGKLGERVTTLYNAYSRQKNNQKVIETDLGPNNEILISLMRNEMFFVGAVPNDIDYNNKSLYPLIFENVYRLQKFSEGYYTYRSHSISILEFKDAEGKKIEPGLARYQSLNSFIEKNITKIIVDPIGFIKIPENN

SEQ ID NO: 16433 - protein, 1100 aa, unidentified
  REGION 1..1100: note = Cas Enzyme sequence
MLNPKLQERLKGFLPLVRVGIDFGEGAGGISVVEGNKILHAETYVDFHQTTLEQRRQLRRGRRTRHAKKMRLARLRSWVLRQKLPDGSRLPDPYHVMRDKRFQVQPGVFETPGQNPAQSPSWIDLAKEGKTEPAGFVKSLTLIFQKRGYKWDAIALDEMTDAKLKDFLETARIPNDKLYAEVKGQIDLRRDHPDDPVRGKTKVAPEDLLDLLNRARTRPREPRIAEHRDVKAADLREVIEGFAKAANLPPETIERWQRELCGGATADGQEKPGLLNKVLRPARFENRLKTGCAWCGKPTPRKAKVRYIAYAAAVCNLRVREGRRVRPLDPTEQEVFWHWWRLQEAATAQPAQPATESQADKTPEKAKSETAPKMGGIEGHLRRLGAQKEMARQLYDLLWNPQPKGRASLCKRHLEQAALGKTMKDAGVDWQTISVRKAPNPCREQHDKRVLHRLEQILFKPGKTGEEAWRYGPVQFITLEVPKPQTEQARKGEQKARKVETFTERLSKETGGVCIYCGPAHPRPAGDKDHIFPQSRGGPDVWDNLVPACKPCNTEKGDRTPFEWLGTNPERWDAFSTRVEDLAHKGVAAPREDSEKSKVARYLPISERKRALLLSQDSEYPENPTPLAHVGSRPRQFVVELQRLCGKYGVKPPRADYQLGEPFVQRMDGRTTAQLRKSWLKKADETTDNFPLKNEWDLLNHAQDAGLIAACPPHTWRDTIFCHRALRPNREGKWVVQPELAIPELAPDWAEYMERRTWPLVRVLGRYPVSWKRTFADQNFYQRPEKLDDKRLRQHVPLVALKYKPKDPGKKPSASETQILNPYVAAQFPVLAESVLEEREQWQKAHPKPDKAERKKLRELGLTPAHTIAKEKLQAKFPGIRHVKVEKQPGGKLARVEPRDGPPRKIQLKKASEAAVFWLKQGKTLNEKNLVISVRWPSIFQKFGVPRHDPPIPEDAAILDVWPRHKLIWLDQATGHEPAFYRVKEFSETEVTVLPENAVTDELAKRLNLRRQRAKKKSPTAALAAEPEEPEATPAAEDEEPEPSARTQEIKLHRKDLAAYFESQRGEDANESPGDGSCRTEFCTDSRSAKNGRSKIHRPD

SEQ ID NO: 16434 - protein, 1122 aa, unidentified
  REGION 1..1122: note = Cas Enzyme sequence
MKNFSFDVGMTSLGVAVNDGGEIVFGDVLLMHPEAGAVKAQSERRRLFRTRESHKAREAALESLWRSTGRAPLQRKRFEKTKDANGKNRFVKTAADERLEREFPRQGDDTVYASSLLRVMLLEGKPLADWQIYKALHAAIQRRGYDSNVPWKTRADEREKSGKDENPEEQVGRFDKALRNMTSDARYHLPAYYDAWKMGLWDAQTKQVAHIRQPQRSKDRGKDRVRGYNPSRELVTNEICRLLDQAAAQIPQLKEHLTEDKRNQLLYGKPHNTGDLRYPSFSKVDGILGQKYPRFENRIVSNCALIPRLNVCKSEKPLAIEVGFLLRLVNWRYEKEDAGGERSAPSLNGRQLSEVFSKCEAAWEKKSCEYAPAEYAKCFKMTPSKIAKMADELGGSVKEGHAEIPASEHTGRSRFSQPALYLMKSLILSDKTPKGFGAELSQLVDAMAKKNPGAKFGYRVFPDVPYKYFREDFEFLDKMGDSRDAIYVPDMSLAERYGGKDGDVDSAVRKVINTCNWPELRHRLGVFDRELEILTAKYGKPDAVHLEFVREDFLSKKRKNEYTARADAGKKARQTAMDELKQRNMAVTEKNILRYRLFEEQNKQCVYTGDSIDIGAPESYDIDHIFPREDGGPDAYYNKVLTSRETNQQKGKRLPCECDFINRSWSAFGTLVKGLPLGKSKKKLLLASTRDEAEDLVDKYTGLSGTAHIARLARDIACLRYGWQPGATGEHQRVFVFSGGLTSKVAKKYGLYKVLGDGSMKYQKDRTDHRHHALDAMVISYLHQWTRDKNKTEFFRFPKGIDADYFRLALSKVYPHYITRVKPAIAEQPKSRSDVNKKEFKNISKDPQERGQWYTNKSESGKGTSQHGYIFYKNAKGKVRAKTVHAFRSPYAAMKEVEKKSDEIIGMFYPGKSVFLPSETQVTGTKLGRGSRLKFGAYQIVKLQKDTVIESVESREKQPADDNSASARYRIKRGELKKIKICNKLLQRKPFDLNEFGVHKDLSLTGNYRLDDSARVLANCEIVNTDTGEVETVKFSKLVQHLDKIGWGDALDENDVVAIDHIHATYIKEAKADDLPGQKLPEGRYLIKQFSGGKVQLVAQDGTVYRLQSNQLDRFTIDRSEN

SEQ ID NO: 16435 - protein, 1122 aa, unidentified; identical to SEQ ID NO: 16434
  REGION 1..1122: note = Cas Enzyme sequence

SEQ ID NO: 16436 - protein, 1077 aa, unidentified
  REGION 1..1077: note = Cas Enzyme sequence
MQQKPQRYILGLDLGIASVGWACVWADENEHPIGLLDCGVRTFERAEVPKTGDSLALARRQARSARRLIRRRAHRLLRLRRMLKREGVLSAADFDENGLVRGLPIDAWALRVAGLDRKLSNKEWAAVLLHLVKHRGYLSQRKNETQSKDKELGRLLAGVNGNREALQNRSDEYRTAAELAVKKFAAENNGSLRNKGGDYSHTFDRKDLQRELHLLFERQRALDNPFTSSEMEAAVDELLMKQRSALQGEAVLKMLGCCTFEPSEYKAAKNTYSAERFVWLTKLNNLRIQYNGEERALSEAERRLLLDEPYQKAKLTYKQVRTILELPESAVFKGLRYGHGEDGLKAESGTLMEMKAYHAVRKALKDAGLEGEWENRIRNPELLDAIGTAFSLYKTDEDIRANLAAFRLSENVLEALLAGLNFDKFVHLSLKALAKILPLMEQGMRYDEACKEAYGDHYGAKEQEDHRLLPPFVADDIRNPVVFRTLTQARKIVNEIVRRYGSPLRVHIETGREVGKSFSDRKEIEKRQEENRKERERAAAHFKELFPNFAGEPKAQDILKLRLYEQQHGKCLYSGKEIDLRRLPEKGYVEIDHALPFSRTWDDSFNNKVLVLGKENQDKRNRTPYEYLDGKGNSGAWRAFAERVSGCRFPYAKKQRLLTQKLDEKTEQGFLERNLNDTRYVARFLCQFIEEKMHLEGAGKKRVFASNGQITALLRGFWGLKKVREENDRHHALDAVVVACSSVSMQQKITRHFRYREELEHIDRETGEVIHGFPQPWEFFRQEVMTRVFSDDPVSELAEKLDSRPEAVHEFVTPLFVSRAPHRKVTGQGHLETIRSAKRLDEKISVVKLPLTQLKTKDIERIVGYPNREPALYDALAARLAAFKDDPAKAFSEPFYKTGKDGKCGVLVKAVRVENVQKSGLLVRKDESGKMQGVADNATMVRVDVFGKNGKNYLVPVYAWQVEKGELPNRAVVAYADEEDWDEMDDSFEFKFSLYPNDLVEVVTKKDKFFGYYSGFNRATGAINIKEHDLSKSKVKNGVYEGIGVKTAQSFQKYQVDTLGKTIRLCKPEKRMGFKKK

SEQ ID NO: 16437 - protein, 1076 aa, unidentified
  REGION 1..1076: note = Cas Enzyme sequence
MSEIRRVLGLDLGTNSLGWCLLEENERQEPLEIVALGSRIFPMALEDKTPVPKNHARRRARLDRRRNQRRARRKARMRNYLTSLGFISPELTQDPQPERFYNQLGRQGDQGASDVYALRKRAISEPLPLDALAKIWMSFAARRGFQSARKTKLGNLLDDPRAAAIYARMEAEKPEQGEDSEEREAFQEIADLKAAIAKSKAETLGQFLADLPPQARRRGWRTDRQMYKDEFAKIWETQAPHHPELADEVRLALFNIIFNQRPIRFKSNTRGDCSLEKGCKRAARAWPDSQRFRYWHDIHNFGWIDPETQTKRSLKPEEKGKLAEALEHAPQLSWKAVKELLGIPAYIVSNLEEAKTKGKGLKGNRTSCTLRKLLEEGWDSLSPAHQQALVEDLLTIDSKKGLFKRLVDHWGVEETKAVKLCMLELEPGYMSYSRKAIGKILPLMIHFPTDIPWTLDKAVEAAGYTPVWEQEPGQEDSLPKRGILPNPIVNRSSTQMRKVVNAIIETYGKPDVIRLEMGRDLKLSARQKESANKTRKENERLNQKAEDEFKKIQDDRPDLSAGMRAFYKLKYRLWQEQGRICPYSVDEKGQAMKSICIGQLFSDETEVDHIVPYSRSMDDSFMNKVLCFRNANQNKGNRTPKEWLQNNPAHWEQVAQAAKKLSPAKTKRFFLTEADLPKDFLNSQLNDTRYVSREAHGYLKQLGCDVSITKGHTTARLRRVWKLNNLLDPSLSGEKNREDHRHHAVDACVIALTSRRVYQQVLDNARQEEQKRNGSGAADANVMHFFPRTPGMENIRDILRVKMASMVVSHATNHRLSGALHEDTAYGLRTDEDGNTTVVYRQPLDQNFGVGKAKKVADPVLREKLIRFLEQGGSISSDKPYVWRKNSSTDVVRRVKVVAANSFNPDSYLTVLSKDGLPVRRHPLGNNHHVEILRSKKKKGKIVCVFRTMHEAALRLNRGIGHNDYRNRLSEALAEAKALGKEAPKLPLIEQDHGPEFDFLMALHINDTVKIWRDEAWHYYRVQNLDATGNRLVLRHQFAATLSHDSQKIRMSIAKLIMELRMTKVEVSPIGLVVDD

SEQ ID NO: 16438 - protein, 1069 aa, unidentified
  REGION 1..1069: note = Cas Enzyme sequence
VACLADRKRHHSLLQFRRTIMPDNKLRQRINDFLPQLRVGVDFGEGAGGIAVVRGNNILHAESYVDFHETTLEQRRQLRRGRRTRKAKKMRLARLRSWILRQRLPDGAHLPDLYGVMRDPRFDVQAGVFKTLGLNPAEAQSWIDLARQGKTEADGFVKAVTLIFQKRGYKWDAIELAQMSDAKLKDFLSTARVPTQELCDEIRAQITRRADDPNDPVRGKTRVGVEELLRLLEHARHRPPQPRQAEHRSVKEADLREVIEGFGRAAALPAEVTERWKRELCGSMDSKAQTKPGLLNKVLRSARFENRLKSGCAWCGKPTPRKSKVRHVAYAAAVCNLRVRDGRIPRRLSDGEMQVFWDWWERREAAGTQPCEGRKDAPKAEGIKSQLKRIGAQEKMARQFYDLLWNPDAKGRASLCRQHLEMAAKGMTMKDAGVEWQTVALRKAPNPCREQHDARVLHRLEQILFRPGKTGIEAWRHGPVQLVTLEAPKPETERAGKGEQKERKTESFMGRLAKETGGVCIYCEPADPKPAEDKDHIFPDSRGGPSVWDNLVPACKAHNDEKSNGTPWEWLGRTPRWSAFEARVEGLAGKGVPVREEGSEKSKEPRFIRISQRKRDLLLSRDHDYPDSPTALAHVGSRPRQFVVALGEMFTRRGLSPPRVDYQLGAPHVQRIDGRTTSQLRKSWLKKADELTDNFPPKDRWDLLNHAQDAALIAACPPHTWRETIFCRRASRPNFVGQWVEQDGLATHELSPNWAEYMQRRTWPVVRVLGRYPVGWKRLFADQNFYQEPERLDDKRLIQYVPLEKLKYGGKGPEDERHPSETRIVAPRLDDEFRVAAKEALVEVKATKRTSGEKGESTKETRLRPLNKGETLPAEVLAKKFPGVRHVKVSKNKGGTLARVSPLDGPARKIQLKKASEAVVIWVEKGQPLNKLRLSVRWPAIFRKFGVDRFVPSIPEGATIRATWKRHKLIWLDDATGNQPGYYRVKEFDDAQVTVLPENAVTDELAQRLHLKAEGKRARRITEPGASGPGEETEPGERDAAKGASLRAKEIKLGKNALTAYFESLNSRQ

SEQ ID NO: 16439 - protein, 1127 aa, unidentified
  REGION 1..1127: note = Cas Enzyme sequence
MKKILAVDLGITSFGYSILEEANDNSYRCIDNSVVMRKSPYEEKSGESSQKQHSAQKSLRKLNKKKKKRIKCVAKIFDDFGLLPYEKALQINRDNPIKNKWELRAIDALQRPLSPEELFAIFAHMAKHRGYKSIATDDLLYELERELGLRDSETAGSTKSDERSQVYAALNRLEELKKSYGSETIAQVIHRAVAEGKFRSYRNHDDYEKMIRREDIEEEIEKILLKQAELDALPLDNEQIGELIDRLKECITDQKPPTIDESLFGYCTFYKEEIAAPRYSYLYDLYRLYKKLADLSIDNYEVTPEDREKIIRWVEEKIKAGKNVKSISYKEIRKILGLSPDQKIFGQDDERIIKGKKEPRVFVPFFFLANISKFKNLIASIQKHPDAQQIFKELAEILQRSKTPRESYEKIQELLQGKGINASEAEIVELFKNKKPGTWELSHKYILQALPLFLEGMKEADIKKQLGFSDSEDYSAYPKSLRHLHLREGNLFEKDTNPINNHAIKSLASWALGLIADLSWRYGPFDEIVVESARDALPENTRKDIDKAMAEREKSLETIVKKYKSQFPTIDKRLARKIQLWEQQKELDLYTGQTIKLTDLLDGRADIEHIVPRSLGGLSAEYNTIVALKDANAQKGNRLPGDWLSHDDAYKQRIEMLKNKSLINWKKYKNLTATSLDETYTETFHSKGLRATSYLEALVAQVLKRYYPFPDPKARRHGHTVRMIPGRVTSKTRSLLGIKSKSRDTNFHHAEDALILAIINRGWQNRLHRMLRENYGKSEAELKALWEKYLPHIEGLTVPDYVKEAFERFMSKGEESLFYRDMFGGIRSVSYWVNKKPLSASSHKDTVYSPRHDIPTLRKNILDTFASLDVLKKRHDLTADEFMKKYDTEIRQKLWLHRIGNVNDESYRTVEARAAQIAETITRYQLMDAQNDKTIDEEYQQELKTLLSTPIEVGGKQLRKMRFVYDKLNAVQIDRGLVETDKNMLGIHLSKGPKGKLTIRRVDVNNAHQLSRQKEGMLCYLNEMLFFFNKDKLIHYGCLRSYIESSKKVALFNPRFPANPKTQPKRFTTGSQIKQVSVGSTTGVIKAHLDLDGHVKSYELFGQITPKQLRWFIEESGYGGVENDPDH

SEQ ID NO: 16440 - protein, 1169 aa, unidentified
  REGION 1..1169: note = Cas Enzyme sequence
MGGQMITLGLDIGSNSVGSAWVDTRRRLIGLGVGVFPAGVEQSERKRGRPVNQTRREKRQQRHSLARRAERKRRLRRVLTQAGLLPSDLHALDALMDLNPWHLRRKALSAPLTPNEFGRVLVHLNQRRGALGITLDPKDKEEGPVKKAMDRLCARMKEANAPTFGQFIADLMDQRKTALPNKPGSHASHPVRNRQYRLSPEDHLYADRQLIREEFSILWDRQKSFNGPLADLLGDELKTRLDDPSGDETWRHHGIIFGQRRTYWDTGTLGRCDLEPTDERCPLADIYAQEYRVVETVNNIRIEERGKAPRPLRPPERDNLIAVLRSQKTASAKTVRRALGLDKKALRDFFALNIERDKEREINTDWFYREIVHGAFTEPAWRSLSPAQRDSVNRAILNFDPDNPKHHDRLRAGAAKWWGLSPDAAETLLHAWETRPRPEKRVNLSRRAIRNLLPYMNQPVGDRWLTQIEARLCLAEDAEAIDQTTGRLMSYEQRQRYSLNASRLTRRERLFLHKHPDLLPPAPMLSNPVVRKAIHEVRRQILAYLRKYGRPPDRIVVELAREAKQSALVRDKRLALNRRRNKTRAQIDNDFALTGLTEHQRRLAEDRVILCRQQGEKCPYCEETLTEAAADGTDIETDHIVPYSRSGDNGLANLVVCHTRCNRGKGRQTPREWLTPENFEALERRMAHLEKAKPSHEDYFTAGDSRRKWENLHREVRQEDEWRNSQLTDTAYAARQVQNYLAETLYGGQEKRQRIFFTKGSYTAILRRDWQLEDDRLGKRREDHRQHAVDAVVIALADNARLQDLADHAAAQEEAKAASGQWPKREPLPPPWGDFQTFRAQVMESVAALVVSHRSVKRRISGALHEETAYGPVLESGGEISQTNFSNRIPADQLNPNHLRMPPRSETIENQLASSDLSPAERRAAWRKLRALTDQKPGKSGIVRDLPLRLEIRRSLRQHRLDPDHFSEAQMKDLVTKGNLRMRSGMPIKSAVLLRTINDPVVIPRKVWDPSSNRMVPDPDPRTRRVYIGGNNHHIEIREDKRGRWHGEIVTTFEAARRVRCLKRPAVDRSERDNMQFVISLAEGETLHMKHPKTGAPGYFVVFKLDKPQTIHFIHHWDARPSKATEDQEPREDIPVTASNLRALEPQPGRPPYKVRVDPLGRMTPLQKD

SEQ ID NO: 16441 - protein, 1017 aa, unidentified
  REGION 1..1017: note = Cas Enzyme sequence
VQQKVLGLDLGSNSIGWALLTEESGQSSEIVDLGSRIFSKAVEEKVPTPKNQKRRDMRLGRRVLQRRARRKQRMLNYLVSLNLLPKELQNNTQPEIILNEIGDPYELRTKALDEQLTPYEYGRILLHIVARRGFLSTKKQVAGDLIDDPDTLNYLSTLDEKPTKDKEEGQFKADISQVYQQIKDCGARTLGEYLHGLEIGNVKRNRNHDGGHLRTDRKMYLDELGLIWKQQAPYFDNLPSDFMQKNKGVMNIIFYQRPLKLNKDRVGRCSLEPKHYRANMARIEVQKFRYLQDINNLKFFDRWQEKWISISDEQKSKLKKIFEHNAKITITALKKELGLDRPTKINLDTKNLKGNITAIEIRSVIGDTWDKYTAKQQHDLFEDIFTIKKKSTLKARLITHWDFDKKTAVKLCLIDFEPSHSSHSLKAINKLLPYLEQGMIYSDARKAANYDYQIEEIKVTGTLGIPPETTNPIVNKGMHELRRLINAVIKQYGKPDIIRIEMARDLEMNTKRYKENESRQKKNQKANEAAQHAFEGLNLGKKYASHDDKIRYRLWQDQDERCAYSGNTIALNQVFSSECEIDHILPFKKSLDDSYMNKVLCFTSENRNKSDQTPVDAWGGDNEKWNQITQAIGHWDKSLDNKAQRFYTKEADLQKRDFISSQLNDTRYISKLAQDYVRQLGCDVNITKGFVVSQIRHQWGFNSLIGEVNKKERTDHRHHSIDAVVIAATSRNLYQNAVRQIKQNRLNIAPPYSHIREELAERLEHTIVSHAPRRKISGALHEETGAGYIEKHGGLVYRKTLNQEFTIKNAMSIVDEQVKTTVLEHIENHGTSKQAFNEANLKTLKLGKNPIKRVRVLQSKTNEKKLAQSKFGVRDQTGKIFKYMSYGNTHHVEIIKNTKSGKIKGEFVTTMLASHRAKGINIPKQSIIKTDHGEDWEFIMVLHINDTVSIELENGERVFYRVQKFMIAQGFLVLRLNTASTLKNKDEEIQMSIHRLFTEMKLRNHQMNTIGHFIDHD

SEQ ID NO: 16442 - protein, 1018 aa, unidentified
  REGION 1..1018: note = Cas Enzyme sequence
  SITE 269: note = misc_feature - Xaa can be any naturally occurring amino acid
MQQKVLGLDLGSNSIGWALLNEDNNTASEIIDLGSRIFIKAVEEKTPTPKNEKRRESRLGRRVIQRRARRKQRMLNYLVSLDLLPKELQNHAQPEIVLNGLGDPYELRVKGLDEQLTPHEFGRILLHFVARRGFLSTKKQVAGDLVDDPDTLDYLNALDNKPTKDKEEGQFKADIADVYQAIKDADARTLGEYLFNLESGKVKRNRSHDGGHLRTERKMYQDELELIWKQQSQYFNHLPSDFMQKDKGVLVIIFYQRPLKLRKDRVGKXSLELNKYRANIARLEVQKFRYLQDINNLQFFDRWQEKWISISDEQKIKLKNLFEYNAKITVTMLKKELGLDRPTKINLEAKNLKGNITAGEIRNIIGSAWDDCSDKQQHDLFEDLFTIKKKSALKARLITHWDFDKQTAVKLCLIEFEPTYSNLSLKAIKKLLPFLEQGMIYSDARQAAGYDYEVAEIEAVNTLGIPPETSNPIVNKGMHELRRLINAIIKQYGKPDVVRIEMARDLEMNTKRYKENEFRQKKNQKANEEAQLAFEGLNLGKKYASRDDKIRYRLWQDQDERCAYSGATIALNQVFSAECEVDHILPFKRSLDDSYMNKVLCFTAENRNKSDQTPVDAWGGDNDKWNQITQALSHWDKSLISKTKRFYTKEADLQKRDFISSQLNDTRYMSKLAQDYVRQLGCDVNITKGFVVSQIRHQWGFNSIIGEVNKKDRTDHRHHAIDAVVIAATSRNLYQNAVRQIKHDRLNIAPPYAHIREELDERLKHTIISHAPQRKLSGALHEETGAGYIEKHGGLVYRKTLSPEFTLKNALSIVDEAVKTKVLEHFENYPNPKEAFNAEHLALLKLGKNPIKRVRVLQSKTNEKKLAQTKFGVRDKTGKIFKYMSYGNTHHVEIIKNSKTGKVKGEFVTTMLASHRAKGINIPKQAIIKTDYGQDWEFVMALHINDTVSIEQGDGERVFYRVQKIDTGAKRFVLRLGIASTLKNKDEEIYIGISKDNFDKYKIVKHDINTIGHFIEHD

SEQ ID NO: 16443 - protein, 1015 aa, unidentified
  REGION 1..1015: note = Cas Enzyme sequence
MNKKILGLDLGSNSIGWALMNETNGRVNQIIDLGSRIFNKAVEEKVPTPKNQKRRDMRLGRRVLQRRARRKQRMASYLISLDLLPQELSNNFGQEKLLNELGDPYELRTKGLDEQLTSHQLGRVLLHFVARRGFLSSKKQIAGDLVDDPDTQTYLSTLDNKKAKDEEGQFKADIAEVYQAIKDNNARTLGEYLFNLEVGKVKRNRSHDGGHLRTDRAMYKDELYKIWEKQQSYFDLPDEFINEVGKIIFYQRPLKLKKDRVGKCSLETKHYRANTARLEVQRFRYMQDVNNLEYFERHSEQDLKLSDKQKEKLRNYFEHHSKITVTELKKELGLDKPTKINLEAKNLKGNITACEIRTVIGDIWDEYSDEKQSQLFEDLFTIKKKSSLKARLITHWDFDKQTAVKLCLLEFEPSHSNLSLKAIKRLLPHLEKGLTYDKARVECGYDYEVKEIVALDKLPAPPETSNPIVNKGLHELRRVVNALIKQYGKPDIVRIEMARDLEMNTKRYKDNEIRQRKNQKANEEATEVFRQETSGKYPSHDEKIRYRLWKDQSERCAYSGKAIARCQVFSAECEIDHILPFKKSLDDSYMNKVLCFEKENRNKGDKTPVDAFGGDNEQWNQITHAIANWDKSLKSKIARFYTKEEDLGKRDFISNQLNDTRYISRLAQDYMRELGCDVSVTKGLVVSKIRHQWGFNGLIGKTDKKERTDHQHHAIDAVVIASTSRGLYQQAAMQIECDKLKISQPYDNILQELGEKLKHMIVSHMPQCKLSGSLHEETGAGYIAKHGGLVYRKTLNPEFTIKNAMSIVDEQVKNIVLEHIENHNNSKEAFSEKNLQTLKLGKNPIKRVRVLQSKIKTTKKQTAEDILQQTKFGVKDKSGKIFKYMSYGNTHHVEIIKNLKTNKIKAEFVTMMEASNRAKGINISKQPIIKTNHGDEWEFLMALHINDTVSIEKNDGEKVFYRVQKLGGGYDITLRLNTASTIDDKSQCLPLMAKGIIENNLMRHKVNAIGGLIDD

SEQ ID NO: 16444 - protein, 1037 aa, unidentified
  REGION 1..1037: note = Cas Enzyme sequence
MQRSLKTKGEKKMKKILGLDLGSNSIGWALMRETDGEVSQIIDLGSRIFNKAVEEKIPTPKNQKRRNMRLGRRVLQRRARRKQRMVNYLISLDLLPQALSNNFGQEKLLNELGDPYELRTKGLDQQLEPHQFGRVLLHFVARRGFLSSKKQVAGDLVDDPDTQTYLSTLDRKQTKDEEGQFKADIAEVYQAIKGNHARTLGEYLFNLEVGKVKRNRSHDGGHLRTDRAMYKDELYKIWVTQQLYFDLPNEFISEIEKIIFYQRPLKLKKDRVGKCSLEPKHYRANTARLEVQKFRYLQDINNLEYFERHSEQWLKLSDEQKNKLRIYFEHHPKITITALKKELGLDKPTKINLEAKNLKGNITACEIRRVIGNTWDEYSDEAQSQLFEDLFTIKKKSSLKARLITHWDFDKQTAIKLCLIEFEPSHSNLSLKAIKKLLPFLEQGLVYSKKDVDTGELGALQAAGYQEEIVENKKTESLDKLPAPQETSNPIVNKGMHELRRVVNAVIKQYGKPDVVRIEMARDLEMNTKRYKENEMRQRKNQKANEKAIEVFRQEVGKKYPSHDEKIRYRLWRDQDQRCAYSGNVIALGQIFSADCEIDHILPFKKSLDDSYMNKVLCFEKENRNKADRTPIDAWGGDNDKWNQITQAISQWKFLKSKVDRFYMTEKDLKERYFIFSQLTDTRYISRLAQEYLRQLGCDVNVTKGFVVSEMRHQWGFNSLIGETDKKERTNHCHHAIDAVVIASTSRSLYQQAANQIKQNKLKIPEPYADIRTELEEKLKHVIVSHTPQRKLSGGLHEETGAGYVAKHGGLVYRKTLNPEFTLKNAMSIIDEQVKTKVLEQLENYGNSKEAFNEENLKTLKLGKNPIKRVRVLQSKIKTTKKNTAEDILQQTKFGVKDKSGKVFKYMSYGNNHHAEIIQNIETGKIKAEFVTMMEASNRVKGINMPKQPIIKTDYGNEWKFLMALHINDTVSIEKGNGERVFYRVQKLGGGYDITLRLNIASTTNDQNQCLPLMAKGVIENNLIVYKINAIGGLIDD

SEQ ID NO: 16445 - protein, 1425 aa, unidentified
  REGION 1..1425: note = Cas Enzyme sequence
VLTAICPKAGACEFFILLWKTPGADRLQWLHYGGLSYGRQEEFPIYSQPLFLREKQMKLLGLDIGTNSVGSAWVDTEAKSITMGVSVFPAGVEESEDKRGAPKNQARRGKRSLRRSIHRRAQRKRRLRELLTDVGLLPREQDKLQAVLGWDPWELRRKGLSQELTPHEFGRVLVHLNQRRGALGIETREGDERKVKGAIDRVRLELLDRYASLDDKKRLLDLRQSKNDDEQARFAPESANWLEQSSDVTFGRMMADLHDSRRVCILDEEGNPKRNKNGECRCYQREPIRNRRDSFEFHADRALIRDEFAKLWKNQCSFDGDLSRLLTDTLKKQFDDPERELYAAKAQGAWRHGGTLFGQRATYWDTGALGRCVLEPTDRCVPIADMHAQYFRVVETVNNIRICGDRQAERPLTEDERDKVIKLLRGPLFKKSKGSEEAKQSASVTDIREVLRIRPRDKFVWLNIEKDEEREINTDWFHREVVHKAIGLKHWTGLNDKTHERINRAILKYDSEKAESIARLRQEAAQWWGLSSDRIDALLSALKERPQLEKRLNLSRRAILNLLPYMEVFDPINNRWPTQQEARRGFAETLPEGHVRQRYTTGALGATASNRYYMRQDKHQIRCANGTTLPPLPPAPMMSNPVVRKAIHEVRRHIMAYLQMFGGKPDRVVIEFARSAKQSAKVRDQTLARNRYREKERKKILVGDDEEAGVVKTAFGDDFANLSLNQQRAAVDRVILARQQQWKCPYCGKSGLDATDVALGQGVEIDHIVPYSRCGDNGLNNKIVCHVECNRQKRKRTPTEWWDEEFAERARTAKKLFDDVEKGQMYYFTKRDYARKWHNFTREVRDNEWRNSQGSDTAYASAQVAAYLADALFDGKGLPERGGERKIFVTIGKYTSMLRRDWQLFETLKKPTLDGEVCISREEEEELEQKDRGDHRQHAIDAVVIALTTPLIISAVAQRAAMEENIFAEHGHWPGQKTRREACRQCQEYRNRSGRFPGEYEPIVPPKPWDEVKEFRRLVLSQVGPSQSDDGLTVAHRPVKRRIVGAFHEDTLFGTIKDSETLFTGRIPCYSPPDTWLKPAHLRVMKRESERQSIERLTARYMDDGCDKKTARIKAKDAVKQPGFVPQLVDPSPGKTGLVRDPTLRQQIRQCLRANNIDPDNYEKSDMKRIVQDGLLRMYSQPEWKKNSQSENPEKPSGVPIKSVVLLRTHTDPIILPRRKWDPVNKRMVREEHSRSFRVYVGGNNHHIEITESEDGSWDGDIITNHKAAQRNAERLAKLREAGVPSIEKLRKMNKIDRRRYASTIREINRSYPMVDRADREGRRFIMSLAEGETICMKHPQTGKQGYFVVYKLDKPHVIHLKYHWDARPDGGQKDNDGKVIPGSKREGFAVSAGDLKTKCSLGEGEPPYKVRVDPLGNPRKVPKD

SEQ ID NO: 16446 - protein, 995 aa, unidentified
  REGION 1..995: note = Cas Enzyme sequence
MATVLGLDIGSNSIGWALLDNEEEKIVDAGVRVFQEGVNRDTKGSEISKHAARRAARSARRTRNRRNYRKDKLFRLLVRNGLLPQSKTELQNIFNMDPYLLRAKGLDEKLAPYEFGRVLYHLNQRRGFLSNRKSGKSKEDGVVVKSASAIQQAMLQEQVRTLGEYFSKQNPHEQRIRGHYTFRAMYEDEFEQLWQKQAAYNGHLLNDVLKKAIKDETIFYQRPLRWDPDTISNCQLEPNQKCCPRADWHARRFRILQTVNNLKINNPDGTQAELAEPQREILLKELYSRNEVPINSALKQKLRLLERQLFNVEEKAIADKEVKLKGDEFAAQLKKILGKKDFEKLEDADLIEINDALIDDSIDDADLISRLMDQYGFTEEQAKAVVNISLPQKYAAFSRLAIQKLLPHLEKGLLTHEAIEAVYGQPQAPKDIKVADRLGFPEDLRNPIVNKALWEVRKVVNALIREYGKPDSIVIEMAREVKGSQRERDEIRLQQWKQEQENKRAEEELKKIGIHKPSRDDIIKYKLWEECGHVCPYTGKPISQTALFGDHPEFQVEHILPYSRTLDDSYMNKTLCWVHENINKGDQTPYEYYAEKYPEQFEAILQRIAVLPYPKRRKFWQKEVELDKFIERQLNDTRYINRKVVEYLKTLGVAVRGSKGQITAELRHQWGLDSILNSELPGLKNRQDHRHHAVDAAVTAVVNQKHLHALAQSKYKRNDAAFAPPWESFRSDLEDRVNRINVSHEVTRKVSGQLHEETNYGLTGLKDDKGQDIYVYRKPLDALTPPMVGKIVDPVVRSIIQARLDEFGIRPGGKGTIPKEVWKEPVYMKSRSGVKVPIKKVRIRDVFNNMIILKDKEGKPYRAVAPGNNHHIEIFEYTDKKGNIKRDGIVVSMFEAVHRSRAGKPVVCRDYGDGRKFVCSLAKNEMFMLEVDGEYILHRVQKIIQDGRIVLRPHTFAGQVSDSDNPPFVQRKNYNTLQGYKVFVDPLGRIFPAKD

SEQ ID NO: 16447 - protein, 995 aa, unidentified
  REGION 1..995: note = Cas Enzyme sequence
MSGITLGLDIGSNSIGWALLSLDGNPSIIGAGVRVFQEGVNRDTKGAEISKNETRRMARGARRNRFRRNYRKDKLLRLMKRNGLLPAGEAVNGDIFLLDPYQLRAKGIEEKLSLHEFGRALYHLNQRRGFLSNRKSSKGKDDGIVIKSANELQQKMDAQGARTLGEYFSRIDTTQERIRDHYTFRSMYQKEFDLLWEKQSSFYPEILVPALRQAIADETIFYQRPLKPTDELIGDCTLESDQKRCPRGDWHARRFRILQDVNNLLVCESDGKERKLTESERDIVLNILFTTKEPSFDSLRKKLGLIESQTFNFEEGSLDKKEAKLKGDYFASEMNGKTMLGKKGWEALDTATQIEINDLLLNDDLADEEVAEMLRQQHGFTDEQAQAAIKISFPRGYMSYSRLAIQKLLPHMERGLRTDEAIEAAFSRIHSVQDDGEQVDVLPLPEDLRNPIVNKALIEARKVINAIIRMHGKPSKIVVEMARDVKGNAKEREEMRIKMAQNERENDRARHDLKYNMKIQKPTRDDILKFKLWEECGRECPYTGRPISQQSLFGEHPEFQIEHIIPYSCSLDDSYMNKTLCFVDENRRKGDQTPYAFYNGTEQYEHILQRARRLPYPKRQKFTQKEASLDDFIQRQLNDTRYITREILKYLKQLGCTVTGSRGKVTSELRHQWGLNSILESELPGLKNREDHRHHAIDAVVTALTSQKHLRELAVTKYAVTHDGFPVPWEGFRDAVAEAINKIQVSHRVTRKVSGPLHEETSYGPTGLKDDKGQDVFVYRKKLEALTCAMVEKIVDPVVKEIVKRRLLEFGVDPEKKGSISKDVWAEPLYMKSTKGAKVPIKKVRICDVFNNMIPVSDETGRPYRYVASGNNHHIEIYEYADAKGNIKRDGKVVSMFDAVQRSRQGKLVICRDHGDRKRFVCSLAKNEMFMLEVEEGRHVLHRVQKISSNKQIFFRHHLFAGDLQEEKPISKYPNTLKGYKVTVDPIGRIFPAQD

SEQ ID NO: 16448 - protein, 1007 aa, unidentified
  REGION 1..1007: note = Cas Enzyme sequence
MGNFTLGLDLGTNSIGWALIEFDDNQQPQNLIACGSRIFQEAVEAKTGTPKNHARRAARAARKLVARRKQRRTKLLNLLVCHDLLPQDEAERNALLLDNQANNPYQLRKRGLDEKLEPFAFGRALYHLAHRRGFQSNRKAASDEDGKVKTAISALRAEMQGHTLGAFLADQPTQRRRYTDRAMYAEEFEQLWSKQTIFAPEQLTQALKVEIKNSIFFQRPLKSQKHLVGKCTFEPTRKRAAKAILLAQHFRILQDVNHLAVKNPITREFRPLTQDERNKLAEALDKQKGMNWSAVRKVIGWNKKDSLHEGETFNLEEGKKDKLIGNRTACDLRGALGDRWDAFTAPQQDDLVSDLLTIDNTDGFLKRMETHWGFDSGTAEALATIELEPGYARLSAKAMRAILPHLEQGMIYSDACKAAGYDHSNPNQRTITDKLGLPSNVRNPVVQKALFETRKVVNAIVRKYGKPAVIRVEMARDMKLSKRLKEELQKEQNKQKKANDLAAEILRKEFGIQQPSRADIQKYNLWLECKEVCPYTGTTISREMLFSPEVDVEHILPYQRSLDDSYMNKTLCIATYNRQVKLNNTPYEIGQGDPIAYAEIFQRIKTLPFPKRRRFEQKEIETDKFIERQLNDTRYICVEVRDFLQQLGAPVEVSKGEATAKLRGRWKLNTLLSPDGSNEKNRADHRHHAIDAVVIALTNRSLFHKLSRLSAQSISLDKSRFDVPPPWDGFYDDVYEKIDKVIVSHAPARKISGALHEDTAHGYSDAEKCFVYRKPLNGDFTLAQVNKIRDAEIKKLVIARLKEFDPEIEKALDESLPKKYRRKLEKPQEKALVKSAFGNPNDPLLHKDGKTPIRSVRIKENSSKEGVLAIKNQDGKEYKYHPIGNNHHVEILEHPQTEKREGRFINVVEASHRARIAKTSIVQRDHGDDWKFVMSLAVNDMVAIADGEQTNYYRVQLLDSSNENILFRLHNVATLTDNSTRLFKNANTLRCKKVFTDALGNIAPCND

SEQ ID NO: 16449 - protein, 1008 aa, unidentified
  REGION 1..1008: note = Cas Enzyme sequence
MMGNFTLGLDLGTNSIGWALIEFDDNQQPQNLIACGSRIFQEAVEAKTGTPKNHARRAARAARKLVARRKQRRTKLLNLLVCHDLLPQDEAERNALLLDNQANNPYQLRKRGLDEKLEPFAFGRALYHLAHRRGFQSNRKAASDEDGKVKTAISALRAEMQGHTLGAFLADQPTQRRRYTDRAMYAEEFEQLWSKQTIFAPEQLTQALKVEIKNSIFFQRPLKSQKHLVGKCTFEPTRKRAAKAILLAQHFRILQDVNHLAVKNPITREFRPLTQDERNKLAEALDKQKGMNWSAVRKVIGWNKKDSLHEGETFNLEEGKKDKLIGNRTACDLRGALGDRWDAFTAPQQDDLVSDLLTIDNTDGFLKRMETHWGFDSGTAEALATIELEPGYARLSAKAMRAILPHLEQGMIYSDACKAAGYDHSNPNQRTITDKLGLPSNVRNPVVQKALFETRKVVNAIVRKYGKPAVIRVEMARDMKLSKRLKEELQKEQNKQKKANDLAAEILRKEFGIQQPSRADIQKYNLWLECKEVCPYTGTTISREMLFSPEVDVEHILPYQRSLDDSYMNKTLCIATYNRQVKLNNTPYEIGQGDPIAYAEIFQRIKTLPFPKRRRFEQKEIETDKFIERQLNDTRYICVEVRDFLQQLGAPVEVSKGEATAKLRGRWKLNTLLSPDGSNEKNRADHRHHAIDAVVIALTNRSLFHKLSRLSAQSISLDKSRFDVPPPWDGFYDDVYEKIDKVIVSHAPARKISGALHEDTAHGYSDAEKCFVYRKPLNGDFTLAQVNKIRDAEIKKLVIARLKEFDPEIEKALDESLPKKYRRKLEKPQEKALVKSAFGNPNDPLLHKDGKTPIRSVRIKENSSKEGVLAIKNQDGKEYKYHPIGNNHHVEILEHPQTEKREGRFINVVEASHRARIAKTSIVQRDHGDDWKFVMSLAVNDMVAIADGEQTNYYRVQLLDSSNENILFRLHNVATLTDNSTRLFKNANTLRCKKVFTDALGNIAPCND

SEQ ID NO: 16450 - protein, 991 aa, unidentified
  REGION 1..991: note = Cas Enzyme sequence
MGNFTLGLDLGTNSIGWALIDFDDNQQPQKLIACGSRIFQEAVEAKTGTPKNHARRAARAARKLVARRKQRRTKLLNLLVRHGLLPQDEAERNALLLDNQANNPYQLRKRGLAEKLEPFPFGRALYHLAHRRGFQSNRKAASDEDGKVKTAISSLRAEMQGLTLGAFLADQPSQRRRYTDRAMYSEEFEQLWSKQATFAPEQLTQALKVAIHNSIFFQRPLKSQKHLVGKCTFEPTRKRAAKAILLAQRFRILQDVNHLAVKNPITREFRPLTQDERNKLAEALDKQKSMTWGAVRKVVGWNKKDSLHEGETFNMEEGKKDKLIGNRTACDLRGALGERWDALTAQQQVNLVTDLLTIDNTDGFLKRMKAHWGFDGATAEALATIELEPGYARLSSKAMRAILPHLEQGMIYSDACKAAGYDHSNPNQRTVTDKLGLPSNVRNPVVQKALFETRKVVNAIVRKYGKPATIRVEMARDMKLSKRLKEELQKEQNKQKKANELAEGILRNEFGIQQPARADIQKYNLWLECKEVCPYTGTVISREMLFSPEVDVEHILPYQRSLDDSYMNKTLCIATYNRQVKLNNTPYEIGQGDPVAYAEIFQRIKTLPFPKRRRFEQKEIETDKFIERQLNDTRYICVEVRDFLQQLGAPVEVSKGEATAKLRGRWKLNTLLSPDGSNEKNRADHRHHAIDAVVISLTNRSLFHKLSRLSAQSISFDKSRFDVPPPWDGFYDDVYEKIDQIIISYAPARKISGALHKETAYGYSESEKCFVTRKSLDQKKINKLTESEVKKIRDAKVRELVEFHLALHGGDFKKAMGQPLFQENGVTPIKSVRVTSNFNKDTAHPVRKGQGKDYKFFTYGNNHHVEILEHIETGNREGRFVTAMEAARRARGAANTEKSGIVQRDHGAEWKFIASFSINDIVQIASNDAEIPYRIQAISEGNQFEITLKRLNDALSDKNENTLRLRSENSLKQILRKLTVDPLGNLAPCND

SEQ ID NO: 16451 - protein, 989 aa, unidentified
  REGION 1..989: note = Cas Enzyme sequence
MGSHTLGLDIGSNSIGWALLETKGKPSIVDMGVRVFPEGVDRDTKGLEKSKNATRREARGARTTHQRRSQRKKQLLKTLQAIGFLPTADIELRSLFHTTNPYGLRKKGLDEKLEQYEFGRALYHINQRRGFKSNRKSGKAREDGVVIKGATALQKEMDAKGCRTIGEYFAGLNPEEQRIRKQYTFRSMYADEFDRFWAKQKEFYPDTLTEDLRKKIREDIIFFQRPLKPQDEKIGNCELEPGEKRCPRGDWYARRFRLLQDVNNLMIQNPDGSENKLTSEQRKALLDELGQKKELSYDKIRELLGLLETQRFNLEQDGKVKNLKGDGFMAAMRSKKLFGPKVWGEMAEGEKVKLNEWLVELEDDELKEKLTSEYKLNEEQIEASLKIELPQRYMSFSRKAIMKLLTFMEQGYLTSESIEKAGYRRDDSDTGQAVDALPLPQDLRNPIVQKALFEVRKVVNAIIREYGKPGKIKIEMARDVHGSSRQREELHWKILDNEKRNKEVRERLIEDMKIVKPTRDDVIKYKLWEECGRTCPYTGKHISQTALFGENPEFQIEHILPYDRSLDDSYMNKALCEVHENIHVKKGQTPYEAYNHNTEKYEQILERVNKSQMPYPKKRKFWQKEIDLDQHIARELNDTRYICREVVKYFKQLGVNVRGTRGKITSELRHQWGLDGVFDEIGTKRDDDHRRHAVDAVVVGVTENEHLRRLAKSKYAVTGKTFDLPWPDFREEVRENVKQINVSYRIQRKVSGALHKETNYGATNKDGLYVFRKNLEDLTLPMVDDIVDPVVRNIVKKRLEEKGIDLNGKDRNPPKEIWKETLYMKTTKSNKRVPIKKVRVYNAAENMIPMMDEQGQPYRYVEPGSNHHIEIFEYTDKNSKVKRDGKVVTMFEAVQRNRRGEPVVKKDYGDVKKFICSLAINEMFMLELDDGSKELYRVQKISSNQQIFFRHHTFGGNLQKHKGISRYPNTLNGQKKTIDPLGKIFLAND

SEQ ID NO: 16452 - protein, 945 aa, unidentified
  REGION 1..945: note = Cas Enzyme sequence
LEKSKNATRREARGARTTHQRRSQRKEQLLKTLQGIGFLPTTDTELRTLFHTNPYGLRKKGLDEKLERYEFGRALYHINQRRGFKSNRKSGKANEDGVVIKGANSLQTEINAKGFRTIGEYFAGLNPEEQRIRGKYTFRTMYADEFDLLWAKQKEFYPDALTEELRKKIRDEIVFFQRPLKPQDEKIGNCELEPEEKRCPRGDWYARRFRLLQDVNNLKIQNPDGSEGVLNNEQHEALLDNLGRKEKLRFDEIRKQFGFIETQKFNAEYRIGLKGKKVESIKGDAFATTMGSKKVLGSKVWDAMNESQKIELNMAFVELEDDALAEKLKSQYGLNDKQVEQAMKISLPQGYMSFSRKAIMKLLPFMEAGAITSEAIEKSGYNHNKTTDGKTVEELPLPPDLRNPIVQKALFEVRKVINAIVHEYGKPGKIKIEMARDVQGSSKQREELHWKQHENKERNEEARKRLKEDIKINNPTRDDVIKYNLWEECGKRCPYTGKHISQEALFGSNPGFQVEHILPYDRSLDDSFMNKTLCEAHENIHVKKNQTPYEAYGHLPERYEEIKQNIKILPWPKRKKFLQENIDLDQHIDRELNDTRYICKEVVSYLKQLGVNVRGTRGKITNELRHQWGLDGVFDEIGTKRDDDHRRHAVDAVVVGVTENEHLRRLAKSKYAVKNEAFNSPWPDFREEVRENVKQINVSHRVQRKVSGALHKETNYGATGKEGLYVFRKNLEDLTLPMVEDIVDPVARKIVKKRLEEKSIDLNGKDRKLPKEIWKEPLYMKTTKSNKRVPIKKVRVYNVAKKMIPIKDRSGQPYRYVEPGSNHHIEIFEFTCPEKKGQRDSKIVTMFDAVQRSIGGQPVVQKNHGEDTRFVCSLAINDLVMMKNKRNETDLYRVQKMDANKMVRFRHHTASTLERKETYIDKTAHLFEGYKVTVDPLGRVWPAND

SEQ ID NO: 16453 - protein, 962 aa, unidentified
  REGION 1..962: note = Cas Enzyme sequence
ADRRLIREEFDNLWKRQKSFGGELGLELTDECRRELDDPSGDETWRYRGILFGQRRTYWDIGTMARCDLEPTDLRCSKGDMYAQEFLVLQTVNNIRIMQRGEQKRPLSEEERRAVIDVLEQQKKANEGTIRKALGIHRGERKTQFTLSLEKDPERGLNTSWFRRDIVIGAIGKDLWEGMSIEKKDSVNKAILKFDPNDEKDVKRLREGCSKWWGFDKKRSERFVEAWKGRPRIDDRINYSRRAVKNLLPYMREGFPVNEARKLFVEDATHGASDEQRRRYSFGAQPGNRALRRYMEKHPDLLPPVPEDINNPVVRKAIHEVRHHIQAYIRRFVCRPDRVVVELVREARQSAFVRNRQLAENRAREKERKKIIEEFNLTGETKTQQRKTVDRVLLSREQRFWCAYCSDTISERDAARGNDVEVDHIIPQSRGGNSFLSNLILCHTRCNRGKGNKTPMEWLTKEEFGLIERRLKHLEKENKVKWENLHSEAPDLDKFVESQLTDTAYAARQVVAWLEKTLYGDKNDGSRHVFTTKGRYTAILRRDWRLFPDKNAGEKNRADHRHHAVDAVLIALSGPERLSQLACSAEKWELAKGEGKAPPEREPLGAPWGDRDSFRAEVMKEWQRLVVAHRPEKRKITGPLHNDTQFGPVLDEKGHLTGEFTIRKFAAELTPNHLRVPEGWEQLRTKLENCNSKAEKRGIRAKMLAIADVKCGKSGIVRDRWFREELRDCLRRNGLNVDVCKEKDKNLREKKMMEFTKKLKEIVKGEGLFLESGVPLRRITLVRNPTVVEIRRKRWNSDTEKMEYDPNRRSWRYYEPQNNHHIEIRESGKGRWVGEVISNFDAVKRVRPSKESGFQPQPAVNRNDTKKGRFVMSLSIGEMIYMKHPETGEPEYFVVFKLDGKGYIHFTPHWDAGKDKATEKHPAREDIRLSARKLQGLGVGPDKCPTKQWVGPLGDSKPLYCD

SEQ ID NO: 16454 - protein, 1094 aa, unidentified
  REGION 1..1094: note = Cas Enzyme sequence
MRTFLLEKGWMPAESTRQNEWLKHKNPWILRSEGLERKLKPFEFGRVLLHMAQQRGAYGLIEDEDEKEDGKIKKAVSHVRREMNQCKARTFGELMALKFCERRKKVGKKNKEIHMPIRNRTNAAKEGVYEFCADRRLIREEFDNLWKRQKSFGGELGLELTDECRRELDDPSGDETWRYRGILFGQRRTYWDIGTMARCDLEPTDLRCSKGDMYAQEFLVLQTVNNIRIMQRGEQKRPLSEEERRAVIDVLEQQKKANEGTIRKALGIHRGERKTQFTLSLEKDPERGLNTSWFRRDIVIGAIGKDLWEGMSIEKKDSVNKAILKFDPNDEKDVKRLREGCSKWWGFDKKRSERFVEAWKGRPRIDDRINYSRRAVKNLLPYMREGFPVNEARKLFVEDATHGASDEQRRRYSFGAQPGNRALRRYMEKHPDLLPPVPEDINNPVVRKAIHEVRHHIQAYIRRFVCRPDRVVVELVREARQSAFVRNRQLAENRAREKERKKIIEEFNLTGETKTQQRKTVDRVLLSREQRFWCAYCSDTISERDAARGNDVEVDHIIPQSRGGNSFLSNLILCHTRCNRGKGNKTPMEWLTKEEFGLIERRLKHLEKENKVKWENLHSEAPDLDKFVESQLTDTAYAARQVVAWLEKTLYGDKNDGSRHVFTTKGRYTAILRRDWRLFPDKNAGEKNRADHRHHAVDAVLIALSGPERLSQLACSAEKWELAKGEGKAPPEREPLGAPWGDRDSFRAEVMKEWQRLVVAHRPEKRKITGPLHNDTQFGPVLDEKGHLTGEFTIRKFAAELTPNHLRVPEGWEQLRTKLENCNSKAEKRGIRAKMLAIADVKCGKSGIVRDRWFREELRDCLRRNGLNVDVCKEKDKNLREKKMMEFTKKLKEIVKGEGLFLESGVPLRRITLVRNPTVVEIRRKRWNSDTEKMEYDPNRRSWRYYEPQNNHHIEIRESGKGRWVGEVISNFDAVKRVRPSKESGFQPQPAVNRNDTKKGRFVMSLSIGEMIYMKHPETGEPEYFVVFKLDGKGYIHFTPHWDAGKDKATEKHPAREDIRLSARKLQGLGVGPDKCPTKQWVGPLGDSKPLYCD

SEQ ID NO: 16455 - protein, 1208 aa, unidentified
  REGION 1..1208: note = Cas Enzyme sequence
VGYTRYGGSPEGWCLRIFRLVVKNTQTRISYNAAMMACMRQVVKPKSDDSLENERKSDMKILGLDIGTNSVGSAWVDTDQHAVRMGVSVFPAGVEESDTKRGAPKNQLRRAYRSQRKNTARRAQRKHQMRAWLRENGWMPADEIAYKEWIQLNPWILRAEGLHRALSTSEFGRILLHLAQRRGAYGFDVEEDDQDAGKVKEAIDHTRQMMRQRDVGTFGELMATLYCERGKAVGYKGKQARLPIRNRTNAAGEPVYEFCADRDLVREEFLALWNKQRSFDGELAHQLTEERRRQLDDPTGDDTWRCRGILFGQRSTDWDTGVLGRCDLEPTDLGCPRADMHAQEFLVLETVNNIKIIPPGQSKRALRDDERQAVIAALRSQKTASASTVRKALGLHRGMAKTQYALSLDADPKRALNTDWFYREVVCNAVGLSAWQALTQTQRESINQAILKLDPKRQPHAERFERGCRDWWGFDEEQTKRLIRAWHDRPNPNVRLKLSRRAILNLLPYMRAEGATVSEARKRFAEDADNGATPEQRERYGFGGTRPSGAIRRFREKHPDLLPPAPQMLSNPVVRKAIHEVRRHVQAYLRKFGRPDRVIIELARDAKMPAKVRNEQLAANRAREKRRNEIIEQFGLGGLTPTQREKAVKRVLLCQEQGQQCAYCGNGNNTITEKAAAEGVEVELDHIIPESRGGGSGLNNLVLCHTRCNRGKANRTPKEWLSAEAFAKLEQRLQHLKKSNPVKWDNLHKDVPDITGFSESQLTDTAYASRQVADWLREALYGGAISGTRHVYTTKGRYTPWLRRHWGLYASAGMKNRGDHREHAMDALVVALSGPERLQELAHAVEASELAKSEGVAMPDRERLLPPWGDKDTFRVQVMEEFGRLVVAHRPAQRKITGSLHNDTMYGPVLDGEGRLSRYATIKKSVIELTPKHLRVPTQWDELRRHLESAPGEAARRAIRRRMLALEDVKPEKSGVVRDRWFREELRQCLRDNGLDPDRFTSKQIKELVTNKGISLRSGVPVRRTTLLRAPSVVAIRRKRWDDRMGRLTYDEHPQAVRLYEPQNNHHIEIRENAKGRWVGKVVTNFEAAQRVRPSKNSGLDSCSAVDRRDTCEGRFVMSLSIGEMVRMRDRTTRTLDYYVVFKIDSTGTIHFTPHWDAGRSKKTEEAAVRADIPLSPAQLQQLGESETRPPVKVWVGPLGDCKVLMRD

SEQ ID NO: 16456 - protein, 1208 aa, unidentified; identical to SEQ ID NO: 16455
  REGION 1..1208: note = Cas Enzyme sequence

SEQ ID NO: 16457 - protein, 1158 aa, unidentified
  REGION 1..1158: note = Cas Enzyme sequence
MKILGLDVGTNSVGSAWVDTETQTIKMGVSVFPAGVEEGDQKRGAPKNQARRSYRSQRRSVARRARRKRQMRAWLVKNGWMPTDPDARKQWLELNPWLLRAKGLERELTLLEFGRVLLHMAQRRGAYGFDVEEEEEDTGKIKKAVDHTRAEMRRYNARTFGELMARIYEERRREVGRRKRQIRMPIRNRTTAAKEPNYEFCADRDLIEEEFTWLWKAQQSFDGELGKQLNDQRRQELHDPSGDQTWRCRGILFGQRKTYWNMGVLGRCDLEPTDLRCPRLDMHAQQFLVLETVNNITIIPPGEPRRRLSGPERQRVIQFLRKQKTATAATVRRALGIHKGPNKTHYALSLDADPKRTLNTDWFYREIIENAVGQSHWEKMPSHQKEAINRAILKLDPKVEYDRARLEAGCRDWWNLDEDQTRRFVAAWQHRPSASTRLQLSRRAILNLLPYMQDEGLTVNEARKRFAEDPNSGATPDQRERYGFTGKRPSKTVRRFQEKHSDLLPPAPATLSNPVVRKAIHEVRRHLQAYLRMFGPPDRVIIELARDARLPAKVRNQQLAANRVRERERKRIIEDFGLAALPKARITKAVKRVLLCREQKEQCAYCGNGNNTITEKTAAEGNGVELDHIIPQSRGGDNGLNNLVLCHSACNRGKTNKTPREWLSHEQFGKLEQRLRHLKNGNPVKWDNLHKDVSDIQGFTESQLTDTAYASRQVADWLREVLYAGEVGGKRCVFSTKGRYTPWLRRDWGLYSDRSPSSGGSKNRGDHREHALDALVVALSGPERLQELAHAVETAELAKTEGMPLPKREPLPPPWGDSDTFRSQVMKEFEQLVVAHRPAQRKITGSFHNDTMYGPVFDKDSRLTRYATIKKFAIELTPNHLRVPKGWDELRQRLDRAPSATARRAIRREMLALEDVKPAKSGVVRDRWFREELRQYLREQGLDPNHFTPKQIKELVLREGISLRSGVPVRRVTLLRAPSVIKIKRKRWNERTADMEYDNHPGAIRLYEPQNNHHIEIRENANGKWIVTNDGVVTTYEAAQRVRPRKSCGQSPRPAVNREDTSAGRFVMSLSIGEMVQMRHPATRTLGYYVVFKIDSTKTIHFTSHWDAGRSKQTDQLAPREDIALSAGQLQALGESPAQPPRKVWVGPLGQVNSLLTD

SEQ ID NO: 16458 - protein, 1158 aa, unidentified
  REGION 1..1158: note = Cas Enzyme sequence
MKILGLDVGTNSVGSAWVDTETQTIKMGVSVFPAGVEEGDQKRGAPKNQARRSYRSQRRSVARRARRKRQMRAWLVKNGWMPTDPDARKQWLELNPWLLRAKGLERELTLLEFGRVLLHMAQRRGAYGFDVEEEEEDTGKIKKAVDHTRAEMRRYNARTFGELMARIYEERRREVGRRKRQIRMPIRNRTTAAKEPNYEFCADRDLIEEEFTWLWKAQQSFDGELGKQLNDQRRQELHDPSGDQTWRCRGILFGQRKTYWNMGVLGRCDLEPTDLRCPRLDMHAQQFLVLETVNNITIIPPGEPRRRLSGPERQRVIQFLRKQKTATAATVRRALGIHKGPNKTHYALSLDADPKRTLNTDWFYREIIENAVGQSHWEKMPSHQKEAINRAILKLDPKVEYDRARLEAGCRDWWNLDEDQTRRFVAAWQHRPSASTRLQLSRRAILNLLPYMQDEGLTVNEARKRFAEDPNSGATPDQRERYGFTGKRPSKTVRRFQEKHSDLLPPAPATLSNPVVRKAIHEVRRHLQAYLRMFGPPDRVIIELARDARLPAKVRNEQLAANRVRERERKRIIEDFGLAALPKARITKAVKRVLLCREQKEQCAYCGNGNNTITEKTAAEGNGVELDHIIPQSRGGDNGLNNLVLCHSACNRGKTNKTPREWLSHEQFGKLEQRLRHLKNGNPVKWDNLHKDVSDIQGFTESQLTDTAYASRQVADWLREVLYAGEVGGKRCVFSTKGRYTPWLRRDWGLYSDRSPSSGGSKNRGDHREHALDALVVALSGPERLQELAHAVETAELAKTEGMPLPKREPLPPPWGDSDTFRSQVMKEFERLVVAHRPAQRKITGSFHNDTMYGPVFDKDSRLTRYATIKKFAIELTPNHLRVPKGWDELRQRLDRAPSATARRAIRREMLALEDVKPAKSGVVRDRWFREELRQYLREQGLDPNHFTPKQIKELVLREGISLRSGVPVRRVTLLRAPSVIKIKRKRWNERTADMEYDNHPGAIRLYEPQNNHHIEIRENANGKWIVTNDGVVTTYEAAQRVRPRKSCGQSPRPAVNREDTSAGRFVMSLSIGEMVQMRHPATRTLGYYVVFKIDSTKTIHFTSHWDAGRSKQTDQLAPREDIALSAGQLQALGESPAQPPRKVWVGPLGQVNSLLTD

SEQ ID NO: 16459 - protein, 998 aa, unidentified
  REGION 1..998: note = Cas Enzyme sequence
MATLYRERRNAVGQKGMEARLPIRNRTNAAKEPVYEFCADRDLIREELLALWNRQRSFDGDLARQLTDERLRRLDENQGDETWRTKGILFGQRHTYWNTGVLGRCDLEPTDLGCPRIDMHAQEFLVIETVNNIRIIPPGQTRRPLNPDERRAAVDALRRQKTASPATVRKALGIHKGPAKSQYALSLDADPKRGLNTDWFYREVVWHAIGEAAWTNMTDHQKESVNRAILKLDPKQAGHHARFERGCHDWWGLDDEKTQRLIAVWESRPNPNIRLQLSRRAIQNLLPYMRDEGATVNEARKRFAEDADNGATPEQRERYGFAGTRPSGAIRRFQRKHPDLLPPAPQALSNPVVRKAIHEVRRHVQAYLRRFGRPDRVVIELAREAKLPAKVRNDQLAANRTREKKRNEIVAQFGLIGLTRTQQDKAVKRVLLCQEQGQQCAYCGNGNNTITEKAAAGGLEVELDHVIPESRGGGSGLNNLVLCHTRCNRGKTNRTPKEWLSKDEFAKLEQRLGHLKKSNPVKWDNLHKDVSDITGFADSQLIDTAYASRQVADWLREALYGEALSGTRHVFTTKGRYTPWLRRDWGLYAPGGSKNRGDHREHALDALVVALSGPERLQQLARAVEAMELSKAERAGVPDREPLPAPWVDKETFRAQVMEEWARIVTSHRPQRRRIAGQFHKDQPFGVIVGSARHFTKRIFAVELTASHLRVPKGWDDLQKHLESAPNKGARRAVRSKMLALNDVKPGKSGIVRDRWLREELRQSLRENGLDPDHFTEKQIKEVVATKGLFLHSGVPVRRIRLLRALSKPVKMERRRFNGATRRMEEDIDPRSTEDPRFASRRLRIYDPQNNHHVEIRENAKGTWVVDKKQGVVTTFDAARRVRPPKSAGRSPQPAVHREDTAEGRFVMSLSIGEMVEMRHPKTRTLDCFVVFKIDSTGTIHFTPHWDAGRSRKTDEAPAREDIALSAAQLQKLGEFDDRPPVKVWIGPLGDRKILVHD

SEQ ID NO: 16460 - protein, 1119 aa, unidentified
  REGION 1..1119: note = Cas Enzyme sequence
MPTDKEEVQKWESVNPWILRRDALHRELSEYEFGRILLHLAQRRGSWWFDEEPEEGEEKKKKKEKDPIETPGTIEYTKTMIIGKGAETFGELIAIEYENRRTATKNKNEKEEVKKRSERVRNRANAFGEKVSEFVADRHMILAEFLRILERQKSFGGKLAEQLTDQMKKEIYNPQKTDTWRCQGVLFSQRKAYWNPGTLGRCDLEPTDEKCPKADMYAQEFLVLTSVNNIRITPRMEASRRLTAEEREKVITAVRKQKTASESTIRKALGIDKGANKTHYMLNIDGDKFTVNGDWFYSQIVYKVFGEDTWGRFDEKMKESVNRAVLKFDPKDESDEERIRAGCKNWWNLKSEQIKKFVAAWKGRPKKDSRVNLSRKAIKNLLPYLRDGLSVTEARDMYAHKMDELTRNRYSTREVVVNKRIRHFQGRHPDLLPPVSDGISNPVVRKSIHEVRRHLMEYIKQYGRPDRVVIELAREARQSEKVISRRIQKNKAIDALRKEIIETHKLDVSEITSTQRERAIKRVRLCRQQRGMCAYSGVTITDAGAAAGEGLEIDHIVPRSKGGDNGMSNLVLCYATANQGKGKRTPIDWLSKEDFEKLEQIFRHLQGAKKLKRSKESHPATTKDNVDMVNKRKWENLHRRTPEKGFTEEQLRSSAYAATQTSDWISKVLYGGEDSGKRYVFASNGNYTGILRRDWGLFFDESGERSERGRKLRGDHRHHSVDAAIIAMSAQCLQSIKDSFVDFERQKENKNVKARWKTVDEPWDGFSKQIVDEYKKLKVSHRAYNRQIAGHLHKDTLYGPAIIYERHKKDDKKKGIGKGDLKRDKDGKPIVKKGMYIKCIPVIGIKQNHLRMPDDWDRLKKEYGNATIGSEKKAIRKEMLGLEDVPPGKSGVIRDIELRDKIGEWLKEHEFADMGKAKAYLKENGLNINGTPVRKVRLLWKLKGMTPPIRRKGFDYENSTLEARRKSLRFYQTQNNHHIEIREKVTKKGEIRWSGDVVTNFDAAKRVRTNNEPIIDNGENEKAKFVMSLSRGEVVHMRHPETREVDYFVVFKIDGTGAIHFTRHTDANPASSKEKGVKLREDIALVPDKLRENIMFDERDVPEKVRISPLGEVKVLVKD

SEQ ID NO: 16461 - protein, 1216 aa, unidentified
  REGION 1..1216: note = Cas Enzyme sequence
MKLLGLDIGSNSVGSAWVDTEAKTIKMGVSVFPAGVEEQTEKRGAPKNQARRSQRQQRRSTARRARLKRRVRQYLIQKNWIPTEKERLRKWENLNPWLLRRDGVRKEIKADENFSGAEKFGRILLHLAQRRGAWWFDEEPEETEKRKEKKKDPEKMPGTAEYTKWIMKKKGAETFGELIAIEYENRRSITANDKVRNNRVRNRNDAFGEKVSEFVADRHMILAEFDKIWERQKGFEGELGNQLTETVRKELYNKEKTDTWRCQGVLFSQRKAYWNVGTLGRCDLEPTDRKCPRADMYAQEFLVLTSVNNIRITPPGEQSRKLTDEERNKVVKVVRKQKTASEKTIRKALGINKGANKTLYTLNTEGDKFTVNGDWFYSQIVCGVFGEEAWQAIDSNTKESVNIAILKFDPNDEEDENKIKKGCKKWWRLDDKQTEKFIAVWKKREKEDSRVNLSRKGINNLLPYLRDGKSVTEARNMYAEDASNGADDLTRKRYSTKEVVVNKRIRHFQQKHTNLLPPVAEGISNPVVRKSIHEVRKHLMEHIKQNGCPDRVTIELAREARQTERIIAKGIRKNKAIEELRKEIIDKHNLDGPNITSTQKERAIKRVRLCRQQRYICAYSGLNEEEKKYGCAYSGKQITEAQAVRGDGLEVDHIVPRSKGGDNSMSNLVLCYSRANQGKGKRTPIDWLSKEDFRQLELRFKHLKRDKKDKSGMTKDSVDLTDNRKWENLHRRTPKEGFTEEQLRSAAYAAIQTTDWINKVLYGGDDRSKRYVFASRGDYTGILRRDWGLYFDTEGERSEKGRKFRGDHRHHAVDAVIIAMTTQCLSEIKESFIDFEKQEENKNIEPKRKSVEQPWDGFSEQIAEEYRNVKISHRAYNRQIAGYLHKDTLYGPAVIYERYKKDDEKKGIKKGEIKKDEDGNPKLKKGMYIKSIPATGIKPNHLRMPDGWDKLKEEYKKASTRKQKKAIRRRMTALEDVPPAKSGVIRDIDLRDKIRDWLKDHNFKDMKEAKKYIKENGLIINGTPVRKVRVLWKLKEVKEIPRKTFNLETGEIEKDTKRKSLRVYQTQNNHHIEIREKINRKGDVKWTGEVITNFDAAKRVRIDKKQIVNKNENGNGKFVMSLARGEMVYMKDPETDKTNYFVVFKIDSSKTIHLTPHTDANPAKEKNGKKRKEIPIKPDKTKDNEGLRQLIIYNQDDVPEKVKISALGEVRVLVND

SEQ ID NO: 16462 - protein, 1007 aa, unidentified
  REGION 1..1007: note = Cas Enzyme sequence
MSSKKKRLSSKSSESEGSNAYTLGLDIGSNSVGWALLNTGKNPSIVAIGVRVFPEGVDRDTKGLEKSKNAGRREARGARRVHQRRRNRRRQLVRILRVAGLLPDAEEDLSKLLHERDPYQLRARGLDERLEPYEFGRALYHLNQRRGFKSNRKSGKAKEQGQIAKAAGELQGQIEDSDCRTLGEYLAQLNGDQTRIRDRYTFRAMYEHEFELLWQKQAEFHPELLTDDLKARIRDETIFFQRPIWWDTDTIGKCELEKDEAGRPLPRCPRGDWYARRYRLLQDVNNLRICNPDGSVEFLEPEQRSIVLKELSKKKKLPFSTIRKKLGLLETQEFSVEYQIDEKGNKNKELIGDVFNASMLNKKIFGREVWNEMEQAEKIRLNEWLVELEDDELEEKLATKYRLDEEQIQNILKVSLPQRYMSFSQKAIMKLLPLMEQGKTTDEALYEVYPDRRKADMPEQVDRLPLPSDLRNPIVNRALFEVRKVVNAIIREYGRPRKIKIEMARDVRGGSRERREIHFKMLDNKKRNDQVRTRLVEDMDLANPLRDDVIKYKLWDECGHMCPYTGKHISQSALFGPNPEFQIEHILPYSRSLNDSFMNKTLCWVNENRLKGDQTPFEYYSGDNEKFEQLKQRVNRTAMPYWKKRKFWQKEINTDEIISRELNDTRYICREVVKYLRQICRDVTGTRGKITHELAYQWGFVKDRDDHRHHAIDAAVIAVTEPKHLRELGQSKYSQESIPFEQPWPDFRAELSEKVSHINVSHRATRKVSGALHEETAYGPTRQKGDKGQDTYVHRKPLEALTKAMVARIVDPVVRDIVRQRLLVFNVDPDQKGNIPKDVWKEPLHMPGVAGKGPQIKKVRIHEVFNNLIHIKDAEGKPYCGVKPGNNHHIEIFDFVDNKGRSKRGGEVVSLFEAVARARAGIPVVRRIRDRNEQFVCSLAKGDMFLLEKDAGETLLCRVQEIWESTNIVLRPHVNAVEAGDINKSASRLRGRKVTVDPLGRLWPAND

SEQ ID NO: 16463 - protein, 1029 aa, unidentified
  REGION 1..1029: note = Cas Enzyme sequence
MTSTQTRISYNKQKVAYWTEVCQEKNENFPILGVNIMGSYTLGLDIGSNSIGWALLNTEGKASVLDIGVRVFPEGVDRDTQGAEKSKNATRREARGARRVHRRRNFRRNQLVKTLQATGLVPKDKQQSEKLLKIEPYQLRARGLDEKLAPFEFGRVLFHINQRRGFKSNRKTGKANENSKIAKEAGELQKEINEANCRTLGEYLAKTNPEENRIRGQYTFRKMYEDEFDLLWEEQSKYYPDVLTENLRNKIRNEVIFYQRPLKPTDDMIGDCDLEEGEKRCPRGDWYARRFRLLQDVNNLKLQNSDGSEGKLTEEQRKTIIEVLEKRKELKFNDMRKKLNLMETQEFNLEQGGKVKSLKGDVFSSAMRSKNLFGPKVWDTMDEAEKIKINEWLVDLDDDELIENMKSEYDLNDEQVDRVLKVSVPQRYMSFSRKAIRKLLPLMEEGKRTDEALAEVYPDRNKKGIEEKNKLALPEDLRNPIVNKALFEVRKIVNAIVREYGKPKKIKIEMARDIKGNRREREELHFKMRENERRNEETRKRLIEDIGIRNPSRDDVIKYNLWEECGHTCPYTGKHISQSALFSDNPEFQIEHILPYERSLDDSYMNKTLCDVYENIHVKGNKTPYEAYNSNSEKYEEIKQRIKVLPWPKRRKFLQKKIELDECISRELNDTRYICREVVKYLKLLGVNVTGTRGKITSELRHQWGLNNILDLSVSDMKNRDDHRHHTIDAAVVGVTRNEHLRRLAKSKYAETGTGFKFEHPWKDFREELGEKVKHINVSHRATRKVSGPLHEETSYGITGEKDEKGQDILVYRKKLEDMTGPMVKNIVDPVVKEIVKDRLAKNDIDPEKQKKIPKEVWAEPLYMKNTKSDKKVPIKKVRIYNVAKRIEIFNDNEGNSYRAVKPGSNHHIEIFEYKDKKGNTKRDSNVVTMFEAVRRKKDGEPIIKTKYGEGRKFVCSLSINEMVMMKNKHGEMDLYRVQKMDQNKMVRFRHHTAATIDKNETYIDKTAHLFEGHKVTVDPLGRIHRAND

SEQ ID NO: 16464 - protein, 936 aa, unidentified
  REGION 1..936: note = Cas Enzyme sequence
MRLARLRSWVLRQKLPNLPDPYIVMKDRRFHVQPGVFQTPGRNPAGLPSWIDLAKQGKVDAGGFVRALTLIFQKRGFKWDSIELAKMTDEKMKDFLQTARVPSDNLASDIREEIQRRQQDPDSSVRGKKKVPPDELLVLLEQARERQPQPRVAEHRSVKEADLRSVVEGFGNSINLPKATIQRWQQELSGLLNKVLRPARFDNRLRTGCAWCGKPTPRKGKMRDVAYQAVVHNLRVREGRAIRPLKPEELAEFMKWWQLRGQNVEPQENISQRKQSRKGGSQTVPKLKAIQSRLKKLGAQEQMARQLYDLLWNEKPQGRASLCSQHLAEAAQGRTMKDVVGEWQRLKVRKAPNPCREQHDARVLHRLEEILFKPHEQGEEAWRYGPVQWITLEVPKPQTEQARKGEQKPRKPESFMERLKRETNGACIYCDSPNPNSAGDKDHIFPQSRGGPDVWDNLVPVCRTCNTAKGDRKPFEWLGADRDRWLRFTQRVEALAFQGIQVEREDGKGETVRISERKRALLLSEDMEYPDNPTPLAHVGARPRQFVVALRTLFEKHGVAVPSVNYASDTPFIQRIDGRTTSQLRKSWLKKADGTTDNFPSKNDWDLFNHAQDAALMAACPPHTWRDLIFTHSAERPIWGGSWKQVPGLAIPELAPDWTEYLERRTWPLVKVLGQYPVSWKRKFADLTFSQNPDSLDDKRLIQYLPIADMSHSGKGPDGKRHPAETEIINPMLDKKFRAVATALGLKKGRTLPEKNLREEFPGIRHVKVRKQPGGKLIRVEPEDGPPRKVEIKRASEAVIFWVAKGRPLAKLRLSLRWPAILAGHGVARYEPSIPNEARVLATWERYQFLRLGPEVVEKPGFYRVKEFDEATVTLLPESAMPDALAKRLNLNRRANAEESAQASSVGQEVRLGKTALVKYFSTIEGEKHHDPGATS

SEQ ID NO: 16465 - protein, 1114 aa, unidentified
  REGION 1..1114: note = Cas Enzyme sequence
MTSKQENLGALTFGLDIGIASVGWAVLGEDRIISLGVRCFDKAETAKEGESLNLARRSARLLRRRLRRRAWRLTKLSRLFKREGLIPHISALKIPFAQSLWQLRVEALDRQLKPEEWARVIYHLCKHRGFHWISRAEEKAAEGDNKGESGKVKQGLAGTKKLMSDKNYRSAAEMVLTEFPDAQRNKQGDYSKALSRILLGDELKELFRRQRELGNPHTSTDFEAQILGNGDKKSGLFWQQNPALAGNDLLKMLGHCTFEKTEYRAPKASYTTERHVWLTRLNNLRIVVDGSTRSLNEAERREILTMPYKQAGDFTYKQLRTALTKAGYLPDSFRYTGLSYASGQKADEKTKDPESAVLVKLPAWQELRKTLEKNELTSEWQKISTNALEGRPQLLDDIAWVLSVYKDDAEVETELRKLSLPNAEKMIDALLDIRFDKFSNLSLKALRQIVPFMEQGQRYDEAVANIPEYGHHSQLHKVGAGEHKYLPPFYSERDKTGRMVFNDDIDIPRNPVVLRALNQARKVVNALIKEYGSPHEVHIEMARDLSRPLDERRDIEKLQKEFQIEKEKGAEYFMSVVKREPKRDELLKMRLFREQLDQCPYCQCELDIHRMFDKPDDMYAQVDHVLPYSRSFDDSMNNKVVVHTKCNQDKGNRTPYEYLGGAEDSLLWRKFVAFVGSSKAYRQAKRNRLLRKDFGADEAKGFRERNLNDTRYICKFFKNYVEQYLQLHEDSEAKRCVVLSGQMTSFLRARWGLVKVRSDSDRHHALDAAVVAACSHSMVKRLSDYSRRKELEQVQAGFVDVDTGEIINPAMFDQLEQHFPNPWPHFRDEIIARLNIDNPILLREEMQRLGTYSKAALEAARPLFVSRSVSRRGGGEVHKAKIFGLKEDSANKAFEKVQLANLTLSKLEKMVGKNDPRNQATYELLRDRLTSFGDDPKKAFGPQQPKLLKPSKVGKNAPEIRAIRVEETQNSGLFIRGGIADLGEMIAVDVFQHKIGSFAVVPKYQAFPEKMRSTLASPAESKFCFSLTKNDYVEIEIGTEFVRGYFVMYESDGRMTLRAHDQPQPDKKYFRKSVAGAKNIKKYNIDILGNRYPAPPEKRRLYPAQRSGAEHDLA

SEQ ID NO: 16466 - protein, 1126 aa, unidentified
  REGION 1..1126: note = Cas Enzyme sequence
MNYNGFIITENAMTSKQENLGALTFGLDIGIASVGWAVLGEDRIISLGVRCFDKAETAKEGESLNLARRSARLLRRRLRRRAWRLTKLSRLFKREGLIPHISALKIPFAQSLWQLRVEALDRQLKPEEWARVIYHLCKHRGFHWISRAEEKAAEGDNKGESGKVKQGLAGTKKLMSDKNYRSAAEMVLTEFPDAQRNKQGDYSKALSRILLGDELKELFRRQRELGNPHTSTDFEAQILGNGDKKSGLFWQQNPALAGNDLLKMLGHCTFEKTEYRAPKASYTTERHVWLTRLNNLRIVVDGSTRSLNEAERREILTMPYKQAGDFTYKQLRTALTKAGYLPDSFRYTGLSYASGQKADEKTKDPESAVLVKLPAWQELRKTLEKNELTSEWQKISTNALEGRPQLLDDIAWVLSVYKDDAEVETELRKLSLPNAEKMIDALLDIRFDKFSNLSLKALRQIVPFMEQGQRYDEAVANIPEYGHHSQLHKVGAGEHKYLPPFYSERDKTGRMVFNDDIDIPRNPVVLRALNQARKVVNALIKEYGSPHEVHIEMARDLSRPLDERRDIEKLQKEFQIEKEKGAEYFMSVVKREPKRDELLKMRLFREQLDQCPYCQCELDIHRMFDKPDDMYAQVDHVLPYSRSFDDSMNNKVVVHTKCNQDKGNRTPYEYLGGAEDSLLWRKFVAFVGSSKAYRQAKRNRLLRKDFGADEAKGFRERNLNDTRYICKFFKNYVEQYLQLHEDSEAKRCVVLSGQMTSFLRARWGLVKVRSDSDRHHALDAAVVAACSHSMVKRLSDYSRRKELEQVQAGFVDVDTGEIINPAMFDQLEQHFPNPWPHFRDEIIARLNIDNPILLREEMQRLGTYSKAALEAARPLFVSRSVSRRGGGEVHKAKIFGLKEDSANKAFEKVQLANLTLSKLEKMVGKNDPRNQATYELLRDRLTSFGDDPKKAFGPQQPKLLKPSKVGKNAPEIRAIRVEETQNSGLFIRGGIADLGEMIAVDVFQHKIGSFAVVPKYQAFPEKMRSTLASPAESKFCFSLTKNDYVEIEIGTEFVRGYFVMYESDGRMTLRAHDQPQPDKKYFRKSVAGAKNIKKYNIDILGNRYPAPPEKRRLYPAQRSGAEHDLA

SEQ ID NO: 16467 - protein, 1175 aa, unidentified
  REGION 1..1175: note = Cas Enzyme sequence
MNKKILGLDLGVGSIGWSLITLDEGGHPAEILGMGSRIVPLTSDDMQEFQKGKAITKNKDRTMKRSARRGLDRYQQRRAKLSRLLCEFGLGFPRPLMSLSPLALWGLRADAATEGKVISLAELGRVLYHLNQKRGYRHSKSDESSKQDTEYVAAVKTRYAELKNESLTIGQYMYRYLSASAEKGADTLSCVHYRVKDQVYPREAYMEEFDRIMAVQQKAYPEVLTSVVLQKLRDCIFFQRPLKSCKHLVSYCEFERKTREVQIPVVGADGTTSYKTKIVDIGPKVAPVSSPLAEVCRLWESINNIRIYYPDGAVYPLSLEHKQAFFNKLQESESLKFSDAKKIIGAKAKDKLWCNDLLKSGIKGNRITATLRKLIEDYPQYKALLRFDLKQEDSCRVDLSTGEVLPLISVSYLNEPLYKLWHILYSVAEREAMGNALRKQLGVEQGDLDKGLLDACMKIDFTKQGYCNKSAKFMCKLLPYLQQGYMYSESADLAGYKHSDSKTKEELEHRELKPRIELLPKNSLRQPIVEKVLNQMINLVNALKDKYGEIDEVRVELARELKMGREERKKYSTRNSKNEKDNKRVAKEISEFCTPTKNRIQKYKLWEEANRACIYCGKEITKPSLFSDGEAEIEHIIPRSVLYDDSMSNKTCACRSCNKAKNNRAAMDWVLTQTEEFQTKYFNRLEELAKKSLSNGKRQRLMTLLKDIPEDFIERHLRLTQYISRKATEILKDGIRYVWSSEGSVTSTLRHLWGYDKILEDLNFERYKSMGETQTILVKRGLAEQEVERIKDWNKRKDHRHHAIDALVVACTRQSYIQRLNRLSSEEDRQSMQSELGSSYSPSKEERMQLLDKWLTAQPHFSAQAVRDYVRGILVSYRPDRRTYTKSRNKVKIKGLVSLQTGILTPRGALSEETIYGAIQVDGSKKIVCKYSLDKLQGKKVQRIVDEGIQRIVKARLEAYNNDAKKAFAEPLYSDAAQTKQIRSVRCFTGRVREKLIPLRRNDAGEEIAFVAPGNNHHVAFYRDSEGVLQEAVVSFYQAIERAKYQLPMIIKDPRAVVEEAWERNVPDSVLSTLPHSSWTFVESLQKNEMFLIGLSDDEIARAIKNADRAPFNDHLYRVQKIALNEYWFRFHLEPELDDLDGDIPKYYKMSFAKYLELNPRKVRVDLLGNLSLME

SEQ ID NO: 16468 - protein, 1182 aa, unidentified
  REGION 1..1182: note = Cas Enzyme sequence
MNKKVLGLDLGVGSIGWSLITLDEGGHPAEILGMGSRIVPLTSDDMQEFQKGKAITKNKDRTMKRSARRGLDRYQQRRAKLSRLLSEFGLGFPRPLMSLSPLALWGLRADAATEGKVISLAELGRVLYHLNQKRGYRHSKSDESSKQDTEYVAAVKTRYAELKNESLTIGQYMYRYLSSSAEEGADALSCVHYRVKDQVYPREAYMEEFDRIMAVQQKAHPEVLTSVVLQKLRDCIFFQRPLKSCKHLVSYCEFERKTREVQMPVVGADGTTYYKTKIVDIGPKVAPVSSPLAEVCRLWESINNIRIYYPDGAVYPLSLEHKQAFFNKLQESESLKFSDAKKIIGAKAKDKLWCNDLLKSGIKGNRTTATLRKLIEDYPQYKALLRFDLKQEDSCRVDLSTGEVLPLISVSYLNEPLYKLWHILYSVAEREAMGNALRKQLGVEQGDLDKGLLDACMKIDFTKQGYCNKSAKFMCKLLPYLQQGYMYSEAADLAGYKHSDSKTKEELEHRALKPRIELLPKNSLRQPIVEKVLNQMINLVNALKDKYGEIDEVRVELARELKMGREERETTSRRIAANEKDNKRVAEAIAEYGTPTKNRIQKYKLWEEANYECIYCGKQIGLANLFSDGEAEIEHIIPRSVLYDDSMSNKTCACRSCNKAKNNRAAMDWVLTQTEEFQTKYFNRLEELVATKRLSNGKRQRLMTLLKDIPEDFIERHLRLTQYISRKATEILKDGIRYVWSSEGSVTSTLRHLWGYDKVLEDLNFERYKSMGETQTVLVKRGSVEQEVERIKEWNKRKDHRHHAIDALVVACTRQSYIQRLNRLSSEEDRQSMLSELGSSYTPSKEERMQLLDKWLTAQPHFSVQAVRDYVRGILVSFCPDRRTYTKSRNKVKIKGRVSMQTGILTPRGALFEETIYGAIHVDGSKKIVYKRRLENLQTKDVPNIVDKGIQRIIKARLEAYNNDATKAFAEPLYSDAAQTKQIRSVRCFSRCVYKNMIPLRRNDAGEEIAFVSPGSNHHVAFYRDSKGVLQEVVVSFYQAIERAKYQLPMIIKDPRTVVEEALERNVPDSVLSALPHSSWTFVESLQKNEMFLIGLSDDEIARAIKEADRATLNDHLYRVQNISDGYYMFRFHLEVKQNKESDKNNGKFIPKFYRVQSLKTYLGLNPRKVRVDLLGNLSLME

SEQ ID NO: 16469 - protein, 1178 aa, unidentified
  REGION 1..1178: note = Cas Enzyme sequence
MDKKILGLDLGVGSIGWSLITLDEGGHPAEILGMGSRIVPLTSDDMQEFQKGKAITKNKDRTMKRSARRGLDRYQQRRAKLSRLLCEFGLGFPRPLMSLSPLALWGLRADAATEGKVISLAELGRVLYHLNQKRGYRHSKSDESSKQDTEYVAAVKTRYAELKNESLTIGQYMYRYLSASAERGADALSCVHYRVKDQVYPREAYMEEFDRIMAVQQKAYPEVLTSVVLQKLRDCIFFQRPLKSCKHLVSYCEFERKIKEVQIPVVGADGTTSYKTKIVDIGPKVAPVSSPLAEVCRLWESINNIRIYYPDGAVYPLSLEHKQAFFNKLQESESLKFSDAKKIIGAKAKDKLWCNDLLKSGIKGNRTTATLRKLIEDYPQYKALLRFDLKQEDSCRVDLSTGEVLPLISVSYLNEPLYKLWHILYSVAEREAMGNALRKQLGVEQGDLDKGLLDACMKIDFTKQGYCNKSAKFMCKLLPYLQQGYMYSEAADLAGYKHSDSKTKEELEHRELKPRIELLPKNSLRQPIVEKVLNQMINLVNALKDKYGEIDEVRVELARELKMGREERETTSRRIAANEKDNKRVAEAIAEYGTPTKNRIQKYKLWEEANYECIYCGKQIGLANLFSDGEAEIEHIIPRSVLYDDSMSNKTCACRSCNKAKNNRAAMDWVLTQTEEFQTKYFNRLDGLVATKRLSNGKRQRLMTLLKDIPEDFIERHLRLTQYISRKATEILKAGIRYVWSSEGSVTSTLRHLWGYDKVLEDLNFERYKSMGETQTVLVKRGSAEQEVERIKDWNKRKDHRHHAIDALVVACTRQSYIQRLNRLSSEEDRQSMLSELGSSYAPSKEERMQLLDKWLTAQPHFSVQAVRDYVRGILVSFRPDRRTYTKSRNKVKIKGCVSLQTGILTPRGALSEETIYGAIQVGKRKEIVCKYRLENLQAKDVPSIVDKGIQRIIKARLEAYNNDAKKAFAEPLYSDAAQTKQIRSVRCFTGRVREKMIPLRRNDAGEEIAFVAPGSNHHVAFYRDSEGVLQEAVVSFYQAIERAKYQLPMIIKDPRAVVEESLERNVPDSVLSALPQSSWTFVESLQKNEMFLIGLSDDEIARAIKEADRATLNDHLYRVQKYSSKYYCFRYHIETLLDENNGGTIPKFYRVQSLKAYLELNPRKVRVDLLGNLSLME

SEQ ID NO: 16470 - protein, 1113 aa, unidentified
  REGION 1..1113: note = Cas Enzyme sequence
MSYGIGLDIGIGSVGYAVLDLDHEEKPWGIIRLGSRIFDKAEVPKTGGSLARPRRDARSSRRRLRRHRHRLERIRQLFLKSHLLSQKELDTLYEGKLPDIYELRVKALDERVTNSELARILLHLATRRGFKSNRKAELADSEAGALKTAISENARIMAEKHYRTVGEMFLHDFRFKEHKRNKGGSYTTTVDRSMVAEEAELILDTQQKLGNIVVSDAFKDDYMTIMLSQRAFDEGPGGKSPYGGNMIEKMVGNCTFEDGSHGEPEEKRAAKACYSFEYFNLLQKINHIRLVSDKESIPLSNDQRNVLISLAHKVEKLTFARIRKELGISLEYSFNMVRYNEVNKDNIAEAMKAAEKKEKFEYLSAYHRIIKTLKSKGKDRIVAYTPEILDQVGWYLTIYKGDDKRREALKTVGIPDDDVEKLLEISGVRKFGHLSLKALRKINPFLEQGMTYNEACEAAGYDFQGHLVEKSMYLPAKAPELDDITNPVARRVISQTIKVVNAIIREQGESPLYINVELARELSKNFQERGKIEKENESNRHKNEMVMEKLRENFTNHKPSGQDLVKFKLWHEQDGISPYSQKKIEYGRLFETGYAEVDHVIPYSISFDDTYKNKVLVLASENRDKGNRIPLAYLSEDKGQEAANRFKVWVNSNVRDYRKRQRLLKESLTEDDFKGFKERNLTDTKYISRFMYNYISDHLLFAPSETGKKRRVTAVNGMITSYLRKRWGINKIRGNGDKHHAVDAVVIAAATPSLIQEISGYTAYRETGRYKKNYAYEQGLNGGYLIHKGTGEIKAEFPYPWEGFRNELIARSSDRPTMGLEKSPYYVNRDLSEIKPIFVSRMPRRTITGPAHKDTVMGARHLEEGYTLSKVSLTDLKLDKNGEIKDYYNPNSDRLLYNALKERLTAYGGKSQEAFAEPFYKPKTDGTPGPLVKKIKIMNKTTMPVMVQNKTGAAGNDSMVRVDVFHVEGEGYYLVPIYVADTVKKQLPNLAIVANKPISQWKVMDEKDFLFSLYPNDLIYFKSKGVKTFSRVNDDSSLREKYETNEGLVYYVKTGINTASITIISNDHSYILNSFGVKSVSLIEKYEVDVLGNYHKVKREKRRPIVFKKKKNC

SEQ ID NO: 16471 - protein, 1001 aa, unidentified
  REGION 1..1001: note = Cas Enzyme sequence
MAEPYLVLGLDPGISSCGFALLDMNNHKILEMGSHLFDAPQESDKKVSLAVKRRNARSARRNNLRTKNRQKHCMELLKEADLVPQDATKQWFQSAKGDRPLLELRFAALERPLTNREFAQVLYALSARRGYIPHGEGRISKISDVDTSGTSDAETGKVLKAIGENNKLMAQGHFRTVGEMLYNQGKSRNKRGSYEHCVLNSQIVDEVRAIFQSQRSYQNPIATQELEDAYIENLTWEKRTLDHDAKVYALVGKCVYFSNDENRAARADLSSELCNAYERLKHLRIVNADGDETALAPEQVEAYIAILFSPEPLKGKKEKVTYARIRRDLDLSARLFFKGIDPEDEKDHEPYAPKAWRTMRKVLSPELMERLRSDRTLADAVGEALTYASTEDSLLYQLDNLDLSDEERNQILGLPFSGKIFKGYGSRSLKALDMLIDAFEEPEVTTLAEAEESSGLLGLRMSDSGTRYPLLPPYSTYDKENRNPVVLRAMGRMRRIVNAIIRIYGVPDEIHVELGRDLKRSKHEKDLINKRDRENERKNKQWRAQIAEAQGIDPDEVRPKLLKKIALWEEQDNFDIYTGHKIEFDRMISDDKYCEIDHVLPYSRTCDDSRNNKVLVLSKSNQDKRERTPYEWMTQDAQKGAPSWDEYQARVIANHHISPRKRRYLLNNNLGPDQERDFLSRNLNDDRYMSRAVKNYLEDSLIFPKDGRVRHVIAVAGGATGSLRHVWGLNFGANNTKDRSDDRHHAVDACVIAACSEATVQAVAKAHKLGVETYKHMREDRLKNTQPWPTFADEVIARREFIIPTRMVSHGVTGQAFKDTNYRFVGLTNDTKKLGVLYYKGKFTKEGNFVIGDDGNARLVDGMAFLRLWLDPTAKKGKGKWYAEPVYYADIPAIKNGTYIPKAGKRGVARIVWEPISQVARNTKPLVLFRGDVISMGGHTVRYWSFSINTLTLRTRDLITGAEYKGFPTINQWSRDSYPKKIQEDCLGHCYKGLVPSSLED

SEQ ID NO: 16472 - protein, 1000 aa, unidentified
  REGION 1..1000: note = Cas Enzyme sequence
MAEQYLVLGLDPGISSCGFALLDMNNHKILEMGSHLFDAPQESKTKVSLAVGRRNARSARRNNLRTKNRQKHCMKLLKEAGLVPDDATKQWFQSAKGDRPLLELRFAALERILTNREFAQILYALSARRGYIPHGEGRISKLSDMDTSGSSDAETGKVLKAIGENNKLMVQGQFRTVGEMLYHQGKSRNKGGSYEHCVLNSQIVDEVHAIFQRQRAQQNPAATQELEDKYIENLTWEKRTLDHDARVYALVKKCKYFPSEYHAARADLSSELCSAYERLKHLRIVNADGHETALAPEQVEAYIAILFSPEPLSGRKEKVTYARIRKDLDLSAHLFFKGIDPEDEKDHEPYAPRAWRAMRKVLPTELMNRFRNDRALADAVGEALTYASSEDSLIYQLDSLDLSEAEREYILGLPFSGKIFKGYGSRSLKALGMLIDAFEEPEVTTLTEAEESSGLLGLRMSDNGMRYPLLPPYSTYDSENRNPVVLRAMGRMRRIVNAIIRIYGVPDEIHIELGRDLKRSKHEKDLISKRNRENERKNKQWRAQAAEIQGIDPDEVRPKLLKKMALWEEQGGLDAYTGHKIEFDRMISDDKYCEIDHVLPYSRTCDDSRSNKVLVLAKSNQDKRERTPYEWMTQDAQKGAPSWDEYQARVIANRHISPRKRRYLLNNNLGPDQESDFLNRNLNDDRYMSRAVKSYLEDTLIFPEDGRKKHVTAVSGGATGSLRHVWGLNFGDGNTKDRSDNRHHAVDACVIAACSEATVQAVAKARKLGAEAYKHIREDRLKDTQPWPTFADEVVARREFVIPTRMVSHGVTGQAFEDTNYRFDGLTNDTKKLGILYGNGKFTKKGNFVIGGDGNAHLVDGMAFLRLWIDPTAKKGKGKWYAEPVYYADIPAIKNGTYVPRAGKATVARNAWEAIPEAAHRTKPLVLFCGDVISMDGHTARYWSFSINTLTLKTKDLITGDDYKDFPTLGKWSKDSYPKIIQEDCLGHCYKGLVPKSSEG

SEQ ID NO: 16473 - protein, 996 aa, unidentified
  REGION 1..996: note = Cas Enzyme sequence
MAKNDEVRPYYVLGLDPGIASCGFALLDMDNHKILEMGSHLFDTPQTDKTHTSLAVVRRNARSIRRNNERTKNRQKHCLKILVQYGLVPQTADKQWFQTKPGDRPTLKLRARGLDQLLSDRELAQVLYSLSGRRGYIPHGIGHVDAASADEGLVSEEDGKVLKAVQENAALMKANGYRTVGEMLNARGESRNKSGKYELCVLNSQLAEEARQLLQAQERLGNPKVSSNLVDEYISCMQWEKETLGHDAKVYSQVGKCVYFEDERRAANADLSSELCRAYERLGHLVIVEESGDEKRLTSDQRDQYLELLFSPAFIKGNKDCKVTYSRIRKDLDLSERSLFKGIARDDEKKSEVFIPKAWRSMRKHGIPTALMERMLQDHSFADAIGEALTYASTEDSLRAQLEPLDLGEADENAISALPFSSKVFSGYGNRSLKAIRLLLDSFDDSAVMTLTEAEEASGLLNLRLHHEQTKSTVLEPYYLYDPTCNNPVVLRAMGRMRRIVNAIIKIYGVPDEIHIELGRELKQSGKEKAKIAKSNLRNQANNKAWSETIGESLGIAPEEVRGKLLRMYGLWLEQGNKDIYTGQTIEYERMIREDHYCEIDHVLPYSRTCDDGRANKVLVLAKSNQDKRERTPYEWMEEDSSAPDWENYRARVIEQVKDPRKRRNLLNDDLAEGDHEAAFLARNLNDTRYMSRAVKSYLEDTLLFPDDGRTKHVLAVAGGATGNLRWVWGLNTGENNSKDRSDDRHHAVDAAIIAACNEATVQKVARERARGAKAFKANRESRLADTQPWPTFADDVLARREEVIPTRMVNHGVTGRAFEDTLYHYEGKADEKTGLSRLRSGGKTVKKGNVEILEDGSARLIDGMAFLRLWLDPDARPNGKVKGRYYAEPVYYADIPAIKNGTYVPRACKNHVARTEWEPIPLAAMGHKPVTLFRGDVISLDGVLLRFWSFGITNCNMELHDMHTGEAITPLLTVSSLGRDSALFVIQEDVLGHRC

SEQ ID NO: 16474 - protein, 1006 aa, unidentified
  REGION 1..1006: note = Cas Enzyme sequence
MEANRPYLVLGLDPGIASCGFCLLDMTNHKILEMGSHLFDAPQEAKTKTSLAVTRRNARSARRNTLRTATRMKHCLALLKGADLVPEDADKAWLQSKKGDKPILKLRANGLDRKLADREFAQVLYSLCGRRGYIPHGEGRLGETDDGEGRKVLSAIKANEATMKRGNYRTVGEMLYANHGKSRNHGGDYSLCVNNSQIKDEVHALFAAQRALGNSKASEGFEKDYIDCLEWEKKTVDHDKRVYELVGACPYFPEEKRAADADISSELCRAYERLGHIVIVHEDGSEQNLTPNQIDGYLDVLFSPLPLKGNKECKVTYGMIRKDLDLSGKDVFKGVAQDGEKGEPFSPKSWRCLRTALYENHEDLLVRMFKDRELGDDICEALTFASTEASLGERLGLLDLTDDEQAALCSSVPFTGKLFKGYGSRSLKALGILLGAFEEPEIRTLTDAERATGLLDLRLADRGLRDNLLPSYSKYDPTCRNPVVLRAMGRMRRIVNSIIRIHGVPDEIHIELGRDLKMSNKEKATVSKNQRANEAANKKWAAKAASILGCSPEEVPGRIVRKLAMREEQGEKDAYTGAAIDLEHLVRDDRYCEIDHILPYSRTCDDSRANKVLVLSKSNQDKRERTPYEWMTSGEPGAPDWDEYRNRVMATVKYARKRANLLNTDLGPNVQAQFLARNLNDDRYMSVAVKNYLEDCLLFPNDGRKKHVTAVAGGATGNLRWVWGLNFGQGNTKDRDDDRHHAVDAAIIAACSESTVKKVAEASSKGRETFKHLRKSRLSDTQPWPTFAEEIAARRAFVVPTRMVNHGVTGRVFEDTLYHLEGFTNDKGKYPLVRAGEKTAKKGNVRIGPGGSVKLIDGMAFLRLWLDPNARPNGKVKGKWYAEPVYYADIPAIKAGTYVPRACTIHVARNAWEPVPESAMQGDPVVLFAGDVVEVDGHIGRYSKFDISGGRMTILGLLTKAEVGNWPSLGSWGRDTQVHVLQEDCLGHCYDGIVIDPDNSSFRQRE

SEQ ID NO: 16475 - protein, 935 aa, unidentified
  REGION 1..935: note = Cas Enzyme sequence
MKHCLALLKGADLVPEDADKAWLQSKKGDKPILKLRANGLDRKLADREFAQVLYSLCGRRGYIPHGEGRLGETDDGEGRKVLSAIKANEATMKRGNYRTVGEMLYANDGKSRNRGGDYSLCVYNSQIKDEVRALFAAQRALGNSKASEGFEKDYIDCLEWEKKTVDHDKRVYELVGACPYFPEEKRAADADISSELCRAYERLGHIAIVHEDGSEQNLTPNQIDGYLDVLFSPLPLKGNKECKVTYGTIRKDLDLSGKDVFKGVAQDGEKGEPFSPKSWRCLRTALYENHEDLLVRMLKDRELGDDICEALTFASTEASLGERLGLLDLTDDEQAALCSSVPFTGKLFKGYGNRSLKALGILLGAFEEPEIRTLTDAEKATGLLDLRLADRGLRDNLLPSYSKYDPTCRNPVVLRSMGRMRRIVNAIIRIHGVPDEIHIELGRDLKMSNKEKATVSKNQRANEAANKKWAAKAANILGCSPEEVPGRIVRKLAMREEQGDKDAYTGAAIDLEHLVRDDRYCEIDHILPYSRTCDDSRANKVLVLSKSNQDKRERTPYEWMTSGEPGAPDWDEYRNRVMATVKYARKRANLLNTDLGPNVQAQFLARNLNDDRYMSVAVKNYLEDCLLFPNDGRKKHVTAVAGGATGNLRWVWGLNFGQGNTKDRDDDRHHAVDAAIIAACSESTVKKVAEASSKGHETFKHLRKSRLSDTQPWPTFAEEVAARRAFVVPTRMVNHGVTGRVFEDTLYHLEGFTNDKGKYPLVRAGEKTAKKGNVRIGPDGSVKLIDGMAFLRLWLDPNARPNGKVKGKWYAEPVYYADIPAIKAGTYVPRACTIHVARNAWEPVPESAMQREPVVLFAGDVVEVDGHIGRYSGFNIFGGRITILNLLTKAEVGDWPSLGSWGRDTQVRVLQEDCLGHCYDDIVINPDNSTFRQRE

SEQ ID NO: 16476 - protein, 910 aa, unidentified
  REGION 1..910: note = Cas Enzyme sequence
LDRTLTDRELAQVLYSLTGRRGYIPHGEGHLDDVDDAEAGKVLAAVRENQNQMAKKGYRTVGQMLYKEGRSRNRGGDYTLCVLNSQIIDEAKIILDEQRSHGNAILTKMSNGEFEQFTNSYIDCLTWEKKSTKHDERVYSLVGACTYFPEEKRAAEADLSSELCRAYERFGHLVMVDADGTEHRLSAKDRARYLQILFSPVPIRGNKDCKVTYATIRKDLDLSAHVSFKGIEAERENKEEPFSPRRWRKLRACGVPEGLLARMLEDRDLADSIGEALAYASTEESLRDKLSSLDLSDDEINQLAVNVPFAGKLFSGYGSRSLKALHMLLDMFEDESILTLDDAERESGLQALRLADKGHRSLNLPPYDIYDPTCNNPTVLRALGRMRRIVNAIIRIYGVPDEIHIELGKELKQSSKEKKSIAKSNLQNKKDNERIAKTIAELLGCSPDDVRGKQIRRFALREEQGCKDAYTGDSIDLMRMLTEDRYTEIDHILPYSRTCDDSRANKVLVLQKSNQDKKERTPWEWMSDDASKGAPDWEEFKARTLTNHRLSYKKRDHLLNQNLNGQEQSFIDRNLNDTRYMSVAVKDYLEKSLLFPDDGRKSHVIAVAGGATSALRHVWGLNFGADNTKDRSDDRHHAVDAAVIAACSQATVKKVADTSKLGHSEFKRKRESRLADTQPWPTFADEVIARREFVIPTRMANHGVTGSAFEDTIYRYEGIREGKDSLAVLSKSQGKDKPRAVKPSGNYRLDADGGAHLYDGIAFLRFWLDAEARPKGKVKGKWLIEPVYYADIPLIQCGRYIPKYIPAAHLARDQWVEIPESVLATDPVTVFFGDVLYVDGHIGRYSGFNINGLKLTMHSVISGESIAFPPVSSTWSKDSEVRIIEEDVLGRCWTPNIAKLVRLQEAASSS

SEQ ID NO: 16477 - protein, 1020 aa, unidentified
  REGION 1..1020: note = Cas Enzyme sequence
MEKREEYMENINNYTLGIDLGTNSIGWAVVEHHDNLQPSGLIACGTRIFQEAVDAKSRVPKNQARRAARSARRLIARRKMRHKEVLSLLLNKGLLPSNNDEREILFTDNKSFDPYQLRKKALDTKLTLHELGRVLYHLAHRRGFQSNRKALSKEDGVIKSSITSLHNEIKNSGCRTLGEYLADQPKKRNRYTNRTMYQEEFEQIWQEQQRHYSDLLSQAFKVSIHKAIFFPRPLKIQKNLVGKCTFEPSRKRAARALLETQRFRILTDLNNLAVKNPVTREYRTLVSEEREKLLAILERQKTLSWNKARTALGLHEGEIFNLEEGKKKELIGNRTAFALRSILKKQWDEMGQTKQNDLVTDILTIDNEQGFLNRMTSHWGFDAETAEKLATTELEPGYARLSLKAIRKILPYLEQGMIYDKACKAAGYNHSAPNQQVATDRLGAPPYLRNPVVQKALYEIRKVVNAIIQSYGKPVVIRVEMARDMKLTRRQKEESQKRQKENEKTNDKAKGILQREFRIQNPSRADIQKYNMWIECNMTCPYTGISISREMLFSPEVDVEHILPYSRSLDDSYMNKTLCMAAENRSSKHNRTPYEAYHADETKYQTILQRIRALPWPKRRRFEQKDIDTDAFVERQLNDTRYICTEVKKYLQQTGVNVEISKGEATAALRHRWNLNRILSADGSSEKNRADHRHHAIDAVVIALTSRSLFQELSMLSAQSSVSLSERGFPLESPWPSFYEDVDEKIENIIVSHATSRKISGALHEETAYGFSKHENCFLYRKPLDANITLSQIMKIRDRYIKELVIARLEKFEPEIRNAINETIPRRLRFKMTKKQEKELMKKAFGNVNDPLLHKDGKTTIKSVRIMDNTLKSNMLAVKNRCGQEYKYYPFGNNHHIEIIEHAETGRREGFVVTSAEAARRARINKIPIVQKNPPWEKEGEIFGNEWKFGMSLAINDILMIDKDGLKQYFRVQKISSNTQIFYLSHAAAILDESTSKMPDALSFRKVVVDVLGNITACND

SEQ ID NO: 16478 - protein, 1021 aa, unidentified
  REGION 1..1021: note = Cas Enzyme sequence
MEKWEEIMEKIPNYTLGIDMGTNSIGWAVVGHDDNLKPTGLIACGTRIFQEAVDPKSRIPKNQARRAARAARRLVVRRKMRLSSVLNILLKTGLLPNNVDEREKLFADNKSFDPYQLRKKALYNKLTPYEFGRVLYHLAHRRGFQSNRKVSSKDDGEVKISINSLHQEIKNADCRSLGEYLASQPTKRNRYTDRSMYQEEFELVWQEQQKHYPDLLNQTLKVSIHKAIFFQRPLKVQKYLVGKCTLEPLKKRASRALLEVQRFRILQDLNNLTIKNPVTREYRIPTNNERGKLLELLERQKTLSWNKARTALRLHKGEIFNLEEGKKKELIGSRTAFALRSILKKHWDEMKLAKQNDLITDMLTIDNERGFLNRMKSEWGFDSETAEELAKTELEPGYARLSLKAIRKIIPHLEQGMPYDKACNAAGYNHSMLNKQAAGEKLGAPPYLRNPVVQKALYETRKVVNAIIHRYGKPTVIRIEMARDMKLTRRQKEEWQKKQKENEKINDKARDILQNEFEIQNPTRADIQKYNMWIECSMTCPYTGAIINREKLFSPEVDVEHILPYSRSLDDSYMNKTLCMAYENRATKHNRTPYEAYHTDAQKYPAILQRIKTLPWPKRRRFEQKEIDTDKFVERQLNDTRYICVEVKKYLQQIGVRIEISKGEATAALRHRWNLSRILSEDGSLEKNRADHRHHAIDAIIIALTSTSLFQKLSSLSAQSGVALSESGFHLEKPWSSFYEDVDKKVRHIIVSHAPSHKISGALHEGTAYGFSEHEECFVYRKPLGVDITLAQILKIRDKYVKELVIARLEKFEPEIRKAIDEAIPKKSRYKITDKQAKDLIKKAFGNSEYPLLHKNGKTPIKSVRIVDNTLKSNMLAVKNESGQAYKYYPFGNNHHIEIIKHTKTGKRDGIVVTTAEAARRARNNKIPIVQKLPPWEKEGTIFDECWEFVMSLAINDMLMLDKDNIRQYFRVQKISSNTQIFYLSHAAATLDESTSKMPNAFEYRKVIVDVLGNIIACKND

SEQ ID NO: 16479 - protein, 1065 aa, unidentified
  REGION 1..1065: note = Cas Enzyme sequence
VGSNSPVRFVLGLDVGANSVGWAIVRLDDQDQPCGVMKAGARVFEAGLADLEIDAKGKPRNAERRAARMRRRMLERRGRRLSHLFRALQNADLMPQKPAASVAGDSAAARRECARAEAQARHEILTSLDETIASRHMGGEGGNWVGHQVLPYWLRARALDHRLNPDELGRALYHLAQRRGFLSNRKTAGRDKEEGKVKSGISELARRITDSGARTLGEFMSGLDPHQERIRKRWTARQMYLDEFDRIWEAQRAYHSSLLTDEARAKIHHLIFFQRRLKPQSGLVGACSLEPGRKRAPWGLLDAQRFRLLQRVNDLTILHGTDKPRSLSGEERAKLIERLETSGDITFAKLRTLLGVGKSRFNLEEGGEKRLVGNRTSARLRDVFGDHWTDKSREEQAAVVEDLLSVEKEPTLERRAQRVYGLDPVAARAIGEMELEPGYCAYSRAALRRLLPRLESGLPLQSVIMEEYGAVRKPEPVHELLPPVRSALRELRNPVVARCLTEVRKVVNAVVRTYGRPERIRLELARQVKQSAAQRERTWQKNRDNQKERDAAATQVVKEIGIQNPKRSDLERVLLAQECNWICPYTGRSFSMAQLFGGVIDVEHIIPYQRCLDSSFLNKTLCFAEENRAIKRNHTPYEAYSSNLEKWSGILARVHEFRGTGRDAKLRRFTLDAGEVEELLGQFTARQLVDTAYASRSGAKYLGLLYGGEVDEAGIRRVQTAAGGLIADLRGGWGLNAILGDGSRKSRADHRHHAIDAVTVAVTTPALVKAVADAASRATPGRSWLLADLVLPWPTFMDEVREQVGSAVAAHRPSRRIRGCLHEATLYSGPRNEHGRAVEGGKFIHLRRPLDELSKSMISDIVDPVVRQAVADQLVALGGDPKRVFKDAAHHPLYPRPDKEVRIHKVRVKQKERPLKVAEGMRARHVLTGSNHHVEIVADDSRKGRWEGHVVSLLEAHRRIMSGEPVVKRDHEPGKHFLFALSGGDTVELTSADDTRALHVLRGISRLNQGGREYCQLAFVGVNDARLRAEICQGGAMIRKLAGQLQGLNCRKVEVDPLGRTRASK

SEQ ID NO: 16480 - protein, 1105 aa, unidentified
  REGION 1..1105: note = Cas Enzyme sequence
LLKLAGTIVALVQLSKRCIPYRLTPVKGGFHEITAPRSARRHLILGLDIGAASIGWALVERTDGKPDKLRTLGVRAFSPGVSEDITAIRAGRDSSPAVPRREARLRRRQLARRRHRLTKLTHILQEAGLLPPGQIESGDDLMAYFIELDRELFSQDARRAEPHLLPYALRARALDERLTPHEFGRALYHLAQRRGFLSNRKVKPKPAGAPQTDEEKEEGKVKTAIGELAQKMQESGARSLGEYLSKLDPEDKRVRNRYLGRQMLIDEFEKIWTAQVAHHPDILTDSLRDAAREAIFFQRPLKSQRHLIGACDHEKRARRAPLASLVAQRFRLLQKVNDLKISLPDGRVRKLTPEERAKLIDALERQGDLKFSKIRSLLQLPKKNCHFNFETEGEKGLIGNRTASKLAAVFGDQRWTEFPEKERSRVVDEMRSIHNRDALKRRAAMLWNLDDEAAQKLSEVPLEEGYSNLSRKALAKLLPLMEESMPYASARKEIYGDEPGPQIRPDLPRLDTVLDVRNPTVQRALTELRKVVNAILRQHGRPDEVRIELAREMKKNRKDRKRIHANNTANREARESAAQEIQREIGIANPTRNDELKLLLAEECGWACPYTGKTISWDALFGDHPQFDIEHIIPFSRSLDNSFMNKTLCDAEENRSHKHNNTPREAYGNRPERWQEILDRVKKFPGHSGRVKLQKFQMEDLAALDDFTTQQLNDTRYASRLAIEYIGLLYGAGASGVDAEGRRRVHAGRGALTSFLRGRWGLNSILGAGQKTRDDHRQHAIDAVITALTDPATIKRLSDAAQKAPLEKNALFAEMPPPWEGFLDDVRAAIHDTTVSHRVSRKVAAALHEQTIYSKRHPDENGKECVHIRKPLQDLSPKDIDAIVDPAVRECVRDKLAELGHTAPKKAFTDRGNHPTLRAKDGREIPIHKVRIRKSETTKRIGGDGARARNVKLGSNHHVEIIETTDKKGRKRWRGEVVSTLEAARRLRARQAIVERDHGPDEEFKFSLAGGEIIELNSTETKEETKKEKPGTSKDRGRALYVIRTISITNSGRVTVDFAHINDARKKDDIRKAGDWGRSDIDPLRRRGCRKMLVTPSGEIRRAND

SEQ ID NO: 16481 - protein, 1062 aa, unidentified
  REGION 1..1062: note = Cas Enzyme sequence
KPDNLIRCGSRVFDAGIDEGDFSAGKENSRNATRRQARAARRLISRRMRRQRKLFNLLVKAGLLPSGDPAKVLPELDASLRKKFLSDLKKHSPERRQAEHVLPYRLRALALTQKLEPFELGRALYHLAQRRGYKSNRKERAILEEPETEQTEEKRKKKEADSGKDARKKELNKVEGGITELEQKMQAGGAETLGQYLADLDPEQERIRRRWTSRAMYENEFDKIWTAQTVHHPKTLTDDLRKRVRKAIFHQRPLKNQSNLIGPCEFENGVNRDPNTGRILPRRKRAPKALLIAQRFRMLQQINDVRIVTSRNPKDEYLTADQRDVLIERLDRQGTLKFSEAKKILSIPKNARFNWESGGESEFLGNSTNAKLSRIFGDRWWKFTDAERDSIVEDYLSIHEDKALAKRGKNHWGLDDAAAEKFGRLALEDGYCALSRQALAKITPMLQDGVPYATAVKELYGDQNLEPVDSLPPPAAQYPHIRNPMVLRVLAELRKVVNSIIRKHGKPAAIRVELARDMRRSKKQRIESWKQMRRNETDRKKAAAKIAAEAGIQTPSRADIEKVLLFQECGEHCPYTGKSISMKALFGEHPQFDVEHIIPFSRCLDDSFMNKTLCDIAENRDHKRNRSPFEAYAGDPEKWDAILARVKKFKSNARDDKLRRFTLATTENLKDFTTRQLNDTRYATRQATDYLALLYGGLYEVGGKRHIQASKGGTTAYLRNEWQLNSILGDGGTKSRDDHRHHAVDAVVTALTDASAVQMLSDAAARATREGRRRFGRIKDPWPGFLDDVRHAIENLSVSHRISRKINGPLHEETNYGPSKDRDAAGRPQSFAVRKRLDSLSTSDVERIADATVSRLVMEKLKEIGGEPKKVFASADNHPCFRLKDGRCIPIHAVRVRRAETAMPVGQGPRERWVQSGSNHHMEIFEVKDAKCRTKWTGRVVSRYDAMRRLATRKPVVDKMPPDTGQFLFSLASGDLIELEQEPGRRGIYVVRTVTQNKKGYVTVEYVRITDSRMKGDIKKPARQRTEGELKGWFTAALNALAEKHCRKVIVTPLGEVRYAND

SEQ ID NO: 16482 - protein, 1057 aa, unidentified
  REGION 1..1057: note = Cas Enzyme sequence
MEMAGSGHGQGEFVLGLDIGAASIGWALVAMREGKPRELTAAGVRVFTAGVEGDISSGRDESRAAKRREARLRRRMLARRRHRLTKLAHVLQDGCLLPAGALDTPEAVDGFLTALDRELFPQEIRARDPHLMHYRLRARALDEKLSAHEIGRAIYHLAQRRGFLSNRKETARPRRDDDEGVVKKDIGELEQEMLASGARTLGEHLSRLDPEQERVRGRYISRGMIENEFNAIWQAQAEHFPDIMTADLRRQVHYAIFHQRPLKSPKRFIGFCDLERDRRCAPMALLGAQRHRLLQKVNDLRFISNDGQICDLTPEQRTVLAQALESSEKMEFPAIRRLLSLKGGRFNFETEGEKGLIGNKTAARVRSVFGEERWEALSGRQRDQVVDDLRTIHNPDARKCRAMKAWGLDEEGADRFAEIVLEDGHHSLSRQALARVLPLMEEGQPYATARKACYPDRAEGNPRDLLPPLDGVLEVRNPTVQRALTEVRKVVNAIVRKYGKPAAIRIELARDLKRNRRQRQDIHARSAANRRDREAAASALLKERGIASPRRSDMEKWLLAEECCWTCPYTGRQISVDALFGDAPQFQVEHIIPFRRCLDDSFLNKTLCHVDENRRKGNRTPWEAYHSSEEWDAIIGRVKAFRGGGRGRAARNPKLQRFQLEKVGSLDEFISQQLNDTRYASRLAVRFVGQLYGAGADGVDPHGRRCVQASRGQVTSHLRDQWLLNSILGGGEKTREDHRHHAIDAVVVALTDPGAIKRLSDAAARAESAHRRRFAPLSPPWPALLDDVRSAVDAMLVSHRVSRKVAGPIHEETIYGRPRPDDNGRPQVHIRKPIEALSAKDVSTIVDPVVRRCVEEKLAALGESDAAKAFKTADTHPTLRTRDGRDVPIHKVRIRRSDATQQIGLDAHPRQVKFGNNHHVEIIETTDARGRVKWEGVVVSTYEAMQRLRNGTPFIQRDHGPGKRFLFSLAPGEVVELDDGTEGDRRFYVVRKVTRRGERSRQRVTVGIVGVNDARMSTARGEQEARELKEPSAEVLHTLHCRKVLVTPLGEVRDARD

SEQ ID NO: 16483 - protein, 1079 aa, unidentified
  REGION 1..1079: note = Cas Enzyme sequence
IAALVQCAPRVAGTEALVKGDLMEMAGSGHGQGEFVLGLDIGAASIGWALVAMREGKPRELTAAGVRVFTAGVEGDISSGRDESRAAKRREARLRRRMLARRRHRLTKLAHVLQDGCLLPAGALDTPEAVDGFLTALDRELFPQEIRARDPHLMHYRLRARALDEKLSAHEIGRAIYHLAQRRGFLSNRKETARPRRDDDEGVVKKDIGELEQEMLASGARTLGEHLSRLDPEQERVRGRYISRGMIENEFNAIWQAQAEHFPDIMTADLRRQVHYAIFHQRPLKSPKRFIGFCDLERDRRCAPMALLGAQRHRLLQKVNDLRFISNDGQICDLTPEQRTVLAQALESSEKMEFPAIRRLLSLKGGRFNFETEGEKGLIGNKTAARVRSVFGEERWEALSGRQRDQVVDDLRTIHNPDARKCRAMKAWGLDEEGADRFAEIVLEDGHHSLSRQALARVLPLMEEGQPYATARKACYPDRAEGNPRDLLPPLDGVLEVRNPTVQRALTEVRKVVNAIVRKYGKPAAIRIELARDLKRNRRQRQDIHARSAANRRDREAAASALLKERGIASPRRSDMEKWLLAEECCWTCPYTGRQISVDALFGDAPQFQVEHIIPFRRCLDDSFLNKTLCHVDENRRKGNRTPWEAYHSSEEWDAIIGRVKAFRGGGRGRAARNPKLQRFQLEKVGSLDEFISQQLNDTRYASRLAVRFVGQLYGAGADGVDPHGRRCVQASRGQVTSHLRDQWLLNSILGGGEKTREDHRHHAIDAVVVALTDPGAIKRLSDAAARAESAHRRRFAPLSPPWPALLDDVRSAVDAMLVSHRVSRKVAGPIHEETIYGRPRPDDNGRPQVHIRKPIEALSAKDVSTIVDPVVRRCVEEKLAALGESDAAKAFKTADTHPTLRTRDGRDVPIHKVRIRRSDATQQIGLDAHPRQVKFGNNHHVEIIETTDARGRVKWEGVVVSTYEAMQRLRNGTPFIQRDHGPGKRFLFSLAPGEVVELDDGTEGDRRFYVVRKVTRRGERSRQRVTVGIVGVNDARMSTARGEQEARELKEPSAEVLHTLHCRKVLVTPLGEVRDARD

SEQ ID NO: 16484 - protein, 1048 aa, unidentified
  REGION 1..1048: note = Cas Enzyme sequence
MLTPALQQRINDFLPKVRVGIDFGEHAGGIAVVQGNKVLHAETYVDFHATTLELRRQLRRGRRTRHAKKMRLARLRSWVLRQRLPDGSRLPDPYQVMHHARFQVQPGIFQTPGTNPAAAPSWVDLAKQGKVDAAGFVRALTLIFQKRGFKWDAIALEEMTDSRLKDFLETARIPSDELYADIRRQIDRRLQDPQDPIRGKTRTPPDELLKLLDAARVRSPQPRIAEHRSVKEADLREVIQGFGGAAKLPTETVLRWRRELCGGTTDPGRVKPGLLNRVLRPARFENRLRSGCAWCGKPTPRKSKVRHVAYAAAVCNLRVREGRRVRPLAPSELEVFWRWWDLRPAAPGGDSPEPSPARGGSLTGPRKATPKLEGIKAHLRRLGAQEKMARQIFDLLWNDQPEGRASLCNHHLEMAAKGATMKDAGVDWQTISVRKAPNPSREQHDARVLRRLEQILFKPGATGQQAWRHGPVQFITLEAPVPETERARKGEQKPRKLETFMERLAKETGGLCIYCDRARPRPVENKDHVYPQSRGGPDVWDNLVPACKACNDEKGDRTPFEWLGGPSSPRWAAFALRVEDLAVKGVPVPPEDGGEKRKDAAAKLIRISDRKRALLLSPEPDYPENPTPLAHVGARPRQFVVALRALFKKYGVEPPRADYQLGEPFVQRAEGRLTSQLRKSWLLKADGKTANFPVKDPWDLLNHAQDAALIAACPPHTWRDTIFCYRAVRPKYAGEGRFVWAEQDGLALPGLAPDWAEYIDRRTWPLVRVLGRYPVGWKHTFADQNFYQDPDKLDDKRLRQHVPLAAFQFSGRGPDQARHPGESRMASEALDKQFRAVAQSMGLKKRQTLPAGKLNEDFPGVRHVIVEKQPGGKLARVHPEDGPPRKVQLKKASEAVVFWVPKGKPLPQLAFSVRWPRPFQKFGVPRHDPALPVGAEIIDVWKRYKAIWLDQTTGQEPGFYRVKEFTASAVTVLPENAVTDELARRLMLKRPKAAAGHSQGKNAKDQGAVEPRAPSADQQLAEAGAELREIDLHRKDIVAYFEGLRSRA

SEQ ID NO: 16485 - protein, 1026 aa, unidentified
  REGION 1..1026: note = Cas Enzyme sequence
MGKTILGLDLGSNSLGWALLSAGPEGQPSGIIDTGVRIFPKAVEDKTPTPKNQKRRASRLARRTIQRRSRRKSRLLNYLIKLNLLPTELHGNLQPEGILNGLGDPYELRAKALDHDLNPHELGRVLLHFAQRRGFLSNKKTLLGRDMLDDPDVLSVLADDDQDDTDGSEETAFKKDISLLRAEITSGGFRTLGEYLASKPVHECKRNRHDEHIRTDRRMYMDEIALIYERQSKCTPVLSEEVQSNIEDIIFFQRPLKLKKDRVGRCSLEPSKKRAAIARLEFQRFRYLQDINNLQYFCQNTDQWVKLNEADKEKLGALFEASGKLTFAKIGKELGLQRGTSFNLDSGVKNLKGNTTSAAIRSALPDWDALSSADQFSLVEDLISIKKKSALKRRLMSHWGFTGEVALGLCLAELEPEYGQVSLKAIGKLMPHLAAGMIFSDARKAAGYGYEIAEVVAQDRLGRPPELPNPIVSKGLHELRRVVNALIAEHGKPDIIRIEMARDLEMNTKKYKNFIAQQAKNTKANDRAVEAFGEAQTNPTGSRYPNRDEKIKYRLWLDQGHCCAYSGKTINLATLFTAEVETDHIVPYSRSLNDSYMNKVVCFARENQAKGQRTPKDAFGADEDKWNQITQALKKLPRELSSKKDAFYKTDSDLLEHDFIGSQLTDTRYMSKVAGDYLKSLGSEVTFTRGIMTSWLRRQWQLNDLIGATSEKERTDHRHHAIDAVVTACIDRNIYKSLVDISRDLERSGSSLTMGDVYIDPPVPSIRDELDTHLTDMIVSHVPQRKITGALHEETGVGFVNDVGTVYRKRLDQNFDTKNALKIVDPIVRKLVQDHLAEHNSNAKEAFVPGFKLTHMDACTLIKRVRVVQAKTTRDELEKDKFGIKDRSGKVFKWHAYGNLHHVEVLRSRSTGKHKSVFVTAGEAAARARGIGRPREPIIFAEHGDDWELLYALHINELVEVSLNSERKIYRVQKLEQSNSALSLRCHTAANIKDTEQLIRKSINTLIQVYRLKPVNLNVLGKLLND

SEQ ID NO: 16486 - protein, 1029 aa, unidentified
  REGION 1..1029: note = Cas Enzyme sequence
MSKIFALDNGSNSIGWAVISADDKFQPIDIIDLGVRIFQKGVEDPRPTPKNQKRRAARLARRTIQRRARRKQKLLNFLMKNNLLPRELDGHLQPEGILNGLGDPYKLRAKALDHDLLPHELGRVLLHFVQRRGFLSNKKTLLGRDMLDDPDVLSVLDDDSDGGAGTSEETAFMADISLLRAEIAEGGFRTLGEYLSSKPSHECKRNRHEEHIRTDRRMYMDELALIFDRQSQCHQVLTAKIQSEIAHIIFHQRPIKLRKDRVGKCSLETNKKRVAIARLEYQRFRYLQDINNLAYFDHQTDKWVKINSADKDKLKVLFENSEKVTFPALKKVLGLQRSAEINLDSGVKHLKGNTTASSIRKVYPQWDDLCIEDQMLLVEDLISIKKKSALKQRLKSHWNLAGEEAVMLCLLELEPEYGNVSLKAIHKLLPHLNGGLIYSDARVAAGYGYEVKEIVVQDKLGLPPEIPNPIVQKGLHELRRVVNALIAEHGKPDVIRIEMARDLEMNTKKYKNFIAQQRKNTDLNDKAAKAFRGENTAITASKYPSRDQKIKYRLWADQNQLCAYSGKTINLATLFSAEIEIDHILPYSLTLDDSYINKVVCFAKENQNKGQRTPKDAFGANEEKWNQITQALNRIPRELSKKRDAFYKTESDLLETDFTGSQLTDTRYMSKVAGDYLKTLGCDITFTRGIMTSWLRKQWGFNDLLGDSKEKERSDHRHHAIDAVVTACIDRPLYNALAKTAKELERTYSHLSMNDVYVEPTIANFKSKLSDKLDSMIVSFVPSKKITGALHEDTGVGFIDGIGTVFRARLDEKFDLKKAEKIIDPVVKGLVIRHLEKHNGNAKLAFATGFRLCHTDNKTLIKRVRVIQSKTTREELDQNKFSVIDRAGESFKWHAYGNIHHVAIFQHKTNNKYKSEFVTAADAARRARGIGGAKQPIIQKNGDNDWDFRFALHKNELVTVEYGGEERIFRVEGLERDVSVLSLRCQMAATKKDDSQKIRKSISTLMTGYKMQPIYVNAIGNRVNDKAHH

SEQ ID NO: 16487 - protein, 1070 aa, unidentified
  REGION 1..1070: note = Cas Enzyme sequence
MHAPVSPSFPILGLDIGPNSIGWALLSAAPDEEGRLVPQGILGLGVRIFEAGTEGDIEKGRDVSRAQARREARLQRRQAWRRARRLHSVFTLLQRADLLPQPAALNPDEPQARHQILAALDRELLARWGARTATLGNVGPVPHLVPYLLRARALDEPLEPYELGRALYHLAQRRGFQSNRKAARNDKEEGKVLQGIGDLEKAIQAAGSRTLGEYFATLDPREQRIRGRWTSRRMYEEEFEQIWAAQRPYYPDLLTDDLKRKLRRALFHQRPLKLQSHRIGGCELEPRRRRAPWALLGAQRLRLLQRVNDLRLKLRDGTERALTPQERDDLIAALETHNELTFAAIRKRLHLDEGVAFNLERGGETKLPGNRTNAALAKIFGKRWLQLTDGERNQVVEDVLTIQKDEILKRRAVREWGLSEEAASQLAELKLEPGYCRFSRKALARLLPHLEQGLPLQTAIQREYRVGRQISAAVASLPPVRKIIPQLNNPAVMRSLTELRRVVNALLRVYGKPAEIRIELARDLKHPRHERVRIWKHNRTLQRTREQARSRILGEELGISEPNRRDIEKLLLWEECGGICPYTGRAISLAALLGPEAQFDVEHIIPRHRSLDDSFLNKTLCEIRENREYKRDRTPFEAYGNTGVKWEQILQRVASFRGDARTEKLRRFQLAGEELEKWLSDFTSRQLNYTRYATRLAIRYLACLYGGTDDGVDPNGKRRVVASRGQITAYLRDALGLNQILGGGATKPREDHRHHAIDALAIALTDARTIKALQDAAAGSPYRHRSVFPKLEPPWQAFLTDATQAVASIVVSHRVDRKIRGRLHEETIYSPPRDEKTGHRSSNGTVVHVRKPLRDLSKDDGERIVDPVVRRLVKEKLNGGEPKEVFQDEANLPHLVARDGRRIPIRKARIRRSASVVALGTGARERHVLPGANHHLEIFEVCDRAGRPRWKGKVVSRLEAYQRARTGQPIVQRDHGPGTRFLFSLVSNPGGDTIELDEPDGSRRLYLVESISRTADGAIQIEFVPLNDARRAAERRELKERHRASLERLRKRNCRKVVVDPIGRVFPAHD

SEQ ID NO: 16488 - protein, 977 aa, unidentified
  REGION 1..977: note = Cas Enzyme sequence
MLDRRARRLGKLARLLQSAGLLPEGDLSTSESRHAFFQKLDAAIFPENARRETPHTLLYGLRARALDEAITCHELGRAIYHLAQRRGFLSNRVTKEVEEETGENEGKVKEGIAKLSAEMQATGARTLGEYFARLDPEKERIRKRWTSRQMHLDEFEAIWQAQREHHGDLLADSLKKTIHRAIFFQRPLKWDRSTIGTCELELGKKRAPWALLDAQRYRFLQKVNDLRLLGADPKTGEMWPSEKLDEDRRAKLVNALESEGDLTFAAIKKLLALPKWITFNQEGGESKLIGNRTASKLRAVFGPRWSEMSSEEKDRAVEDLRSIRSEKALRGRAERFWHLDAEAALAFSRIVLESDYCSLSRQALKKLLPLMEKGVPYATARKELYGDRPAPEPFTFLPSLDKAPLSPIRNPAVLRALSETRKVVNGIIRQYGKPAFIRVELARDLKRGRKERQVIWKENQANRKKREEAGRRLLEEHGIAHPSRQDIEKWLLADECGWRCPYTGLTISGDQLFGPTPQFDVEHIIPFSRLLDDSFLNKTLCQMDENRHVKQNRTPWEAYGHNPEKWDGILQRVKQFNGPAKTEKLRRFQLDSLDSLDDFTNNQLSDTRYASKLAIEYLALLYGTGAQGVDADHTRRVQVGRGGVTKYLRDEWGLNRILGDGSGKSRDDHRHHAVDAVCIALTDARAVQMLSKAASSALQEGRRRFGKTAPPWPGFYDQARGLIEKTVVSHRPARKVSGPLHEETFYSPPKENGRAQPAVHLRKPLNKLSKNEVAAIVDPKVREIVSAALNGGDPKKVFAEPSTHPRMESGVPIHAVRIRKAERTEAIGSAGRQRHVMTGSNHHVEIFARMDRKGGIIWDGVVVTLFEAMRRIRAGEPVICRDHGPDCTFLFSLCQGDLIEIDGKNGRELLVVRIITTSNQKGRSYPSLSFAGHRDARLKKEIIENGAWLRSLLDPLRKLNCRKVSVTPLGEVRYAND

SEQ ID NO: 16489 - protein, 1038 aa, unidentified
  REGION 1..1038: note = Cas Enzyme sequence
MAREPYTLGLDLGSTSIGWVCLATDTGGQPQGIIDGGVRIFPKAVEDQTPTPKNVQRRLKRLGRRLIQRRARRKRKLENLLVRKGLLPPDILSGDGRETRLNALGDPYVLRRKALDEALAPYELGRCLLHLAQRRGFLSNRKTLLGELVDDPDAADLIEELDGDAGADLDREESKFKQDIQAVDAQIRNSGARTLGEYLAGFERDRCKRNRKHAGGFLRTSRQMYRDELAMIRKVQEPHHADRLSGADWDLVELIIFRQRPIKLRSDRVGMCELEPRRPRARVARLEYQRFRYLQDVNNLAYFEGDHGGYVPLTEYQRKALLEALETRPELSWAQVRKVAGLARSQRFNLELSEVKILKGNRTACAIRNVVGDAWDSLPTTRQLALVEDLLTIQNRQALKKRLVSHWGFAPADAVRLAITNFEVGHGSLSVKAISRLLPALEAGAKYSDAVTIAGYKAPLQQPSVRLDILPRPPETRNPAVNKALNELRKLVNAVIRSHGKPAAIRVEMARDLKMGKKRLAAFNRQQAANNKANREAEEAFGELFPSARPSRNDLLKYRLWRDQNSQCAYSASNVTISLAELFSDAVEVDHIYPFRRSLDDSYLNKVVCRVEENRAKGKRSPWEAFGSDTARWEQIVQRCRSWAKTNRAMRPKIVRILDRRDYDEIESSITTQLVDTRYISRIALQYLMTLGTDVTVVKGQITAWLRSRWELNHLLGPGPGKNRSDHRHHLIDALVVGLTDRRLYRRIAKLAQRRDVDGLRHIRLDQPWKTFARDARRLVERVIVSHVPRWRIEGALHEDTASGLRIQEDGTVRTVYRKLLNAQFTPKDAANIVDDTVRNVVVSYLDHCGRDPKRAFSEGFSLLHPNGTRIRRVRIYRARYKNLSELEQAAYPVLGRDGRPFRYMTFGNTHHVEIFRHRTKQDKYAARFVTMMEATWRARGVRGPKRPILNTFLDESHEFVEAFASGDMVRLNDGRLWRVQKLEKNNNRLVLRLHTDATTERNDSCLEKAVSTLFKQYNMKKVHVNRLGRVFDDQADR

SEQ ID NO: 16490 - protein, 1041 aa, unidentified
  REGION 1..1041: note = Cas Enzyme sequence
MSRKKRGKGGYMEKETILGIDLGSNSIGWALFNLEGKKPSSFVKTGIRIFEAGLEGLDLDGKGKSRNINRREARLRRRQYERRSRRLENLARLLQRFGLLPDGNLNAPQERHDFFTRLDKTHPSRPSPYQLRADALMRKLDTQELGRSLYHIGQRRGFLSNRKAPLKKDEERGKVKTGIAGLRKEIEEAGAQTLGEHFSKLDKDGARIRGRYTARKMYEDEFNRIWEAQRQYHPAILTDELKKRVHRAIFYQRPLKSQKELIGECSIEKGCKRAPWALLSTQRFRYLQRVNDLRILDKKTFNERPLSVEEKSVLIDTFETEGDLTFAEMRRRLKLPKGTAFNLETGGEKKLPGNRTSKTLSDVFKERWKKFTEDDKNAVVEEVRSVVKDETLKKRGMKVWYLDEKTAEEFGGIELEEGYCNFSKKAIEKLLPLLMKGKSLATAINEAYPGRRIEDMKSLDYLPAVRSEVFGDIRNPIVERALTELRKVLNAIIKEYGKPGIFRIELARDLRRSSKQRESAWKNMRENEGKRKEAAKKIIEETGITKPKPSDILKVLLAEECDWKCPYTGRPIGMKSLIGEHPQFDVEHIIPFDRSLDNSFFNKTLCWAEENRNRKHNKTPYEAYSGTERWEEILERVKNFKGEAAREKFKRFKYTEKDLEEIIDSFSSRQLNDTRYASRLAKRYIGLLYGGLGDDGIDIEGKRRVQATTGQITAHLRNSLGLNAILGDGPDKSRDDHRHHAVDAAAIALTGPDMVKMLSDAAKNSKGRRLFGAVVPPWRGFFEDMRREIQGIIVSRRVSKRVRGALHEETFYSEPKKDKKGKSYVHIRKPISDLSKSDLEDIVDNRVKKCVLKRLDELGGEPKKAFKDPSNHPFIETKDGRKIPIHKVRIKRNLETFPVGKGRHVRYVQSDSNHHMEIVKTIDKNGKEKWEGYVVDMLEAYRRKTQKEPIIKKDHGEGKEILISLANGEIIELDTNDGKRELFVIRTVPKSKQIYFAPISDSRKLTDIGKKDLTSYPDGLRVRNCKKVVVTPLGEVRYAND

SEQ ID NO: 16491 - protein, 1063 aa, unidentified
  REGION 1..1063: note = Cas Enzyme sequence
LKTSANCNSLTYDEIILGLDLGTNSVGWALVGLNKFKPSCIVDMGSRIFESVVNKSDYEKGQGETKAAERRGKRMARRLTTRRRRRKIRVFRRLQENKLLPEGESTTVLQSLDQELRAKYFAGEKKIPALEHTLPYYLRALALDQQLPLHEIGRAIYHLAQRRGFKSNRKTAKSDKDDGTIKSSIAELRQKITDQGARTLGEFFSKMDPTIERIRQKYTHRDMYETEFDAIISSQKQYYPHIFNETFTKQIKGDIFFQRPLKSAKGSVAFCSLEPKSRRAPIASLEAQKFRILHMVNSTAIISPHSGQSISLKPEQRAVIIAELEKGSLTFANAKKLLGMPRTAKFNWETGGEKKFKGHTVNETMSSIFGDGWFHISKDKQNEAIADLLSYQDDQALFKRAKNYWKLNDESAGKMSVSVLEEGYSAHSRKALQKLLPLMEEGQDYSTARKTVYPESFIAGTGLDILPQARTILTSLRNPVVERTLNEVRKIVNGIIKKYGKPYAITIELSRDLKTNRKQKQESIKRMRELEKQRKAAEQIIKESGISKPSRNDIEKYLLAEECGWSCPYTGMPISMKTLLIEPSFDVEHIIPFSRCMDNSFNNKTLCHHHENRNIKKNKTPFEAYHGTQKWEDILQRIAKFKYRGRYNQKLDRFKMANIENLDDFCSRQLNDTRYSSKLACKYLSVLYGGKSDSEHTMRIFTGNGRITSFLRGIWNLNTVLQGNGEDKRNDHRHHAIDALATALLTPKTIKALSESAARTEGNPSVQWRRLFSAMEEPWSGFLDEARTKINVIITSHRANHKVNGPLHEETIYSRPIKSNTGPALITIRKELSALSKDDINRIIDLRTKEIVINKLAEMNEDNPGKAFKEVCNHPVFATTPQGKTIPIHKVRISVNKNPQQLSSGSKERYILTGSNHHMEVFAVMDSNKNILKWDARAVSMLEARRRLVNKESVVQRNHGPNTKFLFTLTNSDIIELDSENSAHGKEFYKIRGITERADGAKVFDFCRINDARLKKAMQESDTEIGAKGGNRSIQFATPHSLSKRHCRKVTITPLGEVRRSNE

SEQ ID NO: 16492 - protein, 1035 aa, unidentified
  REGION 1..1035: note = Cas Enzyme sequence
MRIFMTEKTADVKKNSFILGIDLGTNSLGWCLVAVERDPEGRWVPRRIERMGVRIFEAGMDNLEEGGRGESRALARRTARLARRRLERLKRRLRKVRNLLVRAGLLPADFPAGPLGAADPYKLRAKALDEPLEPYELGRVFYHLAQRRGFKSNRKADTTDKEAGTVDKNIGELESAIRQAGCRTLGEYLSKLDPHQQRLRGRYTSRAMYEDEFEKIVSAQAPHHPVLTDDFRRALRRAIFFQRPLKSARGLIGRCALEPRCRRAAVAGLLFQRYRILQQVNDTQITLPCGTRRPLTPDERFKLIKALEDSKKLSFAKAKKIMGLPAGTTLNYEAGGREEYPGDETSYELRKIFGARWDAMPPSERDEVVHDLLSIDFKKALERRGRDRWGLGAEEAQKFANISLTPGYSSLSSKAMRKLLPLMEQGMPAGRAREQLYPRSVVKPVDALPPVEDPRNPVVRRALTELRKVVNAVVRNYGLPEQIRVELARDVKKNSKQREKIAKADRAREKVRREAAEKIISETTIRQPRPADKDKVLLADECGWQCPYTGKGFGWEHLFGPHPQVDIEHIIPFDRSLDDSLANKTLCFAEENRNVKRGRTPAEAYAADPERWKAILDRVRAFKSRDRNEKLFRFQLQGAELDEWLHSFRERQLNDTAYAAKLAASYLGRLYGGEVDAQGVRRVRVSSGRLTGWLRNEWGLNAVLGDGPEKSRDDHRHHAVDALAIALTDERMVRALAEAASRASGEGRRRFGRVPEPWPDFLKEVRARVAEIIVSPRVDRRVNGALHEESLYSPRIRHADGREYVHIRKRLDTLTKQEVEAIVDPAVREAVERRLREVGETEPRKAFSRPENLPVLRARDGRQTIIRKARIRKPEVPIVIGQGSTRRYVLSEHNHHVEIFEEKTRSGRIQWKGRVVSLLEARRRLLSGGPVVDQVWEGRRFVFSLAPGEVVALSADGGERRLYRCRSVSISATGRIELAFSLLHDARLKKEIVRAGALERMSPEGLRKRAVMDPETGRGPKYVVTPLGELRSAND

SEQ ID NO: 16493 - protein, 1073 aa, unidentified
  REGION 1..1073: note = Cas Enzyme sequence
MDNNSEFHFILGLDIGATSVGWSVTRLDTSGNPEKLTEIGVRVFEAGVEGDLGAIETGRDVSKAVDRRNFRSIRRNTDRTARRLSNLYSILQDSGLLPPEITKTDIEETGEFTKSGKRRNKRLLRSDMRDKAISDLDKKILNKWVGKLKENGASRTELDQLPLKLPYIIRARALDEKLDNYEIGRALYSLAQRRGFLSNRKKQPGKDEEKEEGKVKEGISELEKKIQESNSRTLGEYFSKLNPEVEKIRRIWTSRKMYEDEFEKIWSSQSRYYPDILNEDLRKKVHKAIFYQRPLKSQKGKVGWCEHEPHKRRCPIALLEAQRFRCVQMLNNARIWLPEGSFRELTPEEVKTILDELEYSDKVTFAQAGKILKLPKTLKFNYEEGEETRFIGNTTSAKLYKVFGERWKEFSESDKQKIVEDLQSIQKDETLINRGIKAWGLDNEQAVKFANISLEDGYSKLSRKAIKKLLPLMLKGMHYSEAVDEIYGFHAGTVAHDYLPPVLDAVPELTNPAVIRGMSELRKVVNALIKKYGKPSIVKIEMARELKKSRDARKEITKKNRTNKGLRYEAAEKICKETGIIADKDPDKVSSTDRLKVLLADECNWECPYTGKTISMGNLFDSSQFDIEHIIPFSRCFDNSYMNKTLCYHEENRDRKKNRTPYEAYYNSPQWDDIIDRVKRFKGDAKMAKLARFTMTHVEDLDGFTNRQLTDTQYASKLAAKYLGALYGPEFRKHVQTLTGQITAHVRDELGLNAILGDGGEKTRDDHRHHAVDAVAISLVDRSLVKRMADASKRAESVKRKLFAPIEAPWEGFYDDVKRAVNSIVVSHKVSNQVNSALHEESLYSVHEKGTSIRKRIDLLKEGDVQNIIDPAIRLIVESKLAELGGWAPNIFAEPGNVPGVVDRHGVFRRLRSVAVAVKSSPFPVGNDVTRRNVLTKSNHHVEIFEYKDKKGNLKWDGVMVSQYDAAERKRRKEPIIQRDHGLDKKFLFSLSSGSIIETDDENGGRGVYRVRTVSANSQGYMRLEFVKNSDSRLKKKIMESKGWIIKPLESLRKINCRKVVVTPIGEVRYAND

SEQ ID NO: 16494 - protein, 1109 aa, unidentified
  REGION 1..1109: note = Cas Enzyme sequence
MSRSLTFSFDIGYASIGWAVIASASHDDADPSVCGCGTVLFPKDDCQAFKRREYRRLRRNIRSRRVRIDRIGRLLVQAQIITPEMKETSGHPAPFYLASEALKGHRTLAPIELWHVLRWYAHNRGYDNNASWSNSLSEDGGNGEDTERVKHAQDLMDKHGTATMAETICRELKLEEGKADAPMNVSTPAYKNLNTAFPRLIVEKEVRRILELSAPLIPGLTSEIMELIAQHHPLTTKQRGVLIHYGIKLARCYRGSLLFGQLIPRFDNRIISRCPVSWAQVYEAELKKGNSEQNARERAEKLSKVPTANCPEFYEYRMARILCNIRADGEPLSAEIRRELMNQARQEGKLTKASLEKAISSRLGETETNVANYFTLHPDSEEALYLDPAVEVLKRSGIGETLSPSVYRLAANRLRRGKSVTPNYLLNLLKSRGESVEALEKKIEKERHQQANRKKAKKTDPDYAATPLKPRYATGRAPYARPVLKKVVEETLDGEDPTRPARGEAHPDGELKAHDGCLYCLLDADSSVNQYQKERRLDTMTNNHLVRHRMLILDRLLKDLIQDFADGQKDRISRICVEVGKELTTFSGMGSKKIQTELNLRQKSHTEAVNKLKRDLPGKALSANLIRKCRIAMDMNWTCPFTGERYGTHELENMEMEHIVPYSFRQSNALSSLVLTRKEVNKMKGQRTGYDFVEQEQGKPVTGRTNLHICSFNNYREFVEKLDDKKWHEDDRKRKKKRKALLMVRGLSHRHQLQNHDAMKEIGMTEGMMTQSSHLMKLACKSIKTSLPDAHIDMIPGAVTAEVRKAWDVFGVFKELCPEAADPDSGKILKENLRSLTHLHHALDACVLGLIPYIIPAHHNGLLRRVLAMRRIPEKLIPQVRPVANQRHYVLNDDGRMMLRDLSASLKENIREQLMEQRVIQHVPADMGGALLKETMQRVLSVDGSGEDAMVSLSKKKDGKKKKNQVKASKLVGVFPEGPSKLKALKAAIEIDGNYGVALDPKPVVIRHIKVFKRIMALKEQNGGKPVRILKKGMLIHLTSSKDPKHAGVWRIESIQDSKGGVKLDLQRAHCAVPKNKTHECNWREVDLISLLKKYQMKRYPTSYTGTPR

SEQ ID NO: 16495 - protein, 1025 aa, unidentified
  REGION 1..1025: note = Cas Enzyme sequence
MKETPGHPAPFYLASEALKGHRNLAPIELWHVLRWYAHNRGYDNNVSWSGGFSEDGGNKEDTERVQHAKDLMDKHGTATMAETICRELKLEEGKADAPMNVSTPAYKNLNTAFPRLTVEKEVRRILELSAPLIPGLTSEIMELIAQHHPLTTKQRGVLIHYGIKLARRYRGSLLFGQLIPRFDNRIISRCPVSWAQVYEAELKKGNSEQNARERAEKLSKVPTANCPEFYEYRMARILCNIRADGEPLSAEIRRELMNQARQEGKLTKASLEKAISSRLGETETNVANYFTLHPDSEEALYLDPAVEVLKRSGIGETLSPSVCRLAANRLRRGKSVTPNYLLNLLKSRGESVEALEKKIEKERHQQANRKKAKKTDPDYAATPLKPRYATGRAPYARPVLKKVVEETLDGEDPTRPARGEAHPDGELKAHDGCLYCLLDTDSSVNQHQKERRLDTMTNNHLVRHRMLILDRLLKDLIQDFAGGQKDRISRICVEVGKELTAFSGMDSKKIQTELNLRQKSHTEAVNRLKRDLPGKALSANLIRKCRIAMDMNWTCPFTGATYGTHELENLELEHIVPHSFRQSNALSSLVLTWPGVNRMKGQRTGYDFVEQEQENPVPDKPNLHICSLNNYRELVEKLDDKKGHEDDRRRKKKRKALLMVRGLSHKHQSQNHEAMKEIGMTEGMMTQSSHLMKLACKSIKTSLPDAHIDMIPGAVTAEVRKAWDVFGVFKELCPEAADPDSGKILKENLRSLTHLHHALDACVLGLIPDIIPAHHNGLLRRVLAMRRIPEKLIPQVRPVANQRHYVLNDDGRMMLRDLSASLKENIREQLMEQRVIQHVPADMGGALLKETMQRVLSVDGSGEDAMVSLSKKKDGKKEKNQVKASKLVGVFPEGPSKLKALKAAIEIDGNYGVALDPKPVVIRHIKVFKRIMALKEQNGGKPVRILKKGMLIHLTSSKDPKHAGVWRIESIQDSKGGVKLDLQRAHCAVPKNKTHECNWREVDLISLLKKYQMKRYPTSYTGTPR

SEQ ID NO: 16496 - protein, 1101 aa, unidentified
  REGION 1..1101: note = Cas Enzyme sequence
MSRSLTFSFDIGYASIGWAVIASASHDDADPSVCGCGTVLFPKDDCQVFKRREYRRLRRNIRSRRVRIDRIGRLLVQAQIITPEMKETSGHPAPFYLASEALKGHRTLAPIELWHVLRWYAHNRGYDNNASWSNSLSEDGGNGEDTERVKHAQDLMDKHGTATMAETICRELKLEEGKADAPMEVSTPAYKNLNTAFPRLIVEKEVRRILELSAPLIPGLTAEIIELIAQHHPLTTEQRGVLLQYGIKLARRYRGSLLFGQLIPRFDNRIISRCPVTWAQVYEAELKKGNSEQSARERAEKLSKVPTANCPEFYEYRMARILCNIRADGEPLSAEIRRELMNQARQEGKLTKASLEKAISSRLGKETETNVSNYFTLHPDSEEALYLNPAVEVLQRSGIGQILSPSVYRIAANRLRRGKSVTPNYLLNLLKSRGESGEALEKKMEKESKKKEADYADTPLKPKYATGRAPYARTVLKKVVEEILDGEDPTRPARGEAHPDGELKAHDGCLYCLLDTDSSVNQHQKERRLDTMTNNHLVRHRMLILDRLLKDLIQDFADGQKDRISRVCVEVGKELTTFSAMDSKKIQRELTLRQKSHTDAVNRLKRDLPGKALSANLIRKCRIAMDMNWACPFTGATYGTHELENLELEHIVPHSFRQSNALSSLVLTWPGVNRMKGQRTGYDFVEQEQENPVPDKPNLHICSLNNYRELVEKLDDKKGHEDDRRRKKKRKALLMVRGLSHKHQSQNHEAMKEIGMTEGMMTQSSHLMKLACKSIKTSLPDAHIDMIPGAVTAEVRKAWDVFGVFKELCPEAADPVSGKILKENLRSLTHLHHALDACVLGLIPDIIPAHHNGLLRRVLAMRRIPEKLIPQVRPVANQRHYVLNDDGRMMLRDLSASLKENIREQLMEQRVIQHVPADMGGALLKETMQRVLSVDGSGEDAMVSLSKKKDGKKEKNQVKASKLVGVFPEGPSKLKALKAAIEIDGNYGVALDPKPVVIRHIKVFKRIMALKEQNGGKPVRILKKGMLIHLTSSKDPKHAGVWRIESIQDSKGGVKLDLQRAHCAVPKNKTHECNWREVDLISLLKKYQMKRYPTSYTGTPR

SEQ ID NO: 16497 - protein, 1113 aa, unidentified
  REGION 1..1113: note = Cas Enzyme sequence
MSRSLTFSFDIGYASIGWAVIASASHDDADPSVCGCGTVLFPKDDCQAFKRREYRRLRRNIRSRRVRIDRIGRLLVQAQIITPEMKETSGHPAPFYLASEALKGHRTLAPIELWHVLRWYAHNRGYDNNASWSNSLSEDGGNGEDTERVKHAQDLMDKHGTATMAETICRELKLEEGKADAPMEVSTPAYKNLNTAFPRLIVEKEVRRILELSAPLIPGLTAEIIELIAQHHPLTTEQRGVLLQYGIKLARRYRGSLLFGQLIPRFDNRIISRCPVTWAQVYEAELKKGNSEQSARERAEKLSKVPTANCPEFYEYRMARILCNIRADGEPLSAEIRRELMNQARQEGKLTKASLEKAISSRLGKETETNVSNYFTLHPDSEEALYLNPAVEVLQRSGIGQILSPSVYRIAANRLRRGKSVTPNYLLNLLKSRGESGEALEKKIEKERHQQANRKKAKKTDLDYAATPLKPKYATGRAPYARTVLKKVVEEILDGEDPTRPARREAHPDGELKAHDGCLYCLLDTDSSVNQHQKERRLDTMTNNHLVRHRMLILDRLLKDLIQDFAGGQKDRISRVCVEVGKELTTFSAMDSKKIQRELTLRQKSHTDAVNRLKRELPGKALSANLIRKCRIAMDMNWTCPFTGATYGTHELENLELEHIVPHSFRQSNALSSLVLTWPGVNRMKGQRTGYDFVEQEQENPVPDKPNLHIRSLNKYRELVEKLDDKKGHEDDRRRKKKRKALLMVRGLSHKHQSQNHEAMKEIGMTEGMMTQSSHLMKLACKSIKTSLPDAHIDMIPGAVTAEVRKAWDVFGVFKELCPEAADPVNGRIIKEDLRSLTHLHHALDACVLGLISEIIPADRKNVLRRAIIKRRLDQKMKQDFLELRKKRYYKLREKDGQTGASLVDLPSGIKENIREKLMEQRVIQHVPADMGGALLKETIQRVLSVDGSGEDAMVSLSKKKDGKKEKNQVKASKLVGVFPEGPSKLKALKAAIEIDGNYGVALDPKPVVIRHIKVFKRIMALKEQNGGKPVRILKKGMLIHLTSSKDPKRTGVWRIASIKDNERGIAIDLQIPHSAVPGAKTHEFHWINVKLDTLLTKYRLEIYPTSYTGTPR

SEQ ID NO: 16498 - protein, 1035 aa, unidentified
  REGION 1..1035: note = Cas Enzyme sequence
MTERTNNLTLGLDLGSNSLGWALIENEDNGQKRIIDKGVRIFEAGLDNLEQDGRGESRNAARRDARSSRRRLERLSRRLVKLAGILQENGFLPEGNIGDPSKRNGLFTELDRKLDNPYKLRAKGLDNKLEPFEFGRAMYHICQRRGFLSNRKELPKKKEEEGKVKAEIGELQKKIDESGARTLGEYFSKVNPHEERIRTWYTSRRMYEDEFNRLWDSQKNYYLNILTDDLKKQAHHAIFFQRALKSQKNLVGKCEYERTQRRAAWAILDAQEFRYLQRINDLEIILNNERRLLSPDERVKLINELERNSSLKFSSTRKATLTIKKILELPKSASFNLEKGGEENLHGNKTATTLREIFKDRWDEFSRKDKDQIVEDILSIQNSDALARRGTKKWGLDEEAAKKFGNISLQSGYCSFSRKALLKILPKLREGFRLNEILREAYPDRWEMQSEPRDILPPVKNEDIPEIRNPIVERTLSELRKVVNAVIKKHGKPESIRIELARDLRQNAKQRERTFKSMRENEKQRKSAAEEILKECGLANPSRNDILKFILWKECSGHCPYTDNYIGPSDLFSSQPNFDIEHIIPFKRSLDDSFMNKTLSHVATNRNIKKDMTPYEAFSSRPEWDDIISRVKKFNNQEKLKRFKMTEKEVEEFLSDFSSRQLNDTRYATKRAKEYLGLLYGGLKEDAAQGTEKVQAVGGQITAYLRNVWGLNSILKDGPGKSRDDHRHHVVDAIVIALTEQRWVNELSNAAKNAPKAGKRRFAAVMPPWNGFWDDVKNSVSSVIPSHQITKKVKGALHAETFYGRPYKDGKGKQFTKTRVALEKLTPKNVENIVDKIVKQKVKDKLKELGKAPKEAFKNPDKNSNLPLIKTKTGKEIRIKKVRIEMPFETHLRVGEGYRERYVRSCPDSNHHMEIYKDLTTGRWDGEVVSLFKAHQRLRSKQPIIRKHHGEEKKFLFSLAGGETIELDTEDGKRGLFVVRTVPQSKQIVFVPINDSRKRKDIGTTGLTAYPESLKERHCAKVLITPLGEVRRASD

SEQ ID NO: 16499 - protein, 1035 aa, unidentified
  REGION 1..1035: note = Cas Enzyme sequence
MTERTNNLTLGLDLGSNSLGWALIENEDNGQKRIIDKGVRIFEAGLDNLEQDGRGESRNAARRDARSSRRRLERLSRRLVKLAGILQENGFLPEGNIGDPSKRNGLFTELDRKLDNPYKLRAKGLDNKLEPFEFGRAMYHICQRRGFLSNRKELPKKKEEEGKVKAEIGELQKKIDESGARTLGEYFSKVNPHEERIRTWYTSRRMYEDEFNRLWDSQKNYYLNILTDDLKKQAHHAIFFQRALKSQKNLVGKCEYERTQRRAAWAILDAQEFRYLQRINDLEIILNNERRLLSPDERVKLINELERNSSLKFSSTRKATLTIKKILELPKSASFNLKKGGEENLHGNKTATTLREIFKDRWDEFSRKDKDQIVEDILSIQNSDALARRGTKKWGLDEEAAKKFGNISLQSGYCSFSRKALLKILPKLREGFRLNEILREAYPDRWEMQSEPRDILPPVKNEDIPEIRNPIVERTLSELRKVVNAVIKKHGKPESIRIELARDLRQNAKQRERTFKSMRENEKQRKSAAEEILKECGLANPSRNDILKFILWKECSGHCPYTDNYIGPSDLFSSQPNFDIEHIIPFKRSLDDSFMNKTLSHVATNRNIKKDMTPYEAFSSRPEWDDIISRVKKFNNQEKLKRFKMTGKEVEEFLSDFSSRQLNDTRYATKRAKEYLGLLYGGLKEDAAQGTEKVQAVGGQITAYLRNVWGLNSILKDGPGKSRDDHRHHVVDAIVIALTEQRWVNELSNAAKNAPKAGKRRFAAVMPPWNGFWDDVKNSVSSVIPSHQITKKVKGALHAETFYGRPYKDGKGKQFTKTRVALEKLTPKNVENIVDKIVKQKVKDKLKELGKAPKEAFKNPDKNSNLPLIKTKTGKEIRIKKVRIEMPFETHLRVGEGYRERYVRSCPDSNHHMEIYKDLATGRWDGEVVSLFKAHQRLRSKQPIIRKHHGEEKKFLFSLAGGETIELDTEDGKRGLFVVRTVPQSKQIVFVPINDSRKRKDIGTTGLTAYPESLKERHCAKVLITPLGEVRRASD

SEQ ID NO: 16500 - protein, 1035 aa, unidentified
  REGION 1..1035: note = Cas Enzyme sequence
MTERTNNLTLGLDLGSNSLGWALIENEDNGQKRIIDKGVRIFEAGLDNLEQDGRGESRNAARRDARSSRRRLERLSRRLVKLAGILQENGFLPEGNIGDPSKRNGLFTELDRKLDNPYKLRAKGLDNKLEPFEFGRAMYHICQRRGFLSNRKELPKKKEEEGKVKAEIGELQKKIDESGARTLGEYFSKVNPHEERIRTWYTSRRMYEDEFNRLWDSQKNYYLNILTDDLKKQAHHAIFFQRALKSQKNLVGKCEYERTQRRAAWAILDAQEFRYLQRINDLEIILNNERRLLSPDERVKLINELERNSSLKFSSTRKATLTIKKILELPKSASFNLEKGGEENLHGNKTATTLREIFKDRWDEFSRKDKDQIVEDILSIQNSDALARRGTKKWGLDEEAAKKFGNISLQSGYCSFSRKALLKILPKLREGFRLNKILREAYPDRWEMQSEPRDILPPVKNEDIPEIRNPIVERTLSELRKVVNAVIKKHGKPESIRIELARDLRQNAKQRERTFKSMRENEKQRKSAAEEIFKECGLANPSRNDILKFILWKECSGHCPYTDNYIGPSDLFSSQPNFDIEHIIPFKRSLDDSFMNKTLSHVATNRNIKKDMTPYEAFSSRPEWDDIISRVKKFNNQEKLKRFKMTGKEVEEFLSDFSSRQLNDTRYATKRAKEYLGLLYGGLKEDAAQGTEKVQAVGGQITAYLRNVWGLNSILKDGPGKSRDDHRHHVVDAIVIALTEQRWVNELSNAAKNAPKAGKRRFAAVMPPWNGFWDDVKNSVSSVIPSHQITKKVKGALHAETFYGRPYKDGKGKQFTKTRVALEKLTPKNVENIVDKIVKQKVKDKLKELGKAPKEAFKNPDKNSNLPLIKTKTGKEIRIKKVRIEMPFETHLRVGEGYRERYVRSCPDSNHHMEIYKDLATGRWDGEVVSLFKAHQRLRSKQPIIRKHHGEEKKFLFSLAGGETIELDTEDGKRGLFVVRTVPQSKQIVFVPINDSRKRKDIGTTGLTAYPESLKERPCAKVLITPLGEVRRASD

SEQ ID NO: 16501 - protein, 1035 aa, unidentified
  REGION 1..1035: note = Cas Enzyme sequence
MTERTNNLTLGLDLGSNSLGWALIENEDNGQKRIIDKGVRIFEAGLDNLEQDGRGESRNAARRDARSSRRRLERLSRRLVKLAGILQENGFLPEGNIGDPSKRNGLFTELDRKLDNPYKLRAKGLDNKLEPFEFGRAMYHICQRRGFLSNRKELPKKKEEEGKVKAEIGELQKKIDESGARTLGEYFSKVNPHEERIRTWYTSRRMYEDEFNRLWDSQKNYYLNILTDDLKKQAHHAIFFQRALKSQKNLVGKCEYERTQRRAAWAILDAQEFRYLQRINDLEIILNNERRLLSPDERVKLINELERNSSLKFSSTRKATLTIKKILELPKSASFNLEKGGEENLHGNKTATTLREIFKDRWDEFSRKDKDQIVEDILSIQNSDALARRGTKKWGLDEEAAKKFGNISLQSGYCSFSRKALLKILPKLREGFRLNEILREAYPDRWEMQSEPRDILPPVKNEDIPEIRNPIVERTLSELRKVVNAVIKKHGKPESIRIELARDLRQNAKQRERTFKSMRENEKQRKSAAEEILKECGLANPSRNDILKFILWKECSGHCPYTDNYIGPSDLFSSQPNFDIEHIIPFKRSLDDSFMNKTLSHVATNRNIKKDMTPYEAFSSRPEWDDIISRVKKFNNQEKLKRFKMTGKEVEEFLSDFSSRQLNDTRYATKRAKEYLGLLYGGLKEDAAQGTEKVQAVGGQITAYLRNVWGLNSILKDGPGKSRDDHRHHVVDAIVIALTEQRWVNELSNAAKNAPKAGKRRFAAVMPPWNGFWDDVKNSVSSVIPSHQITKKVKGALHAETFYGRPYKDGKGKQFTKTRVALEKLTPKNVENIVDKIVKQKVKDKLKELGKAPKEAFKNPDKNSNLPLIKTKTGKEIRIKKVRIEMPFETHLRVGEGYRERYVRSCPDSNHHMEIYKDLTTGRWDGEVVSLFKAHQRLRSKQPIIRKHHGEEKKFLFSLAGGETIELDTEDGKRGLFVVRTVPQSKQIVFVPINDSRKRKDIGTTGLTAYPESLKERHCAKVLITPLGEVRRASD

SEQ ID NO: 16502 - protein, 1035 aa, unidentified
  REGION 1..1035: note = Cas Enzyme sequence
MTERTNNLTLGLDLGSNSLGWALIENEDNGQKRIIDKGVRIFEAGLDNLEQDGRGESRNAARRDARSSRRRLERLSRRLVKLAGILQENGFLPEGNIGDPSKRNGLFTELDRKLDNPYKLRAKGLDNKLEPFEFGRAMYHICQRRGFLSNRKELPKKKEEEGKVKAEIGELQKKIDESGARTLGEYFSKVNPHEERIRTWYTSRRMYEDEFNRLWDSQKNYYLNILTDDLKKQAHHAIFFQRALKSQKNLVGKCEYERTQRRAAWAILDAQEFRYLQRINDLEIILNNERRLLSPDERVKLINELERNSSLKFSSTRKATLTIKKILELPKSASFNLEKGGEENLHGNKTATTLREIFKDRWDEFSRKDKDQIVEDILSIQNSDALARRGTKKWGLDEEAAKKFGNISLQSGYCSFSRKALLKILPKLREGFRLNEILREAYPDRWEMQSEPRDILPPVKNEDIPEIRNPIVERTLSELRKVVNAVIKKHGKPESIRIELARDLRQNAKQRERTFKSMRENEKQRKSAAEEILKECGLANPSRNDILKFILWKECSGHCPYTDNYIGPSDLFSSQPNFDIEHIIPFKRSLDDSFMNKTLSHVATNRNIKKDMTPYEAFSSRPEWDDIISRVKKFNNQEKLKRFKMTGKEVEEFLSDFSSRQLNDTRYATKRAKEYLGLLYGGLKEDAAQGTEKVQAVGGQITAYLRNVWGLNSILKDGPGKSRDDHRHHVVDAIVIALTEQRWVNELSNAAKNAPKAGKRRFAAVMPPWNGFWDDVKNSVSSVIPSHQITKKVKGALHAETFYGRPYKDGKGKQFTKTRVALEKLTPKNVENIVDKIVKQKVKDKLKELGKAPKEAFKNPDKNSNLPLIKTKTGKEIRIKKVRIEMPFETHLRVGEGYRERYVRSCPDSNHHMEIYKDLATGRWDGEVVSLFKAHQRLRSKQPIIRKHHGEEKKFLFSLAGGETIELDTEDGKRGLFVVRTVPQSKQIVFVPINDSRKRKDIGTTGLTAYPESLKERHCAKVLITPLGEVRRASD

SEQ ID NO: 16503 - protein, 1035 aa, unidentified
  REGION 1..1035: note = Cas Enzyme sequence
MTERTNNLTLGLDLGSNSLGWALIENEDNGQKRIIDKGVRIFEAGLDNLEQDGRGESRNAARRDARSSRRRLERLSRRLVKLAGILQENGFLPEGNIGDPSKRNGLFTELDRKLDNPYKLRAKGLDNKLEPFEFGRAMYHICQRRGFLSNRKELPKKKEEEGKVKAEIGELQKKIDESGARTLGEYFSKVNPHEERIRTWYTSRRMYEDEFNRLWDSQKNYYLNILTDDLKKQAHHAIFFQRALKSQKNLVGKCEYERTQRRAAWAILDAQEFRYLQRINDLEIILNNERRLLSPDERVKLINELERNSSLKFSSTRKATLTIKKILELPKSASFNLEKGGEENLHGNKTATTLREIFKDRWDEFSRKDKDQIVEDILSIQNSDALARRGTKKWGLDEEAAKKFGNISLQSGYCSFSRKALLKILPKLREGFRLNEILREAYPDRWEMQSEPRDILPPVKNEDIPEIRNPIVERTLSELRKVVNAVIKKHGKPESIRIELARDLRQNAKQRERTFKSMRENEKQRKSAAEEILKECGLANPSRNDILKFILWKECSGHCPYTDNYIGPSDLFSSQPNFDIEHIIPFKRSLDDSFMNKTLSHVATNRNIKKDMTPYEAFSSRPEWDDIISRVKKFNNQEKLKRFKMTEKEVEEFLSDFSSRQLNDTRYATKRAKEYLGLLYGGLKEDAAQGTEKVQAVGGQITAYLRNVWGLNSILKDGPGKSRDDHRHHVVDAIVIALTEQRWVNELSNAAKNAPKAGKRRFAAVMPPWNGFWDDVKNSVSSVIPSHQITKKVKGALHAETFYGRPYKDGKGKQFTKTRVALEKLTPKNVENIVDKIVKQKVKDKLKELGKAPKEAFKNPDKNSNLPLIKTKTGKEIRIKKVRIEMPFETHLRVGEGYRERYVRSCPDSNHHMEIYKDLATGRWDGEVVSLFKAHQRLRSKQPIIRKHHGEEKKFLFSLAGGETIELDTEDGKRGLFVVRTVPQSKQIVFVPINDSRKRKDIGTTGLTAYPESLKERHCAKVLITPLGEVRRASD

SEQ ID NO: 16504 - protein, 1035 aa, unidentified
  REGION 1..1035: note = Cas Enzyme sequence
MTERTNNLTLGLDLGSNSLGWALIENEDNGQKRIIDKGVRIFEAGLDNLEQDGRGESRNAARRDARSSRRRLERLSRRLVKLAGILQENGFLPEGNIGDPSKRNGLFTELDRKLDNPYKLRAKGLDNKLEPFEFGRAMYHICQRRGFLSNRKELPKKKEEEGKVKAEIGELQKKIDESGARTLGEYFSKVNPHEERIRTWYTSRRMYEDEFNRLWDSQKNYYLNILTDDLKKQAHHAIFFQRALKSQKNLVGKCEYERTQRRAAWAILDAQEFRYLQRINDLEIILNNERRLLSPDERVKLINELERNSSLKFSSTRKATLTIKKILELPKSASFNLKKGGEENLHGNKTATTLREIFKDRWDEFSRKDKDQIVEDILSIQNSDALARRGTKKWGLDEEAAKKFGNISLQSGYCSFSRKALLKILPKLREGFRLNEILREAYPDRWEMQSEPRDILPPVKNEDIPEIRNPIVERTLSELRKVVNAVIKKHGKPESIRIELARDLRQNAKQRERTFKSMRENEKQRKSAAEEILKECGLANPSRNDILKFILWKECSGHCPYTDNYIGPSDLFSSQPNFDIEHIIPFKRSLDDSFMNKTLSHVATNRNIKKDMTPYEAFSSRPEWDDIISRVKKFNNQEKLKRFKMTEKEVEEFLSDFSSRQLNDTRYATKRAKEYLGLLYGGLKEDAAQGTEKVQAVGGQITAYLRNVWGLNSILKDGPGKSRDDHRHHVVDAIVIALTEQRWVNELSNAAKNAPKAGKRRFAAVMPPWNGFWDDVKNSVSSVIPSHQITKKVKGALHAETFYGRPYKDGKGKQFTKTRVALEKLTPKNVENIVDKIVKQKVKDKLKELGKAPKEAFKNPDKNSNLPLIKTKTGKEIRIKKVRIEMPFETHLRVGEGYRERYVRSCPDSNHHMEIYKDLATGRWDGEVVSLFKAHQRLRSKQPIIRKHHGEEKNFLFSLAGGETIELDTEDGKRGLFVVRTVPQSKQIVFVPINDSRKRKDIGTTGLTAYPESLKERHCAKVLITPLGEVRRASD

SEQ ID NO: 16505 - protein, 1038 aa, unidentified
  REGION 1..1038: note = Cas Enzyme sequence
  SITE 79: note = misc_feature - Xaa can be any naturally occurring amino acid
  SITE 368: note = misc_feature - Xaa can be any naturally occurring amino acid
  SITE 739: note = misc_feature - Xaa can be any naturally occurring amino acid
  SITE 888: note = misc_feature - Xaa can be any naturally occurring amino acid
MKDEDLILGLDLGANSLGWSLIRGQKSLVAWGVRIFKAGLEDMQVDGTGKPPNQERRQARLRRRQVERRARRLAHVARXLQRSKLLPPGDIEAPQQRHSLFSNLDSHLMSDKERLRDLGALDENGLREKLQAGPCYLLRAAALDKPLKPYELGRAVYHLAQRRGFLSSRKALRKDKKEEGKVKKGTTELQKNIQQAGCRTLGEYLYKVAPAERLRERYTSRAMYEEEFETIWKAQAPYHQGILTEELKEKLHHAIFHQRPLKRPQVGTCQLEPGRPRAPWALLSAQRYRFLQRLNDLRIMDDGGQQRKLTPEERQTLIKELERKRELGFERIKKLLSLPQDYSFNLQRGGEERLLGNSTAASLRKIFXPRRWDALSHEDKDRVVEDLLSIEKEETLKRRAVRHWGLTEEAAEELCQLELEKGYCSFSRKALRKLLPLLEQGTSLQEAIKELYPGHKRAQEGRDLLPPVREALSGVRNPVVERSLTELRRVVNALIKRYGKPDIIRIELARELNPAKRRKDIWRRMRQQEKRREEAANKIVQEAGIQNPSRRDIEKYLLAEECNWRCPYTGRGISLSALLGPQPQFDVEHIIPYDRCLDNSFLNKTLCHVEENRRKHDRTPWEAYAHNPERYQEILQRVKTFRGPAAREKLMRFQLHGEELEEFIENFKARQLNDTRYAARLAIQYLGLLYGSPEGIDPEGRRRVQAVPAGQIVAQLRDAWGLSRLLSSSGSKTRDDHRXHAVDALVVALTTPREVKALSEAAKRAKGRGRLLSYMPEPWRGFHDQLAKALQHLVVSHRVCKKLRGALHNETFYSNRVDKEGKFTVKRKPLWELSGSDIERILDKAVRQAVEEKLRSLGIDTKKDKFKKVKALQDNPPVLKNGKPVRRXRFRVNLEVVPIGSGPHVRHVVPGNNHHMEIVLDQRTGKWEGHVVSLLEATKRKKQGLEVVKRDHGEGKKFLFSIAPGEVLEMDTPEGGRGLYRVRTVPQNKQLYFVPIYDARPVKKIGKKGLTAHPDTLREKNCQKVVITPLGEVRYAND

SEQ ID NO: 16506 - protein, 1038 aa, unidentified
  REGION 1..1038: note = Cas Enzyme sequence
MKDEDLILGLDLGANSLGWSLIRGQKSLVAWGVRIFKAGLEDMQVDGTGKPPNQERRQARLRRRQVERRARRLAHVARLLQRSKLLPPGDIEAPQQRHSLFSNLDSHLMSDKERLRDLGALDENGLREKLQAGPCYLLRAAALDKPLKPYELGRAVYHLAQRRGFLSSRKALRKDKKEEGKVKKGTTELQKNIQQAGCRTLGEYLYKVAPAERLRERYTSRAMYEEEFETIWKAQAPYHQGILTEELKEKLHHAIFHQRPLKRPQVGTCQLEPGRPRAPWALLSAQRYRFLQRLNDLRIMDDGGQQRKLTPEERQTLIKELERKRELGFERIKKLLSLPQDYSFNLQRGGEERLLGNSTAASLRKIFTPRRWDALSHEDKDRVVEDLLSIEKEETLKRRAVRHWGLTEEAAEELCQLELEKGYCSFSRKALRKLLPLLEQGTSLQEAIKELYPGHKRAQEGRDLLPPVREALSGVRNPVVERSLTELRRVVNALIKRYGKPDIIRIELARELNPAKRRKDIWRRMRQQEKRREEAANKIVQEAGIQNPSRRDIEKYLLAEECNWRCPYTGRGISLSALLGPQPQFDVEHIIPYDRCLDNSFLNKTLCHVEENRRKHDRTPWEAYAHNPERYQEILQRVKTFRGPAAREKLMRFQLHGEELEEFIENFKARQLNDTRYAARLAIQYLGLLYGSPEGIDPEGRRRVQAVPAGQIVAQLRDAWGLSRLLSSSGSKTRDDHRHHAVDALVVALTTPREVKALSEAAKRAKGRGRLLSYMPEPWRGFHDQLAKALQHLVVSHRVCKKLRGALHNETFYSNRVDKEGKFTVKRKPLWELSGSDIERILDKAVRQAVEEKLRSLGIDTKKDKFKKVKALQDNPPVLKNGKPVRRVRFRVNLEVVPIGSGPHVRHVVPGNNHHMEIVLDQRTGKWEGHVVSLLEATKRKKQGLEVVKRDHGEGKKFLFSIAPGEVLEMDTPEGGRGLYRVRTVPQNKQLYFVPIYDARPVKKIGKKGLTAHPDTLREKNCQKVVITPLGEVRYAND

SEQ ID NO: 16507 - protein, 1077 aa, unidentified
  REGION 1..1077: note = Cas Enzyme sequence
MENKKVFGFDMGANSIGWCVQIIGEDGFTLEILGMGSRIFENSRDPKTRVPLSVERRMAHAMSVRRGRQIMRTRNLCSILRKYGLLPSGENVSVSERNPYKLRAKAVSEKVDMFGIGRAILHMNKRRGFKSNRKADKKSDGAESRGMKLGISKLREAMGDRTLGEFLYERKKSGMGTRMRADAIRGKNEYEIYADRGMYESELRRIWDCQRKYHRNLTDEMLNEISGALFFQRPLKIPERGFCRFEPGERRAYKAYPVSQKFRILQEVNALEILDIAGGGEGITLSMRQKLARALLENDRKIVNKKGIATFAKIKKFLGIPQSLNFNFESESRKGFDGDSTAAVMGSAECFGDAWADMDDCLREKIVDLILADKEGEFAALCAEKFGFGAEKSCAILDAGGELKDGTVSLSAKAMRKILPHLEGGALYHAACAEAGYDFTADYDGERSDLLPYYGKILRTSVLGGNPNFDPEKQPEKYYGKINNPTVHVALNQLRKVYNKLVAVYGRPDMVAVETARELPLGAKGLGELLSEQGKNRGKNLEIAEELKKFGAANNYRNRMKYKLWEDLNPDCIKRACPFCGRPIELQKLFTPEFEIEHLLPFSETFDDTRANKVVSCASCNRILKGNRSPYDAFANRAGYDWNGILSRVSDMSKSKQWRFRPDAWEIFEEKYGDYIARMLNDTRYMSKLAREYLTSVIEPEKILTVTGSATSMLRAKWGLDAILDDSSPLQFGGESESSAAKVPKAPVKNREDHRHHAIDAFVISSLNRKLISAISQCAKRAEQAHLENLFKAIPRAYERISYEKLEAAVKSINVSHKLDRGDAKGALKRGGTVAKLHKETAYGMIGSPYGGKATLAKRVPILSVECDEGQISEIANAKIRADLSRFCGQVCREAATKEEKKSMWARLLGEYCASNKIRRVRIHLPNRELKKLIPISDKKGKVYKYMENAESYCIDIYKPRNSEKWKFEVINMFAAHKNEMPQWRKDDSRAKLVMRLFKRDTIAYEENGEYRLAVVAGMATHGQISLLPLNVAKVEGNPPKKTPSVLQKLNARKVYVDEIGRVFDPYKRENERMHSC

SEQ ID NO: 16508 - protein, 1077 aa, unidentified
  REGION 1..1077: note = Cas Enzyme sequence
MENKKVFGFDMGANSIGWCVQIIGEDGFTLEILGMGSRIFENSRDPKTRVPLSVERRMAHAMSVRRGRQIMRTRNLCSILRKYGLLPSGENVSVSERNPYKLRAKAVSEKVDMFGIGRAILHMNKRRGFKSNRKADKKSDGAESRGMKLGISKLREAMGDRTLGEFLYERKKSGMGTRMRADAIRGKNEYEIYADRDMYESELRRIWDCQRKYHRNLTDEMLNEISGALFFQRPLKIPERGFCRFEPGERRAYKAYPVSQKFRILQEVNALEILDIAGNGEGITLSMRQKLARALLENDRKIVNKKGIATFAKIKKFLGIPQSLNFNFESESRKGFDGDSTAAVMGSAECFGDAWADMDDCLREKIVDLILADKEGEFAALCAEKFGFGAEKSCAILDAGGELKDGTVSLSAKAMRKILPHLEGGALYHAACAEAGYDFTADYDGERSDLLPYYGKILRTSVLGGNPNFDPEKQPEKYYGEINNPTVHVALNQLRKVYNKLVAVYGRPDMVAVETARELPLGAKGLGELLSEQGKNRGKNLEIAEELKKFGAANNYRNRMKYKLWEDLNPDCIKRACPFCGRPIELQKLFTPEFEIEHLLPFSETFDDTRANKVVSCASCNRILKGNRSPYDAFANRAGYDWNGILSRVSDMPKSKQWRFRPDAWEIFEEKYGDYIARMLNDTRYMSKLAREYLTSVIEPEKILTVTGSATSMLRAKWGLDAILDDSSPLQFGGESESSAAKAPKAPVKNREDHRHHAIDAFVISSLNRKLISAISQCAKRAEQAHLENLFKAIPRAYERISYEKLEAAVKSINVSHKLDRGDAKGALKRGGTVAKLHKETAYGMIGSPYGGKATLAKRVPILSVECDEGQISEIANAKIRADLSRFCEQVYREAATKEEKKSMWARLLGEYCASNKIRRVRIHLPNRELKKLIPISDKKGKVYKYMENAESYCIDIYKPRNSEKWKFEVINMFAAHKNEMPQWRKDDSRAKLVMRLFKRDTIAYEENGEYRLAVVAGMATHGQISLLPLNVAKVEGNPPKKTPSVLQKLNARKVYVDEIGRVFDPYKRENERMQSC

SEQ ID NO: 16509 - protein, 1553 aa, unidentified
  REGION 1..1553: note = Cas Enzyme sequence
MTSKQENLGALTFGLDIGIASVGWAVLGENRIIDLGVRCFDAAEDKDGKPNNQTRRGARVSRNRFHMRTWRLKRLTRLFRDVGLLSKEEIKQLFSATRQKNQPQLVSPWSLRAEGLTRKLTQQEWAQVIYYFVKHRGFKFFSKTEDPRSSSADNEATSVEQKERDGLRDGLEYTGKILKKYPQFETIGNAAHHLANAQQGSDGIYRDKDGKLLEATDCEEFQESFRNKSKSYRHAFHRDDLMDELNKLFEAQQQPQFSNPFANLVLREDIDRLREVQISSETRTVGPTFHDQVFALLELQHPPIYTSQMDALIGKCELEKNELRAAKNTFSNERATWLQTINNLRIKRNGKEDTLSPDERALLINLPYTQAKLTFKQARDALRASLGFPAHWREASFTKVTYRNKRKDDGSWINVVAADGSNISLGKYGQDDVRKKANKELKKRLETGTMTFAELRQLFELKEGEAFEHICNEAEIVPASLETTYTIPDGKKTFIKLLPAKSKKPITLKGRAMKALADLSSENLNATLADLRLAIEQADRLEAGWQFEYSRKDSTPIKLENEATTQVPIEYEDAQKAEEETLIELKGWHTFKRALETECSDWWANLQVAYLDPQSDAGQAAAIQLDAIAELLTKAQTDADVEKGFAALALTASQIQALERVRFKQYRNLSLIALRKILPSLEAGKSRTEACKDAGYKTETHQRSKHLPPLETYLYERVRHGKKTKYTELRYKDLTNPVVARAFNQARLILNALIDRYDQSPAYVHVELARDLAKSKEKRIEDKKRQDENRSKRESIRGNFIATYKIDEPTSTQILKERLYHEQGCKCIYTLEELDLNRVVDDPNYAQIDHIWPRSLTFDSSMENLVLVHAHANQDKGNRIPYDFINQKYGKEHWRRVMAYILGCKGIGGNKQNRLITKELDADEFSARNLVDTRYATRLFARMVRDHLLFDGQVEDKIEDIDPSESGKSRLEKFHKTRVRTPQGGLTAFLRRGWLNDIKDRESSDKHHALDACIVATCTPKVINEVNSYFANEEQVPSRFKRLADGKYADKGNGGEIISKQEARERGLYLPPPWDHFRADFFEKYEAIMVSRVVRKKRSGELHDANPLAFRKLSIPLVDLSEDMLTSLSIPKEFRIKHQEILDDLAKKLIHHGGDAKIAFDQPHEIIDRKGNIQHIRSISLPIVGLPAPYLEARLKPLTKKQKQSALLEDNRRNHQRVLLCNLTLEMLDDARLGSGYLNRNKKVIDALKACLKHFDGDSRKAFSDGFVIDGGDGKAIRSIRLPLWSDEVSVQAHKSAPLTSLSLDKLDPKKLGATYYHRNKKVIDALRERLNEFGGNAKKAFSTERRKDGEANVENKPKTRKDRPFDPSDYGKPGPIIRSIRLPESCGLGTDIRNGIAKLGASQKTEVYWTGTNYFFRNRYGLDDEQVRGISEPPSDSKILFILTKNDYVRIVLKDGGIKEGYFVFYPEDGRMQVRRHDLPKIIDYVAHETEEPSEGEEESGETIEPTNGNKKKKVVLAWRIPESQIVKISKFKVGVLGDLTLIADSMPHGLA

SEQ ID NO: 16510 - protein, 1054 aa, unidentified
  REGION 1..1054: note = Cas Enzyme sequence
MSYRLGLDIGSTSIGWCMIRLNKEIPPQPIAIIKMGVRIFPDGRNPKDGSSLAVTRRAARAMRRRRDRLLKRKNRLMSALINLGFFPVDAESRNALTNLDPYVLRRKGLDAALTPPEFARALFHINQRRGFKSNRKTDKGASDTGALKGAIKLVREKLIADGSRTIGEWLAKRHEMKESVRARLRGSGSKAVYDFYIDRAMIEAEFDALWKKQAELQPQIFSEEKRAELKDILLFQRPLRPVKPGRCTLLAHEERAPLALPSTQQFRIFQEVNNLRLLKENLAEQSLTLEQRDLIVDLLNKSKEVTFTAIKKALKLGGTAKFNLEDAKRDKLKGNATSVLLAKKDFLGDAWTQLSLQQQDDLVQRLITEQSESKIISELEKEFSIDEERAERIANAALPDGYGSLCRKALDKVLPELKKAVVTFDKAVIAAGFEHHSAISHSQQTGEVLSALPYYGEALQRHVSFARENPKNDEERYGKIANPTVHIGLNELRKVVNRLLERYGHPTEVIVEVARDLKQSKKVRDEINKDQAERQKQNDQFRAQIKDLLGSEPKPQDIQKMRLWMELNKSDAANRRCPYTGEQISIEMLYSDAVEIEHILPFAITLDDSLNNKTVSLRRANRDKGNKTPYEAFGHSPDGYDFQTILERAKLMPKEKAKRFAEDGYQRWLKEDDGFLARALTDTAYLSRIAKEYLSLICPHNNVRAIPGRMTAMLRGKFGLNALLSGNAEKNRDDHRHHAIDAAVIAITDQGMLGRFAKASADAREAQLNRLIKSMPMPWPSYREQVARSVENVIISFKPDHGYQGALHNDTTYGLRAEGKVIHRVPLDKFSSDKEIEKAEFADSALQAWLLNETQNLSGKEFKEKLMQVTKEFRHRRVRILEKLAVIPLSSVKAGTRHGVNEEGQPANYKGYLGNSNYCIEIVKMESGKWTGEVISTFQAHQIVKTLGEEEGFTKLRNPTKSQSGKELVMRLMIGDMVKMEVVGITQLMRVCAIPQSGQMAFSAHTEANVDARNRDKENSFSYVTKYPGSLQATKARRIAVSPIGEFRDLGFNG

SEQ ID NO: 16511 - protein, 1162 aa, unidentified
  REGION 1..1162: note = Cas Enzyme sequence
MESFDSSLLQQRLSPRITTTEVKYIRGTRMAQYIFGLDIGIASVGWAVLDEVRIIDLGVRCFDKAETADKGESLNLVRRDARLMRRRLWRRSARLTQLGRLFKRQGLIGDAQLFKRAPNFLLTASNLQKQVQRSPWQLRVEGLDRLLLPEEWAQVIYHLCKHRGFHWVSKAEQQQAQADDKSEKGKVKKALEQTRLLFTEKGYRTAAEMLLKEFPEAQRNKRGEYKKSLSRVLLDQEMGLLFAAQRGLGNPYAGEAFEAQIRGTGDRKSGLLWQQRPMQNILHMLGKCTFERSEYRAAKASFSAERHVWLTRLNNLRINNKGHIQALDAAQRQAALWLPYLGAEKFTYSHLKDALIKQGLLDKDTRFVGLNYGQDKKEIKKAESEVLVKLQGWHALKKVLLKADQESAWEQISAAAIDGNPTLIDTIAQVLSVYKDDADIEAKLSELPLPGGRNTVDVLLGIRFDKFSNLSLKALQSILPLMAQGMRYDEAAKAIYGDHRQALANTSEKHLLLPPLYENTRHYKSKSDRVGSMRFKDGLDIPRNPVVLRALNQARKVVNALIREYGSPHAVHIEMARDLSRPHQERKDIEKQQHEYKERSNVAKEQFQECFHREATGRELEKYLLYKEQQGKCGYSLQDLDLNRVVNDPSYVEVDHALPYSRSYDDSKTNKILVLKAENQNKGNRTCYEYLSSFPGRENGERWRNFVAFVESNQTYRLTKRNKLLRKNFGKEQSAEFRERNLNDTRYICRFFKNFVENHLQLHEESASKRCVVLNGQLTAFLRARWGFAKVREESDRHHALDAIVIAACSHAMVQRLANYSKRQEVEFLKEGFADPETGEVINVDAARLLEKHFPRPWHHFRDEVLLRLQTNDAEALRQKLATFGTYDEQARQAAKPLFVSRAPKRRGSGAAHKDTVYAKAPSHELPKRVTEKVALSSLTLKDLDRLIDPHRNEKLYAAIKERLEAYAANGGKFDKTGNKAFPVDNPLYKPDQYGQPTGPIVRTVTLYTENMSGLDLRGGLAKNDSMIRVDVFKGKKDGKYHLVPAYVHHLVSGLPNRAIVANKDENEWVEINNDYEFLFALCSNDLVKIQLKKESYIGYFSGCDRATGAINIWAHDRNIAIGKEGLIRGIGVKMAISFEKFHVDVLGRIYPALKEQRRGLA

SEQ ID NO: 16512 - protein, 1111 aa, unidentified
  REGION 1..1111: note = Cas Enzyme sequence
MAVKTTGPLTIGLDIGIASVGWAVLAPSRIVALGVRAFDKAETAKEGDSLNLIRRTARLTRRRLHRRAWRLTKLARLLKRQGIIDDAQLFQPKHPFSHSLWRLRVEGLDRQLNNEEWARVIYHLCKHRGFHWISRAEEKKAEADTKSEGGKVKQGLAATKRLMQEKGYRSAAEMVLMEFPEAQRNKQGDYGKSLSRVSLGEELADLFRRQRELGNAHADAELEAEILGTGDRKSGLFWAQKPALAGKDLLKMLGHCTFENAEYRAPKASYTAERHVWLTILNNLRIAVDGTTRPLTEQERRIALPLPYGQAGDLTYKQLRAALVKAGIAVEGFRFARFSYAQQPDGKTKDPETAVLVKLPAWQELRLTLKKAGLETEWRGMAGAAVDGRPELLDQIAWVLSVFKEDEETASELQKLSLPGAQKMIDALLDLRFDKFHSLSLKALRKIVPHMEEGLRYDEACERAGYHHSQLHKAGEGNHKYLPPFYSGRDKTGRMVFSEDMDIPRNPVVLRSLNQARKVMNALVDQYGAPHAVHIEMARDLSNPLDERRKIEKDQAEYRDQNEKDKARFAEHFSRMPEKNEFEKWRLYREQQCKCAYSIEPIDLGRLLEPGYVEIDHALPYSRSFDNSKNNKVLVHAAENRNKGNQTPYEYLRGAEDSPRWRMFVAFVESNKAYRLAKRSRLLRKNFGENEAKEFRERNLNDTRYICKFFKNYVERYLQLAEDSEARRCVVLSGQMTSFLRARWGLIKVREDSDRHHALDAAVVAACSHGMVKRLSDYARRKELIQVREGFVDVETGEIVNPAMYQQLRQHFPDPWPNFRHELEARLKIDDPAIMRTTIEQLGSYPPEALNALRPLFVSRAPQRRNGGAAHKDTVYGQPERLKTQGGVTQKVPLASLTLKDIENLVDPHRNEKLYAAIRSRLEAHGGKGDKAFPAGDPLRKPDRNGNPTGPVVRTVTLVIDKLSGVPVRGGIAKNDSMLRVDVFTKDGKFHLVPVYVHHRVKGLPNRAIMALKNEEEWTIIDDSYAWCFSLHPNDLMRVTLAKETHLGYFAGCDRSTGAINLWAHDRSQRVGKDGLIRGIGIKTARAVDKFHVDVLGNIYPAPQEKRRGLA

SEQ ID NO: 16513 - protein, 1120 aa, unidentified
  REGION 1..1120: note = Cas Enzyme sequence
MTVKANNPITIGLDIGIASVGWAVLALDRIIDLGVRAFDKAETAKEGDSLNLVRRAARLMRRRLRRRAWRLTKLARLLKREGLIENVHMFRAQLPFHQSLWKLRIDGLDRRLDAEEWARVIYHICKHRGFHWISRAEEKKAEVDSKGEGGKVKQGLAGTAKLMREKGYRTAAEMVLTEFPDAQRNKQGDYGKSLSRVLIAKELAMLFEQQRKLGNTLATEKLQTELLGNDDRKSGLFWAQKPALSGKDLLKMLGHCTFEKAEYRAPKASFTAERHVWLTRLNNLRIVVEGAIRPLNENERRTALSLPYQQAGNFTYKQLRSALVKAGFLPDSFRFMGLRYPSAAQKDESKAKDPETEALAKLPAWQEIRQALKKKGLETEWQSMAGVASAGSPDLLDQIAWVLSVFKEDDEVAIELRKLPLPNAESVIDALLDIRFDKFHALSLKALRQIVPHMEHGLRYDEACEQAGYHHSLVNKIGEGQDKYLPPLYSGRDKDGRMVFNENMDIPRNPVVLRALNQARKVVNALVREYGSPHAVHIEMARDLSKALDERRSIEKEQKEYRDRNDKDKTEFSSQFGIVGNPKGGDFEKWKFYREQQGKCAYSVEAIDLNRLLEPGYVEVDHALPYSRSFDDSKNNKVLVFAKENRDKGNQTPFEYLTRKDGLENGPLWRQFVAFVESNKAYRLAKRSRLLRKDFGGKESGEFRDRNLNDTRYICRFFKNYVEQYLQLAGDSEVKRCVVVSGQLTSLLRARWGLFKMRGDSDRHHALDAAVVAACSHGMVKRMSDYARRKELDQVRKGFVDIETGEVVNPAMYQQLQQHFPDPWPHFRSELEARLKTDDPTALRAQIEPLGTYPPEALEALRPLFVSRAPQRRNGGAAHKDTIYGQRERLQYPGSVTQKMQLTSLTPKDLDQLIDPHRNEKLYAAIRARLEAHGGKGEKAFPPDNPLRKPDHDGNPTGPIVRTVTMVIDKLSGIPVRGGIAKNDAMLRVDVFTKTARFHLVPVYVHHQVKELPNRAIVAFKDEDQWSLIDDSYQFRFSLHPNDLVQVTQKGKKSILGYYASCHRGTGNINIWAHDRSTLTGKNGMIEGIGVKTALALEKFHVDVLGNIYPAPLERRRDLA

SEQ ID NO: 16514 - protein, 1111 aa, unidentified
  REGION 1..1111: note = Cas Enzyme sequence
MSVKAAGALTIGLDIGIASVGWAVLAPDRILALGVRAFDKAETAKEGDSLNLVRRTARLTRRRLHRRAWRLTKLARVLKRHGVIDDTRLFQPQHPFPHSLWRLRVEGLDRRLDAEEWARVIYHLCKHRGFHWISRAEEKKAEADVKSEGGKVKRGLAGTNKLMQERGYRSAAEMVLTEFPEAQRNKQGDYGKSLSRVLLGKEMADLFQRQRELGNVHADSTLEAAILGNGDRKSGLFWAQEPALSGKALLEMLKHCTFEKTEYRAPKASYTAERHVWLTQLNNLRIVADGTTRPLTAQERRIALPLPYGQAGDLTYKQLRAALLKAGNTPDSFRFARFSYAQQPDGKIRDPEGAVLVKLPAWQELRLTLKKAGLETEWQGMASAAIDGRPELLDQIAYTLSVFKEDAEAAAELRKLPLPGAQKMVDALLDIRFDKFHALSLKALRKIVPHMEDGLRYDEACKLAGYHHSQLYKAGEGEHKYLPPLYSGRDKTGRMVFREDMDVPRNPVVLRALNQARKVVNALVHQYGAPHAVHIEMARDLSKPLDERRKIEKDQAEYRDQNEKDKARFTEHFGHNPNGMEFEKWRLYREQQCKCAYSIEPIDLGRLLEPGYVEIDHALPYSRSFDNSKNNKVLVHAAENRNKGNQTPYEYLRGAEDSQRWRTFVAFVESNKAYRLAKRSRLLRKNFGENEAKEFRERNLNDTRYICRFFKNYVERYLQLVEDSEAKRCVVLSGQMTSFLRARWGLIKVREDSDRHHALDAAVVAACSHGMVKRLADYARRQELDQVREGFVDVETGEIVNPAMFQQLRQHFPAPWPHFRHELEARLNIDDPAILRTSMEQLGSYPLDTLSTLQTLFVSRAPQRRNGGSAHKDTIYGQPERLRAQSGVTQKVSLANLTLNDLNNLVDPHRNEKLYAAIRARLEAHNGKGDKAFPTDNLLRKPDRDGNPTGPVVRTVTLVIDKLSGIPVRGGIAKNDSMLRVDVFTKDSRFHLVPVYVHHRVKGLPNRGIVAFTAEDEWTLIDDTFNWCFSLYPNDLVRVTLRKGVHVGYFASCNRSTGAINLWAHDRSKKVGKDGMIESIGVKTALGLEKFHVDILGNIYPARPEKRRGLA

SEQ ID NO: 16515 - protein, 1129 aa, unidentified
  REGION 1..1129: note = Cas Enzyme sequence
MKNFSFDVGMTSLGVAVNQGGKIVFGDVLLMHPEAGAVKAQAERRRLFKTRESHKAREAALESLWRSVGLEPLQRKRFEKAKDANGKKRFVKTSADERLEREFPRKGDDTVYASSLLCIMLLEGEPLEDWQIYKALHAAIQRRGYDSNVPWKTREEQRKESVKDENPEEQVGRFDDELRKMTSDKRCHLPAYYDAWKMGLWDAQTKRVTHIRQHNKKKPQKARGYNPSRELVTQEICRLLDQASEQIPQLNEYLTEDKRDQLLYGKPHNTGNLRYPSFSKVDGLLGQKYPRFENRIVSKCALMPRLNVCKSEKPLAIEVGFLLRLVDWRYEKEDASGEKSVHSLSGQQISDMFNKCESAWKKQPREYAPEEYAKCFRLTPSKVAKMADELGGSVKEGHAEIPASKHTGRSRFSQPALHLMKSLILSDKTPKGFGDELTRLVDAMEKENPGAKFGYQIFPDVPYKYFRKDFKFLNKMGDSRDAIYVPDISLAERYRDEGCDVDSAVQKVINTCNWPELRHRLGVFDRELEILTEKYGKPDAVHLEFVREDFLSKKRKNEYTARADAGKKARQTAVDELKQRNIDVSEKNIFRYRLYEEQNKQCAYTGDSIDIGRLESYEIDHIFPREDGGPDAYYNKVLTSRETNQQKGKHLPCECGFIINWSAFGTRVKGLPLGKSKKKLLLASTREEAEELVEKYTGLSGTAHIARLARDIAFLRYGWQPGAAGEQQRVFVFSGGLTSKVAKKYGLYKVLGDGSMKYQKDRTDHRHHALDAMVISYLRQWTRDKNKTEFFKFPPGIDVDYFREALSDVYPHYITRVKPAIAEQPKSRPRSDVNKKKKEFKNISKDPGERGQWYANKKSDPNSKKKTGGTHQHGYIFYKKDDKGKVCTKTVHAFRSPYAAMKEVEKKSAEIIGLLYAGKSVFLPGETQVTGTKLGRNARLKFGEYEIVKLQKETVIRSVEPRPEQTESDDSASNRYRITRTKLATIEICNELMLGNSFDLDEFPVSKEQNLTGNYRVDNSTRDLANCAIVNTDTGEMTEVNFLKLVQHLDEIRQGDALEENNTVTIGNIHATYIKRVKADDLPRQNLPEGHYLIKGFSGKKVQLVAQDGTVYRIQSNQLDRFIIDQLEN

SEQ ID NO: 16516 - protein, 1122 aa, unidentified
  REGION 1..1122: note = Cas Enzyme sequence
MKATKIFSFDVGMTSLGVAVNQGGKIVFGDVLLMHPEAGAVKAQAERRRLFKTRESHKAREAALESLWRSVGLEPLQRKRFEKAKDANGKKRFVKTSADERLEREFPRKGDDTVYASSLLCIMLLEGEPLEDWQIYKALHAAIQRRGYDSNVPWKTREEQRKESVKDENPEEQVGRFDDELRKMTSDKRCHLPAYYDAWKMGLWDAQTKRVTHIRQHNKKKPQKARGYNPSRELVTQEICRLLDQASEQIPQLKEYLTEGKRDQLLYGKPHNTGNLRYPSFSKVDGILGQKYPRFENRIVSDCALINRLHVCKSEKPLAIEVGFLLRLVNWRYEKEDASGEKPVHSLSGQQISDMFNKCESAWKKKSREYAPEEYAKCFKMTPSKVAKMADELGGSVKEGHAEIPASEHSGRSRFSQPALHLMKSLILSDKTPKSFGEELSRLVDAMEKENPGAEFGYQIFPDVPYKYFREDFEFLNKMGDSRDAIYVPDISLAERYGDKGGDVDSAVQKVINTCNWPELRHRLGVFDRELEILTEKYGKPDAVHLEFVRKDFLSKKRENEYTARADAGKKARQTATDELKQRNIAVTEKNILRYRLFEEQNKQCVYTGAPIDVGKLESYDIDHIFPREDGGPDAYYNKMLTSETVNRKQKGKRLPCECDFINWPTFTNLVKGLPLGKNKKKLLLASTREEAEELVEKYTGLSGTAHIARLARDIACLRYGWQPGAVGEQQRVFVFSGGLTSKVAKKYGIYKALGDGSMKYQKDRSDHRHHALDAMVISYLRQWTRDKNKTEFFKFPPGIDVDYFREALSDVYPHYITRVKPAIAEQPKSRIDVNKKEFKNISKDPDERGQWYTNKSESGKGTSQHGYIFYKDDKGKVCAKTVHAFRSPYAAKKEVEKKSSEIIGLLHQGKSIFLPGETQVTGTKLGRNAWLKFGEYEIVKLQEKTVIRFVGSRHEQTEADSSVSNRYRIDRAKLEKVRICNELMLGKSFDLDEFIVHKELSLTGNYRVDNSTCDSANCVIVNTDTGEEITEVNFFKLVQHLDKIRRGDALEENNTVTIGNIHATYIKGVKADDLPRQNLPEGHYLIKGFSGKKVQLVAQDGTVYRIQSNQLDRFIIDRLEN

SEQ ID NO: 16517 - protein, 1129 aa, unidentified; identical to SEQ ID NO: 16515
  REGION 1..1129: note = Cas Enzyme sequence

SEQ ID NO: 16518 - protein, 1122 aa, unidentified; identical to SEQ ID NO: 16516
  REGION 1..1122: note = Cas Enzyme sequence

SEQ ID NO: 16519 - protein, 1081 aa, unidentified
  REGION 1..1081: note = Cas Enzyme sequence
MAAFKPNPINYILGLDIGIASVGWTMVEIDEEENPIRLIDLGVRVFERAEVPKTGDSLAAARRLARSVRRLTRRRAHRLLRARRLLKREGVLQAADFDENGLIKSLPNTPWQLRAAALDRKLTPLEWSAVLLHLIKHRGYLSQRKNEGETADKELGALLKGVADNAHTLQTGDFRTPAELALNKFEKESGHIRNQRGDYSHTFSRKDLQAELNLLFEKQKEFGNPHVSDGLKEGIETLLMTQRPALSGDAVQKMLGHCTFEPTEPKAAKNTYTTERFIWLTKLNNLRILEQGSERPLTDTERTILINQPYKKKLTYAQARKLLGLEDTAFFKGLRYGKDNTEASTLMEMKAYHAISRALEKEGLKDKKSPLNLSPELQDEIGTAFSLFKTDEDITGRLKDRVQPEILEALLKHISFDKFVQISLKALRRIVPLMEQGKRYDEACAEIYGDHYGKKNTEEEIYLPPIPADEIRNPVVLRALSQARKVINAVVRRYGSPARIHIETAREVGKSFKDRKEIEKRQEENRKDREKAAAKFREYFPNFVGEPKSKDILKLRLYEQQHGKCLYSGKEINLGRLNEKGYVEIDHALPFSRTWDDSFNNKVLVLGSENQNKGNQTPYEYFNGKDNSREWQEFKARVETSRFPRSKKQRILLQKFDEDGFKERNLNDTRYVNRFLCQFVADHMRLTGKRKRRVFASNGQITNLLRGFWGLHKVRAENYRHHALDAVVVACSTVAMQQKITRFVRYKEMNAFDGKTIDKETGEVLHQKTHFPQPWEFFAQEVMIRVFGKPDGKPEFEEADTPEKLRTLLAEKLSSRPEAVHEYVTPLFVSRAPNRKMSGQGHMETVKSAKRLDEGISVLRVPLTQLKLKDLEKMVNREREPKLYEALKARLEAHKDDPAKTFAEPFYKYDKAGNRTQQVKAIRVEQVQKTGVWVRNHNGIADNATMVRVDVFEKGGKYYLVPIYSWQVAKGILPDRAVVALKEENEWQKLDHSFNYKFSLFKNDLVKIKTKKAKFFGYYDGFNRWTGAIDIRIHDTELTVGKKGVIEGIGVKTALSFQKYQIDELGKEIRPCRLKKRPPVR

SEQ ID NO: 16520 - protein, 1080 aa, unidentified
  REGION 1..1080: note = Cas Enzyme sequence
MATFKPNPINYILGLDIGIASVGWAMVEIDEEENPIRLIDLGVRVFERAEVPKTGDSLAAARRLARSVRRLTRRRTHRLLRARRLLKREGVLQAADFDENGLIKSLPNTPWQLRAAALDRKLTPLEWSAVLLHLIKHRGYLSQRKNEGETADKELGALLKGVADNAHALQTGDFRTPAELALNKFEKESGHIRNQRGDYSHTFSRKDLQAELNLLFEKQKEFGNPHVSDGLKEDIETLLMTQRPALSGDAVQKMLGHCTFEPTEPKAAKNTYTAERFIWLTKLNNLRILEQGSERPLTDTERAILINQPYKKKLTYAQARKLLGLEDTAFFKGLRYGEDNAESAILMEMKAYDAISRALEKEGLKDKKSPLNLSPELQDEIGTALSLFKTDEDITGRLKDRVQPEILEALLNISFDKFVQISLKALRKIVPLMEQGKRYDEACAEIYGDHYGKKKTEEKIYLPPIPADEIRNSVVLRALSQARKVINAVVRRYGSPARIHIETAREVGKSFKDRKEIEKRQEENRKDREKAAAKFREYFPNFVGEPKSKDILKLRLYEQQHGKCLYSGKEIDLGRLNEKGYVEIDHALPFSRTWDDSFNNKVLVLGSENQNKGSKTPYEYFNGKDNSREWQEFKARVETSRFPRSKKQRILLQKFDEDGFKERNLNDTRYVNRFLCQFVANHMRLTGKGKRRVFASNGQITNLLRGFWGLRKVRAENDRHHALDAVVVACSTVAMQQKITYFVHYKEMNAFDGKTIDKETGEVLHQKTHFPQPWEFFAQEVMIRIFGKPDGKPEFEEADTPEKLRTLLAEKLSSRPEAVHEYVTPLFVSRAPNRKMSGAHKDTLRSAKRFVKHNEKISVKRVWLTEIKLADLENMVNYKNGREIELYEALKARLGAYGGNAKQAFDPKDNPFYKKGGQLVKAVRIEKTQESGVLLNKKNAYTIADNGDMVRVDVFCKVDKKGKNQYFIVPIYAWQVAENILPDIDCKGYRIDDSYTFCFSLHKYDLIAFQKDEKSEVEFAYYINCDSSNGRFYLAWHDKGSKEQQFRISTQNLISVEKYQIDELGKEIRPCRLKKRPPVR

SEQ ID NO: 16521 - protein, 1082 aa, unidentified
  REGION 1..1082: note = Cas Enzyme sequence
MTAFKPNPLNYILGLDIGIASVGWAMVEIDDKENPVRLIDLGVRVFERAEVPKTGDSLAAARRLARSVRRLTRRPPPPLPPGRPPVLAQGVLKPEDFDENGFIKLLPNTPWQLRAAALDRRLAPLEWAAVLLHLVKHRGYLSQRKNEGETADKELGALLKGVADNTHTLQAGDFRTPAELALNKFEKESGHIRNQRGDYSHTFSRKDFQAELVLLFKKQKEFGNPHISDGLKEGIETLLMAQRPALSGDAVQKMLGYCTFEPTEPKAAKNTYTAERFIWLTKLNNLRILEQGSERPLTDTQRATLMDEPYRKSKLTYAQARKLLDLDDTAFFKGLRYGKDNAEASTLMEMKAYHAISRALEKEGLKDKKSPLNLSPELLDEIGTVFSLFKTDEDITGRLKDRVQPEILEALLKHISFDKFVQISLKALRRMVPLMEQGKRYDEACAEIYGDHYGKKNTEEEIYLPPIPADEIRNPVVLRALSQARKVINAVVRRYGSPARIHIETAREVGKSFKDRKEIEKRQEENRKDREKAAAKFREYFPNFVGEPKSKDILKLRLYEQQHGKCLYSGKEIDLGRLNEKGYVEIDHALPFSRTWDDSFNNKVLVLGSENQNKDNQTPYEYFNGKDNSREWQEFKARVETSRFPRSKKQRILLQKFDEDGFKERNLNDTRYVNRFLCQFIADHMLLTGKGKRRVFASNGQITNLLRGFWGLRKVRAENDRHHALDAVVVACSTVAMQQKITRFVRYKEMNAFDGKTIDKETGEVLHQKTHFPQPWEFFAQEVMIRVFGKPDGKPEFEEADTPEKLRTLLAEKLSSRPEAVHEYVTPLFVSRAPNRKMSGQGHMETVKSAKRLDEGISVLRVPLTQLKLKDLEKMVNREREPKLYEALKARLEAHKDDPAKAFAEPFYKYDKAGNRTQQVKAVRVEQVQKTGVWVRNHNGIADNATMVRVDVFEKGGKYYLVPIYSWQVAKGILPDRAIIAFKDEEDWQLIDDSFNFKFSLHPNDLIEVITKKARIFGYFASCHRGTGNINIRIHDLDNKVGKNGILEGIGVKTALSFQKYQLDELGKEIRPCRLKKRPSVR

SEQ ID NO: 16522 - protein, 997 aa, unidentified
  REGION 1..997: note = Cas Enzyme sequence
LLKREGVLQAADFDENGLIKSLPNTPWQLRTAALDRKLTPLEWSAVLLHLIKHRGYLSQRKNEGETADKELGALLKGVADNAHALQTSNFRTPAELALNKFEKESGHIRNQRDDYSHTFSRKDLQAELNLLFEKQKEFGNPHVSDGLKEGIETLLMTQRPALSGDAVQKMLGHCTFEPTEPKAAKNTYTAERFIWLTKLNNLRILEQGSERPLTDTERTILINQPYKKKLTYAQARKLLGLEDTAFFKGLHYGKDNAETSTLMEMKAYHAISRALEKEGLKDKKSPLNLSPELQDEIGMAFSLFKTDEDITGRLKDRVQPEILEALLKHINFDKFVQISLKALRRIVPLMEQGKRYDEACAEIYGDHYGKKNTEEKIYLPPIPADEIRNPVVLRALSQARKVINAVVRRYGSPARIHIETAREVGKSFKDRKEIEKRQEENRKDREKAAAKFREYFPNFVGEPKSKDILKLRLYEQQHGKCLYSGKEINLGRLNEKGYVEIDHALPFSRTWDDSFNNKVLVLGSENQNKSNQTPYEYFNGKDNSREWQEFKARVETSRFPRSKKQRILLQKFDEDGFKERNLNDTRYVNRFLCQFIADRMRLTGKGKRRVFASNGQITNLLRGFWGLRKVRAENDRHHALDAVVVACSTVAMQQKITHFVRYKEMNAFDGKTIDKETGEVLHQKAHFPQPWEFFAQEVMIRVFGKPDGKPEFEEADTPEKLRTLLAEKLSSRPEAVHEYVTPLFVSRAPNRKMSGQGHMETVKSAKRLDEGISVLRVPLTQLKLKDLEKMVNREREPKLYEALKARLETHKDDPAKAFAEPFYKYDKAGNRTQQVKAVRVEQVQKTGVWVRNHNGIADNATMVRVDVFEKGGKYYLVPIYSWQVAKGILPNRAVVQGKDEEDWTVMDDSFEFKFVLYANDLIKLTAKKNEFLGYFVSLNRATGAIDIRTHDTDSTKGKNGIFQSVGVKTALSFQKYQIGELGKEIRPCRLKKRPPVR

SEQ ID NO: 16523 - protein, 1080 aa, unidentified
  REGION 1..1080: note = Cas Enzyme sequence
MATFKPNPINYILGLDIGIASVGWAMVEIDEEENPIRLIDLGVRVFERAEVPKTGDSLAAARRLARSVRRLTRRRAHRLLRARRLLKREGVLQAADFDENGLIKSLPNTPWQLRAAALDRKLTPLEWSAVLLHLIKHRGYLSQRKNEGETADKELGALLKGVADNAHALQTGDFRTPAELALNKFEKESGHIRNQRGDYSHTFSRKDLQAELNLLFEKQKEFGNPHVSDGLKEDIETLLMTQRPALSGDAVQKMLGHCTFEPTEPKAAKNTYTAERFIWLTKLNNLRILEQGSERPLTDTERAILINQPYKKKLTYAQARKLLGLEDTAFFKGLRYGEDNAESAILMEMKAYDAISRALEKEGLKDKKSPLNLSPELQDEIGTALSLFKTDEDITGRLKDRVQPEILEALLNISFDKFVQISLKALRKIVPLMEQGKRYDEACAEIYGDHYGKKKTEEKIYLPPIPADEIRNSVVLRALSQARKVINAVVRRYGSPARIHIETAREVGKSFKDRKEIEKRQEENRKDREKAAAKFREYFPNFVGEPKSKDILKLRLYEQQHGKCLYSGKEIDLGRLNEKGYVEIDHALPFSRTWDDSFNNKVLVLGSENQNKGSKTPYEYFNGKDNSREWQEFKARVETSRFPRSKKQRILLQKFDEDGFKERNLNDTRYVNRFLCQFVANHMRLTGKGKRRVFASNGQITNLLRGFWGLRKVRAENDRHHALDAVVVACSTVAMQQKITYFVHYKEMNAFDGKTIDKETGEVLHQKTHFPQPWEFFAQEVMIRIFGKPDGKPEFEEADTPEKLRTLLAEKLSSRPEAVHEYVTPLFVSRAPNRKMSGAHKDTLRSAKRFVKHNEKISVKRVWLTEIKLADLENMVNYKNGREIELYEALKARLGAYGGNAKQAFDPKDNPFYKKGGQLVKAVRIEKTQESGVLLNKKNAYTIADNGDMVRVDVFCKVDKKGKNQYFIVPIYAWQVAENILPDIDCKGYRIDDSYTFCFSLHKYDLIAFQKDEKSEVEFAYYINCDSSNGRFYLAWHDKGSKEQQFRISTQNLISVEKYQIDELGKEIRPCRLKKRPPVR

SEQ ID NO: 16524 - protein, 1031 aa, unidentified
  REGION 1..1031: note = Cas Enzyme sequence
GRLARGARRLPRRRAHRLLRARRLLKREGVLQAADFDENGLIKSLPNTPWQLRAAALDRKLTPLEWSAVLLHLIKHRGYLSQRKNEGETADKELGALLKGVADNAHALQTGDFRTPAELALNKFEKESGHIRNQRGDYSHTFSRKDLQAELVLLFEKQKEFGNPHISDGLKEGIETLLMTQRDSIPDESAILRMQGKCTFEKNKSRAAKHSWSAERFIWLSKLANLRITDEFGTRKLTEIERQILIDLPYKLKTVNYQQVRNALTTLSPNALFNIRYHQKDKKGEIKSSDKIEKDTKFMEMKFWHKIKETLEGNGRKTEWQSLSSNHNLLDEIGTVFTICKNDERRKALLSGKIKEDQDILDILCNHVDFTCTVNLSLEALKNILPFMEQGDDYDTAWRKVYPPQSTKKESVLPPIPADEIRNPVVLRALSQARKVINAVVRRYCSPARIHIETAREVGKSFKDRKEIEKRQEENRKDREKAAAKFREYFPNFVGEPKSKDILKLRLYEQQHGKCLYSGKEINLGRLNEKGYVEIDHALPFSRTWDDSFNNKVLVLGSENQNKGNQTPYEYFNGKDNSREWQEFKARVETSRFPRSKKQRILLQKFDEDGFKERNLNDTRYVNRFLCQFVADHMLLTGKGKRRVFASNGQITNLLRGFWGLRKVRTENDRHHALDAVVVACSTVAMQQKITRFVRYKEMNAFDGKTIDKETGEVLHQKAHFPQPWEFFAQEVMIRVFGKPDGKPEFEEADTPEKLRTLLAEKLSSRPEAVHEYVTPLFVSRAPNRKMSGAHKDTLRSAKRFVKHNEKISVKRVWLTEIKLADLENMVNYKNGREIELYEALKARLGAYGGNAKQAFDPKDNPFYKKGGQLVKAVRVEKTQENGVLLNKKNAYTIADNGDMVRVDVFCKVDKKGKNQYFIVPIYAWQVAENILPDIDCKGYRIDDSYTFCFSFHKYDLIAFQKDEKSKVEFAYYINCDSSNGRFYLAWHDKGSKEQQFRISTQNLVLMQKYQIDELGKEIRPCRLKKRPPVR

SEQ ID NO: 16525 - protein, 1002 aa, unidentified
  REGION 1..1002: note = Cas Enzyme sequence
RARRLLKREGVLQAADFDENGLIKSLPNTPWQLRAAALDRKLTPLEWSAVLLHLIKHRGYLSQRKNEGETADKELGALRAGMKSNTQALKTGNFRTPAELALNKFEKESGHIRNQRGDYSHTFSREDLQAELVLLFEKQKEFGNPHVSDGLKEGIETLLMAQRPALSGDAIQKMLGHCTFEPTEPKAAKNTYTAERFIWLTKLNNLRILEQGSERPLTDTERATLMDEPYRKSKLTYAQVRKLLDLDDTAFFKGLRYGKDNAETSTLMEMKAYHAISRALEKEELKDKKSPLNLSPELQDEIGTAFSLFKTDEDITGSLKDRVQPEILEALLKHISFDKFVQISLKALRRIVPLMEQGKRYDEACAEIYGDHYGKKNTEEEIYLPPIPADEIRNPVVLRALSQARKVINAVVRRYGSPARIHIETAREVGKSFKDRKEIEKRQEENRKDREKAAAKFREYFPNFVGEPKSKDILKLRLYEQQHGKCLYSGKEINLGRLNEKGYVEIDHALPFSRTWDDSFNNKVLVLGSENQNKSNQTPYEYFNGKDNSREWQEFKARVETSRFPRSKKQRILLQKFDEDGFKERNLNDTCYVNRFLCQFITDRMRLTGKGKRRVFASNGQITNLLRGFWGLRKVRAENDRHHALDAVVVACSTVAMQQKITHFVHHKEMNAFDGKTIDKETGEVLHQKTHFPQPWEFFAQEVMLRVFGKPDGKPEFEEADTPEKLRALLAEKLSSRPEAVHEYVTPLFVSRAPNRKMSGQGHMETVKSAKRLNEGISVLRVPLTQLKLKDLEKMVNREREPKLYEALKARLKAHKDDPAKAFAEPFYKYDKAGNRTQQVKAVRIEQVQKTGVWVRNHNGIADNATMVRVDVFEKGGKYYLVPIYSWQVAKGILPDRAVVAYADEEDWTVIDESFRFKFVLYSNDLIKVTAKKNVFFGYFVSLNRATGAIDIRVHDTDNTKGKNGIFQSVGIKTALSFQKYQIDELGKEIRPCRLKKRPPVR

SEQ ID NO: 16526 - protein, 981 aa, unidentified
  REGION 1..981: note = Cas Enzyme sequence
FIKLLPNTPWQLRAAALDRRLAPLEWAAVLLHLVKHRGYLSQRKNEGETADKELGALLKGVADNTHTLQAGDFRTPAELALNKFEKESGHIRNQRGDYSHTFSRKDFQAELVLLFKKQKEFGNPHISDGLKEGIETLLMAQRPALSGDAVQKMLGYCTFEPTEPKAAKNTYTAERFIWLTKLNNLRILEQGSERPLTDTQRATLMDEPYRKSKLTYAQARKLLDLDDTAFFKGLRYGKDNAEASTLMEMKAYHAISRALEKEGLKDKKSPLNLSPELLDEIGTVFSLFKTDEDITGRLKDRVQPEILEALLKHISFDKFVQISLKALRRMVPLMEQGKRYDEACAEIYGDHYGKKNTEEEIYLPPIPADEIRNPVVLRALSQARKVINAVVRRYGSPARIHIETAREVGKSFKDRKEIEKRQEENRKDREKAAAKFREYFPNFVGEPKSKDILKLRLYEQQHGKCLYSGKEIDLGRLNEKGYVEIDHALPFSRTWDDSFNNKVLVLGSENQNKDNQTPYEYFNGKDNSREWQEFKARVETSRFPRSKKQRILLQKFDEDGFKERNLNDTRYVNRFLCQFIADHMLLTGKGKRRVFASNGQITNLLRGFWGLRKVRAENDRHHALDAVVVACSTVAMQQKITRFVRYKEMNAFDGKTIDKETGEVLHQKTHFPQPWEFFAQEVMIRVFGKPDGKPEFEEADTPEKLRTLLAEKLSSRPEAVHEYVTPLFVSRAPNRKMSGQGHMETVKSAKRLDEGISVLRVPLTQLKLKDLEKMVNREREPKLYEALKARLEAHKDDPAKAFAEPFYKYDKAGNRTQQVKAVRVEQVQKTGVWVRNHNGIADNATMVRVDVFEKGGKYYLVPIYSWQVAKGILPDRAIIAFKDEEDWQLIDDSFNFKFSLHPNDLIEVITKKARIFGYFASCHRGTGNINIRIHDLDHKIGKNGILEGIGVKTALSFQKYQIDELGKEIRPCRLKKRPPVR

SEQ ID NO: 16527 - protein, 1082 aa, unidentified
  REGION 1..1082: note = Cas Enzyme sequence
MAAFKPNPINYILGLDIGIASVGWAMVEIDEEENPIRLIDLGVRIFERAEVPKTGDSLAMARRLARSVRRLTRRRAHRLLRARRLLKREGVLQAADFDENGLIKSLPNTPWQLRAAALDRKLTPLEWSAVLLHLIKHRGYLSQRKNEGETADKELGALLKGVADNAHTLQTGDFRTPAELALNKFEKESGHIRNQRGDYSHTFSRKDLQAELNLLFEKQKEFGNPHVSDGLKEGIDTLLITQRPALSGDAVQKMLGHCTFEPAEPKAAKNTYTAERFIWLTKLNNLRILKQGSERPLTDTERATLMDEPYRKSKLTYAQARKLLDLDDTAFFKGLRYGKDNAEASTLMEMKAYHAISRALEKEGLKDKKSPLNLSPELQDEIGTAFSLFKTDEDITGRLKDRVQPEILEVLLKHISFDKFVQISLKALRRIVPLMEQGKRYDEACAEIYGDHYGKKNVEEKIYLPPIPADEIRNPVVLRALSQARKVINGVVRRYGSPARIHIETAREVGKSFKDRKEIEKRQEENRKDREKAAAKFREYFPNFVGEPKSKDILKLRLYEQQHGKCLYSGKEINLGRLNEKGYVEIDHALPFSRTWDDSFNNKVLVLSSENQNKSNQTPYEYFNGKGNSREWQEFKARVETSRFPRSKKQRILLQKFDEDGFKERNLNDTRYVNRFLCQFVADHMLLTGKGKRRVFASNGQITNLLRGFWGLRKVRAENDRHHALDAVVVACSTVAMQQKITRFVRYKEMNAFDGKTIDKETGEVLHQKAHFPQPWEFFAQEVMIRVFGKPDGKPEFEEADTPEKLRTLLAEKLSSRPEAVHEYVTPLFVSRAPNRKMSGAHKDTLRSAKRFVKHNEKISVKQVWLTEIKLADLENMVNYKNGREIELYEALKARLEAYGGNAKQAFDPKDNPFYKKGGQLVKAVRVEKTQESGVLLNKKNAYTIADNGDMVRVDVFCKVDKKGKNQYFIVPIYAWQVAENILPDIDCKGYRIDDSYTFCFSLHKYDLIAFQKDEKSKVEFAYYINCDSSNGRFYLAWHDKGSKEQQFRISTQNLVLIQKYQVDELGKEIRPCRLKKRPPVR

SEQ ID NO: 16528 - protein, 1081 aa, unidentified
  REGION 1..1081: note = Cas Enzyme sequence
MAVFKPNPMNYILGLDIGIASVGWAMVEIDEEENPIRLIDFGVRVFERAEVPKTGDSLAMARRLARSVRRLTRRRAHRLLRARRLLKREGILQAADFDENGLIKSLPNTPWQLRAAALDRKLMPLEWSAVLLHLIKHRGYLSQRKNEGETADKELGALLKGVADNAHTLQTGDFRTPAELALNKFEKESGHIRNQRGDYSHTFSRKDLQAELNLLFEKQKKFGNPHVSDGLKEGIETLLMTQRPALSGDAVQKMLGHCTFEPTEPKAAKNTYTAERFVWLTKLNNLRILEQGSERPLTDTERATLMDEPYRKSKLTYAQARKLLDLDDTAFFKGLRYGKDNAEASTLMEMKAYHAISRALEKEGLKDKKSPLNLSPELQDEIGTAFSLFKTDEDITGRLKDRVQPEILEALLKHISFDKFVQISLKALRRIVPLMEQGKRYDEACAEIYGDHYGKKNTEEKIYLPPIPADEIRNPVVLRALSQARKVINGVVRRYGSPARIHIETAREVGKSFKDRKEIEKRQEENRKDRKKAAAKFREYFPNFVGEPKSKDILKLRLYEQQHGKCLYSGKEINLGRLNEKGYVEIDHALPFSRTWDDSFNNKVLVLGSENQNKSNQTPYEYFNGKGNSREWQEFKARVETSRFPRSKKQRILLQKFDEDGFKERNLNDTRYVNRFLCQFVADHMRLTGKGKRRVFASNGQITNLLRGFWGLRKVRAENDRHHALDAVVVACSTVAMQQKITRFVRYKEMNAFDGKTIDKETGEVLHQKTHFPQPWEFFAQEVMIRVFGKPDGKPEFEEADTPEKLRTLLAEKLSSRPEAVHEYVTPLFVSRAPNRKMSGQGHMETVKSAKRLDEGVSVLRVPLTQLKLKDLEKMVNREREPKLYEALKARLEAHKDDPAKAFAEPFYKYDKAGNRTQQVKAVRVEQVQKTGVWVRNHNGIADNATMVRVDVFEKDGKYYLVPIYSWQVAKGILPDRAVVQGKDEEDWSVMDESFEFKFVLYANDLIKVQLKKDSFFGYFIGLDRATGQISLRHHDLDKSKGKDGIYRIGVKTALSFQKYQIDELGKEIRPCRLKKRPPVR

SEQ ID NO: 16529 - protein, 1010 aa, unidentified
  REGION 1..1010: note = Cas Enzyme sequence
RRRAHRLLRARRLLKREGVLQAADFDENGLIKSLPNTPWQLRAAALDRKLTPLEWSAVLLHLIKHRGYLSQRKNEGETADKELGALLKGVADNAHALQTGNFRTPAELALNKFEKESGHIRNQRGDYSHTFSREDLQAELVLLFEKQKEFGNPHISDGLKEGIETLLMTQRTALSGDAVQKMLGYCTFEPTEPKAAKNTYTAERFVWLTKLNNLRILEQGNERPLTDTERATLMDEPYRKSKLTYAQARKLLELDDTAFFKGLRYGKDNAEASTLMEMKAYHAISRALEKEGLKDKKSPLNLSPELQDEIGTAFSLFKTDEDITGRLKDRVQPEILEALLKHISFDKFVQISLKALRRIVPLMEQGKRYDEACAEIYGDHYGKKNTEEEIYLPPIPADEIRNPVVLRALSQARKVINGVVRRYGSPARIHIETAREVGKSFKDRKEIEKRQEENRKDREKAAAKFREYFPNFVGEPKSKDILKLRLYEQQHGKCLYSGKEINLGRLNEKGYVEIDHALPFSRTWDDSFNNKVLVLGSENQNKGNQTPYEYFNGKDNSREWQEFKARVETSRFPRSKKQRILLQKFDEDGFKERNLNDTRYVNRFLCQFIADHMRLTGKGKRRVFASNGQITNLLHVFWGLRKVRAENDRHHALDAVVVACSTVAMQQKITRFVRYKEMNAFDGKTIDKETGEVLHQKAHFPQPWEFFAQEVMIRVFGKLDGKPEFEEADTPEKLRTLLAEKLSSRPEAVHEYVTPLFVSRAPNRKMSGAHKDTLRSAKRFVKHNEKISVKRVWLTEIKLADLENMVNYKNGREIELYDALKARLEKYGGNAKQAFDPNNNPFYKKGGQLVKAVRVEKTQESGVLLNKKNAYTIADNGDIVRVDVFCKADKKGKNQYFIVPIYAWQVAENILPDIDCKGYRIDDSYTFCFSLHKYDLITFQKDEKSKVEFAYYINCDSSDGRFYLAWHDKGSKEQQFRISTQNLVLMQKYQIDELGKEIRPCRLKKRPPVR

SEQ ID NO: 16530 - protein, 1114 aa, unidentified
  REGION 1..1114: note = Cas Enzyme sequence
LYINKEVICSFYLHVNTFFRYIDVVVYEIVEKQMTAFKPNPLNYILGLDIGITSVGWAMVEIDNEENPIRLIDLGVRVFERAEVPKTGDSLAAARRLARSIRRLIRRRAHRLLRARRLLKHEGVLRSEDFDENGFIKLLPNTPWQLRAAALDRKLMPLEWAAVLLHLVKHRGYLSQRKNEEQTADKELGALREGMKSNTQALQTGNFRTPAELALNKFEKESGHIRNQRGDYSHTFSRKDLQAELVLLFEKQKEFGNPYVSDDLKNGIENLLMTQRPALSGDAIQKMLGHCTFEPAEPKAAKNTYTAERFIWLTKLNNLRILNQGSERPLTDTERATLMEAPYTKKLTYAQARKLLGLDDTAFFKGLRYGKDNAESATLMEMKAYHAISRALEKEGLKDKKSPLSISPELQDEIGTAFSLFKTDEDITGRLKDCLQPEILDALLKHISFDKFVQISLKALRRIVPLMEQGKRYDEACAEIYGDHHGRRNSEETLYLPPIPADEIRNPVVLRALSQARKVINGVVRRYGSPVRIHIETAREVGKSFKDRKEIEKRQEENRKDREKAAAEFQEYFPNFVGEPKSKDILKLRLYRQQNCKCLYSGKEINLGRLNEKGYVEIDHALPFSRTWDDSFNNKVLVLGSENQNKGNRTPYEYLNGKDNSREWQEFKARVETSRFPRGKKQRILLQKFDEGEFKKRNLNDTRYINRFLCQFVAGHMRLLSDGENRVFASNGQITNLLRGFWGLRKVRAENDRHHALDAVVVACSTVAMQQRITRFVRYKEMNAFDGKTVDKETGEVLHQKTHFPQPWEFFTQEVMIRVFGKLGGKPEFEEADTPEKLRALLAEKLPSRPEAVHEYVAPLFVSRAPNRKMSGAHKDTLRSAKRFVKHNEKISVKRVWLTDIKLADLENMVNYKNGREIELYETLKARLEKYGGNAKQAFDPKDNPFYKKGGQLVKAVRVEKTQESGVLLNKNNAYTIADNGDMVRADVFCKTDKKGKNQYFIVPIYAWQVAENILPDIDCKGYRIDDSYTFCFSLHKYDLMAFQKDEKSKVEFAYYINCDSSDGRFYLAWHDKGAKEQQFRISTQNLVLMEKYQIDELGKEIRPCRLKKRPPVR

SEQ ID NO: 16531 - protein, 1081 aa, unidentified
  REGION 1..1081: note = Cas Enzyme sequence
MTAFKPNPINYILGLDIGIASVGWAMVEIDEEENPIRLIDLGVRVFERAEVPKTGDSLAAARRLARSVRRLTRRRAHRLLRARRLLKREGVLQAADFDENGLIKSLPNTPWQLRAAALDRKLTPLEWSAVLLHLIKHRGYLSQRKNEGETADKELGALLKGVADNAHALQTGDFRTPAELALNKFEKESGHIRNQHGDYSHTFSRKDLQAELNVLFEKQKEFGNPHVSDGLKEGIKTLLMTQRPALSGDAVQKMLGHCAFEPTEPKAAKNTYTAERFVWLTKLNNLRILEQGNERPLTDTERATLMDEPYRKSKLTYAQARKLLDLDDTAFFKGLRYGKDNAEASTLMEMKAYHAISRALEKEGLKDKKSPLNLSPELQDEIGTAFSLFKTDEDITGRLKDRVPPEILEALLKHISFDKFVQISLKALRRIVPLMEQGKRYDEACAEIYGDHYGKKNAEEKIYLPPIPADEIRNPVVLRALSQARKVINGVVRRYGSPARIHIETAREVGKSFKDRKEIEKRQEENRKDREKAAAKFREYFPNFVGEPKSKDILKLRLYEQQHGKCLYSGKEINLGRLNEKGYVEIDHALPFSRTWDDSFNNKVLVLGSENQNKGNQTPYEYFNGKDNSREWQEFKARVETSRFPRSKKQRILLQKFDEDGFKERNLNDTRYVNRFLCQFVADRMRLTGKGKRRVFASNGQITNLLRGFWGLRKVRAENDRHHALDAVVVACSTVAMQQKITRFVRYKEMNAFDGKTIDKETGEVLHQKTHFPQPWEFFAQEVMIRVFGKPDGKPEFEEADTPEKLRTLLAEKLSSRPEAVHEYVTPLFVSRAPNRKMSGQGHMETVKSAKRLDEGISVLRVPLTQLKLKDLEKMVNREREPKLYEGLKARLEAHKDDPAKAFAEPFYKYDKAGNRTQQVKAVRVEQVQKTGVWVRNHNGIADNATMVRVDVFEKGGKYYLVPIYSWQVAKGILPDRAVVAYADEEDWTVIDESFRFKFVLYANDLIKVRLKKDSFLGYFSGLDRATGAISLREHDMEKSKGKDGIYRIGVKTALSFQKYQIDELGKEIRPCRLKKHPPVR

SEQ ID NO: 16532 - protein, 1102 aa, unidentified
  REGION 1..1102: note = Cas Enzyme sequence
MEILTWDIFILTKHHITEKLMAAFKPNPINYILGLDIGISSVGWAMVEIDDAENPIRLIDLGVRVFERAEVPKTGDSLAAARRLARSVRRLTRRRAHRLLRARRLLKREGVLQAADFDENGLIKSLPNIPWQLRAAALDRKLTPLEWSAVLLHLIKHRGYLSQRKNEGETADKELGALLKGVADNAHALQTGDFRTPAELALNKFEKESGHIRNQRGDYSHTFSRKDLQAELVLLFEKQKEFGNPHISDGLKEGIETLLMAQRPALSGDAVQKMLGYCTFEPTEPKAAKNTYTAERFIWLTKLNNLRILEQGSERPLTDTERATLMDEPYRKSKLTYAQARKLLDLDDTAFFKGLRYGKDNTEASTLMEMKAYHAISRALEKEGLKDKKSPLNLSPELQDEIGTAFSLFKTDEDITGRLKDRVQPEILEALLKHINFDKFVQVSLKALRRIVPLMEQGKRYDEACAEIYGDHYGKKNTEEKIYLPPIPADEIHNPVVLRALSQARKVINGVVRRYGSPARIHIETAREVGKSFKDRKEIEKRQEENRKDREKAAAKFREYFPNFVGEPKSKDILKLRLYEQQHGKCLYSGKEINLGRLNEKGYVEIDHALPFSRTWDDSFNNKVLVLGSENQNKGNQTPYEYFNGKDNSREWQEFKARVETSRFPRSKKQRILLQKFDEDGFKERNLNDTRYVNRFLCQFVADHMRLTGKGKRRVFASNGQITNLLRGFWGLRKVRAENDRHHALDAVVVACSTVAMQQKITRFVRYKEMNAFDGKTIDKETGEVLHQKTHFPQPWEFFAQEVMIRVFGKPDGKPEFEEADTPEKLRTLLAEKLSSRPEAVHEYVTPLFVSRAPNWKMSGAHKDTLRSAKRFVKHNEKISVKRVWLTDIKLVDLENMVNYKNGREIELYDALKARLEKYGGNAKQAFDPKDNPFYKKGGQLVKAVRVEKTQESGVLLNKKHAYTIADNGDMVRVDVFCKVDKKGKNQYFIVPIYAWQVAENILPDIDCKGYRIDDSYTFCFSLHKYDLIAFQKDEKSKVEFAYYINCDSSNGRFYLAWHDKGSKEQQFRISTQNLVLMQKYQIDELGKEIRPCRLKKRPPVR

SEQ ID NO: 16533 - protein, 1082 aa, unidentified
  REGION 1..1082: note = Cas Enzyme sequence
MAAFKPNPINYIIGLDIGIASVGWAMVEIDEEENPIRLIDLGVRVFERAEVPKTGDSLAAARRLARSVRRLTRRRAHRLLRARRLLKREGVLQAADFDENGLIKSLPNTPWQLRAAALDRKLTPLEWSAVLLHLIKHRGYLSQRKNEGETADKELGALLKGVADNAHALQTGDFRTPAELALNKFEKESGHIRNQRGDYSHTFSRKDLQAELVLLFEKQKEFGNPHISDGLKEGIETLLMAQRPALSGDAVQKMLGYCTFEPTEPKAAKNTYTAERFIWLTKLNNLRILEQGSERPLTDTERATLMDEPYRKSKLTYAQARKLLDLDDTAFFKGLRYGKDNTEASTLMEMKAYHAISRALEKEGLKDKKSPLNLSPELQDEIGTAFSLFKTDEDITGRLKDRVQPEILEALLKHINFDKFVQVSLKALRRIVPLMEQGKRYDEACAETYGDHYGEKNSEEMLYLPPIPADEIRNPVVLRALSQARKVINSVVRRYGSPARIHIETAREVGKSFKDRKEIEKRQEENRKDREKAAAKFREYFPNFVGEPKSKDILKLRLYEQQHGKCLYSGKEINLGRLNEKGYVEIDHALPFSRTWDDSFNNKVLVLGSENQNKGNQTPYEYFNGKDNSREWQEFKARVETSRFPRSKKQRILLQKFDEDGFKERNLNDTRYVNRFLCQFVADHMLLTGKGKRRVFASNGQITNLLRGFWGLRKVRTENDRHHALDAVVVACSTVAMQQKITRFVRYKEMNAFDGKTIDKETGEVLHQKAHFPQPWEFFAQEVMIRVFGKPDGKPEFEEADTPEKLRTLLAEKLSSRPEAVHEYVTPLFVSRAPNRKMSGAHKDTLRSAKRFVKHNEKISVKRVWLTEIKLADLENMVNYKNGREIELYEALKARLGAYGGNAKQAFDPKDNPFYKKGGQLVKAVRVEKTQESGVLLNKKNAYTIADNGDMVRVDVFCKVDKKGKNQYFIVPIYAWQVAENILPDIDCKGYRIDDSYTFCFSLHKYDLIAFQKDEKSKVEFAYYINCDSSNGRFYLAWHDKGSKEQQFRISTQNLVLMQKYQIDELGKEIRPCRLKKRPPVR

SEQ ID NO: 16534 - protein, 1081 aa, unidentified
  REGION 1..1081: note = Cas Enzyme sequence
MTAFKPNPLNYILGLDIGIASVGWAMVEIDDKENPIRLIDLGVRVFERAEVPKTGDSLAAARRAARSIRRLIRRRAHRLLRARRLLKHEGVLKPEDFDENGFIKLLPNTPWQLRAAALDRRLAPLEWAAVLLHLVKHRGYLSQRKNEEQTADKELGALLKGVADNTHALQAGNFRIPAELALNKFEKESGHIRNQRGDYSHTFSRKDLQAELVLLFEKQKEFGNPHVSDDLKNGIENLLMTQRPALSGDAIQKMLGHCTFELAEPKAAKNTHTTERFIWLTKLNNLRILNQGSERPLTDTERAMLMDEPYKKSKLTYAQVRKLLGLDDTAFFKGLRYGKDNAESATLMEMKAYHAISRALEKEGLKDKKSPLSLSPELQDEIGTAFSLFKTDEDITGRLKDCLQPEILDALLKHISFDKFVQISLKALSRIVPLMEQGKRYDEACAETYGDHYGEKNSEEMLYLPPIPADEIRNPVVLRALSQARKVINAVVRRYGSPARIHIETAREVGKSFKDRKEIEKRQEENCKDREKAAAEFQEYFPNFVGEPKSKDILKLRLYRQQNCKCLYSGKEIDLTRLNEKGYVEIDHALPFSRTWDDSFNNKVLVLGSENQNKGNRTPYEYLNGKDNSREWLEFKARVETSRFPHSKKQRILLQKFDEEGFKERNLNDTRYVNRFLCQFVADHMHLTGKGKRRVFASNGQITNLLRGFWGLHKVRAENDRHHALDAVVVACSTVAMQQKITRFVRYKEMNAFDGKTIDKETGEVLHQKTHFPQPWDFFAQEVMIRVFGKPDGKPEFEEADTPEKLRALLAEKLSSRPEAVHEYVTPLFVSRAPNRKMSGQGHMETVKSAKRLNEGISVLRVPLTQLKLKDLEKMVNREREPKLYEALKARLEAHKDDPTKAFIEPFYKHDKAGNPTQQVKAVRIEQVQKTGVWVRNQNGIADNATMVRVDVFEKAGKYYLVPIYSWQVAKGILPDRAVVAYADEENWTVMDESFEFRFALYSNDLIKVQLKKDSFLGYFSGLDRATGAISLREHDLEKSKGKDGMHRIGVKTALSFQKYQIDELGKEIRPCRLKKRPPVR

SEQ ID NO: 16535 - protein, 1034 aa, unidentified
  REGION 1..1034: note = Cas Enzyme sequence
LRHERIMVKCYRLAPCPVPRMGLLNRPAHPLLRARRLLKHEGVLNPEDFNENGFIKLLPNTPWQLRTAALDRKLTPLEWAAVLLHLVKHRGYLSQRKNEGETDDKELGALLKGVADNTHALQAGNFRTPAELALNKFEKESGHIRNQRGDYSHTFSRKDLQAELVLLFEKQKEFGNPHVSDDLKNGIENLLMTQRPALSGDAIQKMLGHCTFEPAEPKAAKNTYTAERFIWLTKLNNLRILNQGNERPLTDAERTTLMDEPYKKSKLTYAQARKLLGLDDTAFFKGLRYGKDNAESATLMEMKAYHAISRALEKEGLKDKKSPLSLSPELQDEIGTAFSLFKTDEDITGRLKDCLQPEILDALLKHISFDKFIQISLKALRRIVPLMEQGKRYNEACAEIYGDHYGEKNSEEMLYLPPISADEIRNPVVLRALSQARKVINAVVRRYGSPARIHIETAREVGKSFKDRKEIEKRQEENRKDREKAAAKFREYFPNLVGEPKSKDILKLRLYEQQHGKCLYSGKEIDLGRLNEKGYVEIDHALPFSRTWDDSFNTKELVLGSENQNKGNRTPYEYLNGKDNSREWLEFKARVETSRFPHSKKQRVLLQKFDEEGFKERNLNDTRYVNRFLCQFVADHMHLTGKGKRRVFASNGQITNLLRGFWGLHKVRAENDRHHALDAVVVACSTVAMQQKITRFVRYKEMNAFDGKTIDKETGEVLHQKTHFPQPWKFFTQEVMIRVFGKPDGEPEFEEADTPEKLRALLAEKLPSRPEAIHEYVMPLFVSRAPNRKMSGQGHMETVKSVKRLNEGISVLRVPLTQLKLKDLEKMVNREREPKLYAGLKARLEAHKDDPVKAFAEPFYKHDKAGNRTQQVKAVRVEQVQKTGVWVRNRNGIADNATMVRVDVFEKAGKYYLVPIYSWQVAKGILPDRAVVAYAEEENWTVMDESFKFKFVLYANDLIKLTAKKNEFLGYFVSLNRATGAIDIRTHDTDSTKGKNGIFQSVGVKTALSFQKYQIDELGKEIRLCRLKKRPPVR

SEQ ID NO: 16536 - protein, 1024 aa, unidentified
  REGION 1..1024: note = Cas Enzyme sequence
LVSAVGAFGSSRCRALPRTHRLLRARRLLKHEGVLKPEDFDENGFIKLLPNTPWQLRAAALDRRLAPLEWAAVLLHLVKHRGYLSQRKNEGETADKELGALLKGVADNTLALQAGDFRTPAELALNKFEKESGHIRNQRGDYSHTFSRKDLQAELVLLFEKQKEFGNPYVSDDLKNGIENLLMTQRPALSGDAIQKMLGHCTFEPAEPKAAKNSYTAERFIWLTKLNNLRILNQGNERPLTDVERTTLMDEPYKKSKLTYAQARKLLDLNDTAFFKGLRYGKDNAESATLMEMKAYHAISRALEKEGLKDKKSPLSFSPELQDEIGTAFSLFKTDEDITGRLKDCLQPEILDALLKHISFDKFVQISLKALRRIVPLMEQGKRYDEACAEIYGDHYGEKNSEETLYLPPIPADEIRNPVVLRALSQARKVINGVVRRYGSPARIHIETAREVGKSFKDRKEIEKRQEENRKDREKAAAKFREYFPNFVGEPKSKDILKLRLYEQQHGKCLYSGKVIDIRRLNEKGYVEIDHALPFSRTWDDSFNNKVLVLGSENQNKGNRTPYEYLNGKDNSREWLEFKARVETSRFPHSKKQRILLQKFDEEGFKERNLNDTRYVNRFLCQFVADHMHLTGKGKRRVFASNGQITNLLRGFWGLHKVRAENDRHHALDAVVVACSTVAMQQKITRFVRYKEMNAFDGKTIDKETGEVLHQKTHFPQPWDFFAQEVMIRVFGKPDGKPEFEEADTPEKLRALLAEKLSSRPEAVHEYVTPLFVSRAPNRKMSGQGHMETVKSAKRLNEGISVLRVPLTQLKLKDLEKMVNREREPKLYEALKARLEAHKDDPTKAFIEPFYKHDKAGNPTQQVKAVRIEQVQKTGVWVRNQNGIADNATMVRVDVFEKAGKYYLVPIYSWQVAKGILPDRAVVAYADEENWTVMDESFEFRFALYSNDLIKVQLKKDSFLGYFSGLDRATGAISLREHDLEKSKGKDGMHRIGVKTALSFQKYQIDELGKEIRPCRLKKRPPVR

SEQ ID NO: 16537 - protein, 1021 aa, unidentified
  REGION 1..1021: note = Cas Enzyme sequence
AGRWAGGAGRLPRRRAHRLLRARRLLKHEGVLKPEDFDENGFIKLLPNTPWQLRAAALDRRLAPLEWAAVLLHLVKHRGYLSQRKNEGETADKELGALLKGVADNTLALQAGDFRTPAELALNKFEKESGHIRNQRGDYSHTFSRKDLQAELVLLFEKQKEFGNPYVSDDLKNGIENLLMTQRPALSGDAIQKMLGHCTFEPAEPKAAKNSYTAERFIWLTKLNNLRILNQGNERPLTDVERTTLMDEPYKKSKLTYAQARKLLDLNDTAFFKGLRYGKDNAESATLMEMKAYHAISRALEKEGLKDKKSPLSFSPELQDEIGTAFSLFKTDEDITGRLKDCLQPEILDALLKHISFDKFVQISLKALRRIVPLMEQGKRYDEACAEIYGDHYGEKNSEEPLYLPPIPADEIRNPVVLRALSQARKVINGVVRRYGSPARIHIETAREVGKSFKDRKEIEKRQEENRKDREKAAAKFREYFPNFVGEPKSKDILKLRLYEQQHGKCLYSGKVIDIRRLNEKGYVEIDHALPFSRTWDDSFNNKVLVLGSENQNKGNRTPYEYLNGKDNSREWLEFKARVETSRFPHSKKQRILLQKFDEEGFKERNLNDTRYVNRFLCQFVADHMHLTGKGKRRVFASNGQITNLLRGFWGLHKVRAENDRHHALDAVVVACSTVAMQQKITRFVRYKEMNAFDGKTIDKETGEVLHQKTHFPQPWDFFAQEVMIRVFGKPDGKPEFEEADTPEKLRALLAEKLSSRPEAVHEYVTPLFVSRAPNRKMSGQGHMETVKSAKRLNEGISVLRVPLTQLKLKDLEKMVNREREPKLYEALKARLEAHKDDPTKAFIEPFYKHDKAGNPTQQVKAVRIEQVQKTGVWVRNQNGIADNATMVRVDVFEKAGKYYLVPIYSWQVAKGILPDRAVVAYADEENWTVMDESFEFRFALYSNDLIKVQLKKDSFLGYFSGLDRATGAISLREHDLEKSKGKDGMHRIGVKTALSFQKYQIDELGKEIRPCRLKKRPPVR

SEQ ID NO: 16538 - protein, 997 aa, unidentified
  REGION 1..997: note = Cas Enzyme sequence
MHISEGVLKPEDFDENGFIKLLPNTPWQLRAAALDRRLAPLEWAAVLLHLVKHRGYLSQRKNEGETADKELGALLKGVADNAHALQAGDFRTPAELALNKFEKESGHIRNQRGDYSHTFSRKDLQAELVLLFEKQKEFGNPHVSDDLKNGIENLLMTQRPALSGDAIQKMLGHCTFEPAEPKAAKNTYTAERFIWLTKLNNLRILNQGNERPLTDAERTTLMDEPYKKSKLTYAQARKLLDLDDTAFFKGLRYGKDNAESATLMEMKAYHAISRALEKEGLKDKKSPLSISPELQDEIGTAFSLFKTDEDITGRLKGCLQSEILDALLKHISFDKFVQISLKALRRIVPLMEQGKRYDEACAEIYGDHHGRKNSEETLYLPPIPADEIRNPVVLRALSQARKVINAVVRRYGSPARIHIETAREVGKSFKDRKEIEKRQEENRKDREKAAAKFREYFPNFVGEPKSKDILKLRLYEQQHGKCLYSGKVIDIRRLNEKGYVEIDHALPFSRTWDDSFNNKVLVLGSENQNKGNRTPYEYFNGKDNSREWLEFKARVETSRFPHSKKQRVLLQKFDEEGFKERNLNDTRYVNRFLCQFVADHMQLTGKGKRRVFASNGQITNLLRGFWGLHKVRAENDRHHALDAVVVACSTVAMQQRITRFVRYKEMNAFDGKTVDKETGEVLHQKTHFPQPWEFFTQEVMIRVFDKPDGEPEFEEADTPEKLRALLAEKLPSRPEAIHEYVMPLFVSRAPNRKMSGQGHMETVKSAKRLNEGISVLRVPLTQLKLKDLEKMVNREREPKVYAGLKARLEAHKDDPAKAFAEPFYKHDKAGNPTQQVKAVRIEQVQKTGVLVRNRNGVADNATMVRVDVFEKAGKYYLVPIYSWQVAKGILPDRAVVAYADEENWTVMDESFEFRFALYSNDLIKVQLKKDSFLGYFSGLDRATGAISLREHDLEKSKGKDGMHRIGVKTALSFQKYQIDELGKEIRPCRLKKRPPVR

SEQ ID NO: 16539 - protein, 1082 aa, unidentified
  REGION 1..1082: note = Cas Enzyme sequence
MAAFKPNPINYILGLDIGIASVGWAMVEIDEEENPIRLIDLGVRVFERAEVPKTGDSLAAARRLARSVRRLTRRRAHRLLRARRLLKREGVLQAADFDENGLIKSLPNTPWQLRAAALDRKLTPLEWSAVLLHLIKHRGYLSQRKNEGETADKELGALLKGVADNAHALQTGDFRTPAELALNKFEKESGHIRNQRGDYSHTFSRKDLQAELVLLFEKQKEFGNPHISDGLKEGIETLLMAQRPALSGDAVQKMLGYCTFEPTEPKAAKNTYTAERFIWLTKLNNLRILEQGSERPLTDTERATLMDEPYRKSKLTYAQARKLLDLDDTAFFKGLRYGKDNTEASTLMEMKAYHAISRALEKEGLKDKKSPLNLSPELQDEIGTAFSLFKTDEDITGRLKDRVQPEILEALLKHINFDKFVQVSLKALRRIVPLMEQGKRYDEACAEIYGDHYGKKNTEEKIYLPPIPADEIHNPVVLRALSQARKVINGVVRRYGSPARIHIETAREVGKSFKDRKEIEKRQEENRKDREKAAAKFREYFPNFVGEPKSKDILKLRLYEQQHGKCLYSGKEINLGRLNEKGYVEIDHALPFSRTWDDSFNNKVLVLGSENQNKGNQTPYEYFNGKDNSREWQEFKARVETSRFPRSKKQRILLQKFDEDGFKERNLNDTRYVNRFLCQFVADHMRLTGKGKRRVFASNGQITNLLRGFWGLRKVRAENDRHHALDAVVVGCSTVAMQQKITRFVRYKEMNAFDGKTIDKETGEVLHQKTHFPQPWEFFAQEVMIRVFGKPDGKPEFEEADTPEKLRTLLAEKLSSRPEAVHEYVTPLFVSRAPNRKMSGQGHMETVKSAKRLDEGISVLRVPLTQLKLKDLEKMVNREREPKLYEGLKARLEAHKDDPAKAFAEPFYKYDKAGNRTQQVKAVRVEQVQKTGVWVRNHNGIADNATMVRVDVFEKGGKYYLVPIYSWQVAKGILPDRAVVAYADEEDWTVIDENFRFKFVLYSNDLIKVTAKKNVFFGYFVSLNRATGAIDIRVHDTDSTKGKNGIFQSVGVKTALSFQKYQIDELGKEIRPCRLKKRPPVR

SEQ ID NO: 16540 - protein, 1112 aa, unidentified
  REGION 1..1112: note = Cas Enzyme sequence
LHVNAFFRYIAVVVYEIAEKQMTAFKPNPLNYILGLDIGIASVGWTIVEIDDKENPIRLIDLGVRVFERAEVPKTGDSLAAARRSARSIRRLIRRRAHRLLRARRLLKHEDVLKPEDFDENGFIKLLPNTPWQLRAAALDRRLAPLEWAAVLLHLVKHRGYLSQRKNEEQTADKELGALLKGVADNTHALQAGNFRTPAELALNKFEKESGHIRNQRGDYSHTFSRKDLQAELVLLFEKQKKFGNPYVSDDLKNGIENLLMTQRPALSGDAIQKMLGHCTFEPAEPKAAKNTYTAERFIWLAKLNNLRILNQGSERPLTDTERAMLMDEPYKKSKLTYAQVRKLLGLDDTAFFKGLRYGKDNAESATLMEMKAYHAISRALEKEGLKDKKSPLSLSPELQDEIGTAFSLFKTDEDITGRLKGCLQPEILDALLKHISFDKFVQISLKALRRIVPLMEQGKRYDEACAETYGDHYGEKNSEEMLYLPPIPADEIRNPVVLRALSQARKVINAVVRRYGSPARIHIETAREVGKSKDERDKLDRQNNERKNDRDRRIKDIQKYFGFDPKPKDILKLRLYEEQNGKCLYSNLKSEKGKCLYTGEAIELSRLFEDNYVEIDHALPFSRTWDDSLNNKVLVLKASNQNKGNQTPYEWLDGKNNSPKWREFVARVQSCNFPHSKKQRILLQKFDEEGFKERNLNDTRYVNRFLCQFVADHMQLTGKGKRCVFASNGQITNLLRGFWGLHKVRAENDRHHALDAVVVACSTVAMQQRITRFVRYKEMNAFDGKTVDKETGEVLHQKTHFPQPWEFFTQEVMIRVFGKPDGKPEFEEADTPEKLRALLAEKLSSRPEAVHEYVSPLFVSRAPNRKMSGQGHMETVKSAKRLNEGISVLRVPLTQLKLKDLEKMVNREREPKLYEALKARLEAHKDDPAKAFTEPFYKHDKAGNRTQQVKAVRIAQVQKTGVWVRNRNGIADNATMVRVDVFEKGGKYYLVPIYSWQVAKGILPDRAVVAYADEENWTVIDDSFEFKFVLYANDLIKLTAKKNEYLGYFVSLNRATGAIDIRVHDTDSTKGKNGIFQSVGVKTALSFQKYQIDELGKEIRPCRLKKRPPVR

SEQ ID NO: 16541 - protein, 997 aa, unidentified
  REGION 1..997: note = Cas Enzyme sequence
LKHEGVLKPEDFDENGFIKLLPNTPWQLRAAALDRRLAPLEWAAVLLHLVKHRGYLSQRKNEEQTADKELGALLKGVADNTHALQAGNFRTPAELALNKFEKESGHIRNQRGDYSHTFSRKDLQAELVLLFEKQKEFGNPYVSDDLKNSIENLLMTQRPALSGDAIQKMLGHCTFEPAEPKAAKNTYTAERFIWLTKLNNLRILNQGNERPLTDAERTTLMDEPYKKSKLTYAQARKLLGLDDTAFFKGLRYGKDNAESATLMEMKAYHTVSRALEKEGLKDKKSPLNLSPEVQDEIGTAFSLFKTDEEITGRLKDCLQPEILDALLKHISFDKFVQISLKALRRIVPLMEQGKRYDEACAEIYGDHHGRRNSEETLYLPPIPADEIRNPVVLRALSQARKVINGVVRRYGSPVRIHIETAREVGKSFKDRKEIEKRQEENRKDREKAAAKFREYFPNFVGEPKSKDILKLRLYEQQHGKCLYSGKEIDLGRLNEKGYVEIDHALPFSRTWDDSFNNKVLVLGRENQNKGNRTPYEYFNGKDNSREWQEFKARVETSRFPHSKKQRVLLQKFDEGEFKKRNLNDTRYINRFLCKFVAGHMRLMDNRETRVFASNGQITNLLRGFWGLRKVRAENDRHHALDAVVVACSTVAMQQKITGFVRYKEMNAFDGKTIDKETGEVLHQKIHFPQPWEFFAQEVMIRVFGKPDGKPEFEEADTPEKLRALLAEKLPSRPEAVHEYVMPLFVSRAPNRKMSGQGHMETVKSAKRLNEGISVLRVPLTQLKLKDLEKMVNREREPKLYEALKARLEAHKDDPIKAFTEPFYKHDKAGNRTQQVKAVRIEQVQKTGVWVRNQNGIADNATMVRVDVFEKAGKYYLVPIYSWQVAKGILPDRAVVAYADEENWTIMDESFKFKFVLYANDLIKLTAKKNVFLGYFVSLNRATGAIDIRTHDTDSTKGKNGIFQSVGVKTALSFQKYQIDELGKEIKPCRLKKRPPVR

SEQ ID NO: 16542 - protein, 1082 aa, unidentified
  REGION 1..1082: note = Cas Enzyme sequence
MAAFKPNPINYILGLDIGITSVGWAMVEIDEEENPIRLIDLGVRVFERAEVPKTGDSLAAARRLARSVRRLTRRRAHRLLRARRLLKREGVLQAADFDENGLIKSLPNTPWQLRAAALDRKLTPLEWSAVLLHLIKHRGYLSQRKNEGKTADKELGALLKGVADNAHALQTGDFRTPAELALNKFEKESGHIRNQRGDYSHTFSRKDLQAELVLLFEKQKEFGNPHISDGLKEGIETLLMAQRPALSGDAVQKMLGYCTFEPTEPKAAKNTYTAERFIWLTKLNNLRILEQGSERPLTDTERATLMDEPYRKSKLTYAQTRKLLGLEDTAFFKGLRYGKDNAEASTLMEMKAYHTISRALEKEGLKDKKSPLNLSPELQDEIGTAFSLFKTDEDITGRLKDRVQPEILEALLKHINFDKFVQISLKALRRIVPLMEQGKRYDEACAEIYGDHYGKKNTEEKIYLPPIPADEIRNPVVLRALSQARKVINGVVRSYGSPARIHIETAREVGKSFKDRKEIEKRQEENRKDREKATAKFREYFPNFVGEPKSKDILKLRLYEQQHGKCLYSGKEINLGRLNEKGYVEIDHALPFSRTWDDSFNNKVLVLGSENQNKGNQTPYEYFNGKDNSREWQEFKARVETSRFPRSKKQRILLQKFDEDGFKERNLNDTRYVNRFLCQFVADHMRLTGKGKRRVFASNGQITNLLRGFWGLRKVRAENDRHHALDAVVVGCSTVAMQQKITRFVRYKEMNAFDGKTIDKETGEVLHQKTHFPQPWEFFAQEVMIRVFGKPDGKPEFEEADTPEKLRTLLAEKLSSRPEAVHEYVTPLFVSRAPNRKMSGQGHMETVKSAKRLDEGISVLRVPLTQLKLKDLEKMVNREREPKLYEGLKARLEAHKDDPAKAFAEPFYKYDKAGNRTQQVKAVRVEQVQKTGVWVRNHNGIADNATMVRVDVFEKGGKYYLVPIYSWQVAKGILPDRAVVAYADEEDWTVIDENFRFKFVLYSNDLIKVTAKKNVFFGYFVSLNRATGAIDIRVHDTDSTKGKNGIFQSVGVKTALSFQKYQIDELGKEIRPCRLKKRPPVR

SEQ ID NO: 16543 - protein, 1085 aa, unidentified
  REGION 1..1085: note = Cas Enzyme sequence
MEKQMTAFKPNPLNYILGLDIGIASVGWAMVEIDDKENPVRLIDLGVRVFERAEVPKTGDSLAAARRLARSVRRLTRRRAHRLLRARRLLKHEGVLKPEDFDENGFIKLLPNTPWQLRAAALDRRLAPLEWAAVLLHLVKHRGYLSQRKNEGETADKELGALLKGVADNTLALQAGDFRTPAELALNKFEKESGHIRNQRGDYSHTFSRKDLQAELVLLFEKQKEFGNPYVSDDLKNGIENLLMTQRPALSGDAIQKMLGHCTFEPAEPKAAKNSYTAERFIWLTKLNNLRILNQGNERPLTDVERTTLMDEPYKKSKLTYAQARKLLDLNDTAFFKGLRYGKDNAESATLMEMKAYHAISRALEKEGLKDKKSPLSFSPELQDEIGTAFSLFKTDEDITGRLKDCLQPEILDALLKHISFDKFVQISLKALRRIVPLMEQGKRYDEACAEIYGDHYGEKNSEETLYLPPIPADEIRNPVVLRALSQARKVINGVVRRYGSPARIHIETAREVGKSFKDRKEIEKRQEENRKDREKAAAKFREYFPNFVGEPKSKDILKLRLYEQQHGKCLYSGKVIDIRRLNEKGYVEIDHALPFSRTWDDSFNNKVLVLGSENQNKGNRTPYEYLNGKDNSREWLEFKARVETSRFPHSKKQRILLQKFDEEGFKERNLNDTRYVNRFLCQFVADHMHLTGKGKRRVFASNGQITNLLRGFWGLHKVRAENDRHHALDAVVVACSTVAMQQKITRFVRYKEMNAFDGKTIDKETGEVLHQKTHFPQPWDFFAQEVMIRVFGKPDGKPEFEEADTPEKLRALLAEKLSSRPEAVHEYVTPLFVSRAPNRKMSGQGHMETVKSAKRLNEGISVLRVPLTQLKLKDLEKMVNREREPKLYEALKARLEAHKDDPTKAFIEPFYKHDKAGNPTQQVKAVRIEQVQKTGVWVRNQNGIADNATMVRVDVFEKAGKYYLVPIYSWQVAKGILPDRAVVAYADEENWTVMDESFEFRFALYSNDLIKVQLKKDSFLGYFSGLDRATGAISLREHDLEKSKGKDGMHRIGVKTALSFQKYQIDELGKEIRPCRLKKRPPVR

SEQ ID NO: 16544 - protein, 1095 aa, unidentified
  REGION 1..1095: note = Cas Enzyme sequence
MEKPMIALKPNPLNYILGLDIGIASVGWAMVEIDDKENPIRLIDLGVRVFERAEVPKTGDSLAAARRSARSIRRLIRRRAHRLLRTRRLLKHEGVLKPEDFDENGFIKLLPNTPWQLRAAALDRKLTPLEWAAVLLHLVKHRGYLSQRKNEEQTADKELGALLKGVADNTHALQAGNFRTPAELALNKFEKESGHIRNQRGDYSHTFSRKDLQAELVLLFEKQKEFGNPHVSDDLKNGIENLLMTQRPALSGDAIQKMLGHCTFEPAEPKAAKNTYTAERFIWLTKLNNLRILNQGSERPLTDTERAMLMDEPYKKSKLTYAQVRKLLGLDDTAFFKGLRYGKDNAESATLMEMKAYHAISRALEKEGLKDKKSPLSLSPELQDEIGTAFSLFKTDEDITGRLKDRLQPEILEALLKHISFDKFVQISLKALRRIVPLMEQGKRYDEACAETYGDHYGEKNSEEMLYLPPIPADEIRNPVVLRALSQARKVINAVVRRYGSPARIHIETAREVGKSKDERDKLDRQNNERKNDRDRRIEDIQKNFGFDPKPKDILKLRLYEEQNGKCLYSNLKSEKGKCLYTGEAIELSRLFEDNYVEIDHALPFSRTWDDSLNNKVLVLKASNQNKGNQTPYEWLDGKNNSPKWREFVARVQSCNFPHSKKQRILLQKFDEEGFKERNLNDTRYVNRFLCQFVADHMQLTGKGKRCVFASNGQITNLLRGFWGLRKEREGNDRHHALDAVVVACSTVAMQQRITRFVRYKEMNAFDGRTVDKETGEVLHQKTHFPQPWEFFAQEVMIRVFGKPDGRPEFEEADTPEKLRALLAEKLSSRPEAVHEYVSPLFVSRAPKRKMSGQGHMETVKSPKRLDEGISVLRVPLTQLKLKDLEKMVNREREPKLYEALKARLEAHKDDPAKAFAEPFYKHDKAGNRTQQVKAVRIEQVQKTGVWVRNQNGIADNATMVRVDVFEKAGKYYLVPIYSWQVAKGILPDRAVVAYADEENWTVMDESFKFKFVLYANDLIKLTAKKNEFLGYFVSLNRATGAIDIRTHDTDSTKGKNGIFQSVGVKTALSFQKYQIDELGKEIRPCRLKKRPPVR

SEQ ID NO: 16545 - protein, 1085 aa, unidentified
  REGION 1..1085: note = Cas Enzyme sequence
MEKQMTAFKPNPLNYILGLDIGIASVGWATVEIDDKENPIRLIDLGVRVFERAEVPKTGDSLAAARRAARSIRRLIRRRAHRLLRTRRLLKHEGVLKPEDFDENGFIKLLPNTPWQLRAAALDRKLTPLEWAAVLLHLVKHRGYLSQRKNEEQTADKELGDLLKGVADNTHALQTGDFRTPAELALNKFEKESGHIRNQRGDYSHTFSRKDLQAELVLLFEKQKEFGNPYVSDDLKNGIENLLMTQRPALSGDAIQKMLGHCTFEPAEPKAAKNTYTAERFIWLTKLNNLRILNQGSERPLTDTERTTLMDEPYKKSKLTYARVRKLLGLDDTAFFKGLRYGKDNAESTTLMEMKAYHAISRALEKEGLKDKKSPLNLSPELQDEIGTAFSLFKTDEDITGRLKDCLQPEILDALLKHISFDKFVQISLKALRRIVPLMEQGKRYDEACAEIYGDHYGEKNSEEMLYLPPIPADEIRNPVVLRALSQARKVINSVVRRYGSPVRIHIETAREVGKSFKDRKEIEKRQEENRKDREKAAAKFREYFPNFVGEPKSKDILKLRLYEQQHGKCLYSGKEIDLGRLNEKGYVEIDHALPFSRTWDDSFNNKVLVLGSENQNKGNRTPYEYLNGKDNSREWLEFKARVETSRFPHSKKQRILLQKFDEEGFKERNLNDTRYVNRFLCQFVADHMQLTGKGKRRVFASNGQITNLLRGFWGLRKVRVENDRHHALDAVVVACSTVAMQQRITRFVRYKEMNAFDGKTIDEETGEVLHQKTHFPQPWDFFAQEVMIRVFGKPGGKPEFEEADTPEKLRALLAEQVSSRPQAVHEYVAPLFVSRAPNRKMSGQGHMETVKSPKRLDEGMSVLRVPLTQLKLKDLEKMVNREREPKLYEALKARLEAHKDDPAKAFAEPFYKQDKAGNRTQQVKALRIEQVQKTGVWVRNQNGIADNATMVRVDVFEKAGKYYLVPIYSWQVAKGILPDRAVVAYADEENWTVMDESFEFRFALYSNDLIKVQLKKDSFLGYFSGLDRATGAISLREHDLEKSKGKDGMHRIGVKTALSFQKYQIDELGKEIRPCRLKKRPPVR

SEQ ID NO: 16546 - protein, 1103 aa, unidentified
  REGION 1..1103: note = Cas Enzyme sequence
LHVNAFFRYIAVVVYEIAEKQMTAFKPNPLNYILGLDIGIASVGWATVEIDDKENPIRLIDLGVRVFERAEVPKTGDSLAAARRAARSIRRLIRRRAHRLLRTRRLLKHEGVLKPEDFDENGFIKLLPNTPWQLRAAALDRKLTPLEWAAVLLHLVKHRGYLSQRKNEEQTADKELGDLLKGVADNTHALQTGDFRTPAELALNKFEKESGHIRNQRGDYSHTFSRKDLQAELVLLFEKQKEFGNPYVSDDLKNGIENLLMTQRPALSGDAIQKMLGHCTFEPAEPKAAKNTYTAERFIWLTKLNNLRILNQGSERPLTDTERTTLMDEPYKKSKLTYARVRKLLGLDDTAFFKGLRYGKDNAESTTLMEMKAYHAISRALEKEGLKDKKSPLNLSPELQDEIGTAFSLFKTDEDITGRLKDCLQPEILDALLKHISFDKFVQISLKALRRIVPLMEQGKRYDEACAEIYGDHYGEKNSEEMLYLPPIPADEIRNPVVLRALSQARKVINSVVRRYGSPVRIHIETAREVGKSFKDRKEIEKRQEENRKDREKAAAKFREYFPNFVGEPKSKDILKLRLYEQQHGKCLYSGKEIDLGRLNEKGYVEIDHALPFSRTWDDSFNNKVLVLGSENQNKGNRTPYEYLNGKDNSREWLEFKARVETSRFPHSKKQRILLQKFDEEGFKERNLNDTRYVNRFLCQFVADHMQLTGKGKRRVFASNGQITNLLRGFWGLRKVRVENDRHHALDAVVVACSTVAMQQRITRFVRYKEMNAFDGKTIDEETGEVLHQKTHFPQPWDFFAQEVMIRVFGKPGGKPEFEEADTPEKLRALLAEQVSSRPQAVHEYVAPLFVSRAPNRKMSGQGHMETVKSPKRLDEGMSVLRVPLTQLKLKDLEKMVNREREPKLYEALKARLEAHKDDPAKAFAEPFYKQDKAGNPTQQVKAVRIEQVQKTGVWVRNQNGIADNATMVRVDVFEKAGKYYLVPIYSWQVAKGILPDRAVVQGRDEEDWTVMDDSFEFKFVLYANDLIKLTAKKNEFLGYFVSLNRATGAIDIRTHDTDSTKGKNGIFQSVGVKTALSFQKYHIDELGKEIRPCHLKKRPPVR

SEQ ID NO: 16547 - protein, 1003 aa, unidentified
  REGION 1..1003: note = Cas Enzyme sequence
LLRARRLLKHEGVLKPEDFDENGFIKLLPNTPWQLRAAALDRRLAPLEWAAVLLHLVTHRGYLSQRKNEGETADKELGALLKGVADNAHALQAGDFRTPAELALNKFEKESGHIRNQRGDYSHTFSRKDLQAELVLLFEKQKEFGNPHVSDDLKNGIENLLMTQRPALSGDAIQKMLGHCTFEPAEPKAAKNTYTAERFIWLTKLNNLRILNQGNERPLTDAERTTLMDEPYKKSKLTYAQARKLLDLDDTAFFKGLRYGKDNAESATLMEMKAYHAISRALEKEGLKDKKSPLSISPELQDEIGTAFSLFKTDEDITGRLKGCLQSEILDALLKHISFDKFVQISLKALRRIVPLMEQGKRYDEACAEIYGDHHGRKNSEETLYLPPIPADEIRNPVVLRALSQARKVINAVVRRYGSPARIHIETAREVGKSFKDRKEIEKRQEENRKDREKAAAKFREYFPNFVGEPKSKDILKLRLYEQQHGKCLYSGKVIDIRRLNEKGYVEIDHALPFSRTWDDSFNNKVLVLGSENQNKGNRTPYEYFNGKDNSREWLEFKARVETSRFPHSKKQRVLLQKFDEEGFKERNLNDTRYVNRFLCQFVADHMQLTGKGKRRVFASNGQITNLLRGFWGLHKVRAENDRHHALDAVVVACSTVAMQQRITRFVRYKEMNAFDGKTVDKETGEVLHQKTHFPQPWEFFTQEVMIRVFDKPDGEPEFEEADTPEKLRALLAEKLPSRPEAIHEYVMPLFVSRAPNRKMSGQGHMETVKSAKRLNEGISVLRVPLTQLKLKDLEKMVNREREPKVYAGLKARLEAHKDDPAKAFAEPFYKHDKAGNPTQQVKAVRIEQVQKTGVLVRNRNGVADNATMVRVDVFEKAGKYYLVPIYSWQVAKGILPDRAVVAYADEENWTVMDESFEFRFALYSNDLIKVQLKKDSFLGYFSGLDRATGAISLREHDLEKSKGKDGMHRIGVKTALSFQKYQIDELGKEIRPCRLKKRPPVR

SEQ ID NO: 16548 - protein, 1090 aa, unidentified
  REGION 1..1090: note = Cas Enzyme sequence
MANKPPYVLGIDVGVASLGLALINADDSSDIISGIVRTYSIPEGAAERRLKRGARRGLDRRARRLDRISELLHSNGIGYDRRNASKEILNYSPIKARAKASREKVDLALLSRAVLHMAKHRGSSAFDNLNLEDKDKLATAKAMSLLETEMADKGFKTYGQYLRWREKNNLMTRIDQEKHNDRYGEYAFYPNRDLLKEEFKIIWEQQAQHHTEVLTQKLKQEVYAELFHQRSVTFPPVGNCPYFKEEEKLPRSSRLFQTRRIYEECNNLRFYSKGGERLDYGIEQRNLLAHSLLDGNPLTAAKIKKMLGFESAAKVNMENNRLKKNIEPYPFDVELANDQRLGSLWLDASYQVQDEILNEFANQPDNKKLIEKIVELLDCDTSKAELALDVSLPNGRGSMGLTATTKILEELKKSLISSREAEDLAGISHAMSPDGEIWDKLPYYGEVLLGHTQPAIWVSDYRLSTDTPPNTSQEENEHGRIPNPVVHLALNQIRKTVNRVIKEYGVPEKIHIELARDLNKSEEQRTEIVNLQEANQKANKSAVEKIKEISSSIQINRPNIQKYRLWEEQKHICIYSGDPISCTQLFDGSVEVDHILPRSKVAIDAFSNKLICFKAENAAKSNRPPFQAFSKDKDKWAAIMRRADKLPPQKQRRFSADAMEEYENDPSAWAARYGTDNAYIARLTRQYLSTLFGGDQTKIICVSSHIVALLRGKWGLQNILGNTKSGKKYRGDHRHHFIDALVVANSTRSMVQRIQTEAARCEKDGLDVFVERIAPPFGEGKDFYDAVKAATMTNVRLSRKAEHSSRGQMHEDRLLGIVTDKNLQSPNENGSYLCRKKIKLSSYNSLEGLNKVKIKKPVLDLNLAEVQAAAVTLEQIKGAMAMHAEAALEQLNAEHEELSPAEQTKNKITEPKIYKKALNIHRSKAGQENLTVFQFNKLVNIKIKHPSNTPQAGYIGGRNHRIDFYMESETKLCWECISVLNANKIGAKKDPFVPASQRAGNYLLWSAHKEDIIEMDDPENPGNRTLFKVAALTDDRMAVVPIFDARATTGKGQDKRKTHTKRLKFYKERSAQRVVLDEIGHRQFLFPKLS

SEQ ID NO: 16549 - protein, 1233 aa, unidentified
  REGION 1..1233: note = Cas Enzyme sequence
MGQNNLVAAGFGDLLACFSFLIRGASSFLLALLVFIWWYIAIKLYADDVFIGERVVAAQKVALGIDVGVASLGACVVALDDAGRQTGFLHGTSFVYPAPDGAAERRGHRAMRRGYRNKRERLAHLRKLLCTVFDLPADFDGKPDGVSDAMPTDIAGSDSQPHTEDGRILISPNSRTRLRALGLRQALSKGDLARAIMHIAKNRGMRLTRVVGTSDEDVKARKEASVMAEQARETRSALQAAGVRTPGELLWLREQEAVLPHQRKPLRRRVGSALRLQFVRSQVEDELRDLLFAQRRWHPVLTEAFCAELQEIVFAEKEAPVPKIGRCMYNPETEERLPLASDLFQQKRIFEEVNNLRIEHSDASREKLTFAQRDDVVFRLMSGEDLSVAKIKKIVGATEKGVRLSLEGQKGRDRDPARKLLGHAIRSALQASDTAFEVKSGDPGRLASLYDGFDEARRDDFEKLLREQHDREALVTAFTDGYGLSVDEAENAADTVALPRGYAATGLTATFEILQKLKADVIDSNTAAQQAGLVAAGARELVCERLPYYGIVFPHLVRDRMTPEMPGYPAATNEQKFGTIPNPVVHVALNALRKVVNAILKKAEKEGWQFDCVQIELSREMKKTQEDRDKDARRIYREQQKNAEYDAIILAHGYPASRKNRRKLKLWEAQNRICPYTGETINVEDLFSGKFDIDHVLPRSRTLDDRLYNLLVTHEAANKIKANKSPYEAFSGGLEIDGLPRRSYEQIVETVRRIQGIAHKEKLFRPDAMDRFDDQDDFAQRYKTDTSYIAKTARQYLLTVFPQLRPSGGVEAINGFITDELRKRWGVMDLMQEVAHEQDPDLIDAPPTREERELGRKRGKNREDNRHHLLDAAIVACTRRDIVQVLQTLSARKDGREKAENYRVLLPWNSFRDDLYDLLLHARTTHRPGREINGQLHKATNLGVVARFSDGRYLTRMRKRLDIGDFSSPSELKAKMTVDPGHIARLEKDIRNGAAELFWNSIDPVGDLMRHAAELQETAEDILERFARQPTEQEYDDLDRKTGTIERRVRKLRENERLSAAFDDYRQYCLQNGKTPRRTVRLYGMDEAVIVAASGKTGRPSRTYKPGSNAWLDIFRDRKGKPGFEVIRTIDAMRPGFEPLWMQEGGNDMVLRLFKGDTVRLRTKDGKSRLCIFATNSPGDWEFQPVNLSSHIGKHPARKNFRFSFKTLIEAGPQLVVCDPLGRVLSETPRFNF

SEQ ID NO: 16550 - protein, 1094 aa, unidentified
  REGION 1..1094: note = Cas Enzyme sequence
MRLGLDIGTNSIGWWLYATDGEVITEVIDGGVRIFSDGRDPKSKASLAVDRRVARSQRRRRDRYLRRKAALMKRMAAAGLMPADPTEAKTLELLDPYALRAEGLDQALPLNHFGRALFHLNQRRGFKSNRKTDKGDNESGKIKDATARLDQAMMANGARTYGEFLHKRRASAPDPKQIPSVRTRLSVARRDNDEKEEPGYDFYPDRRHLSDEFNKLWAAQARHNPEILTDELRDEIARIIFFQRPLKAPEVGLCLFTDEKRIPSAHPLNQRRILLETVNNLKVAAPGQPARGLKQEERNKIVHALDNRPHVKDFKKMTLTLKKLGGFIKLHPEQSFTLETANRDAIACDPVRASLSHPDRFGPRWSTLDTGAQWDLIERIRAVQSEAEHDALVEWLVETYGLDLDNANGVAYAPLPEGYGRLGLTATTRILAALKADVIPYSEAVARCGWHHSDGRTGEVFDPRRWIDDEDEEPEDWEWPLPYYGEVLTRRVIPGSLDRSKHDPRKQATEYFGRITNPTVHIGLNQLRRLVNRIITVYGKPDQIVVELARDLKLSEDQKREVQRDIKKNTDAAIARGRKLDEMGVPNTGANRMVLRLWESLGDDVMTRNCPYSGQRISVGMLFDGSCDVDHILPYSRTLDDGFANRTLCLKEFNRQKTNKTPWEAWGETPQWDAIAANLKNLPKNKAWRFAPDAMEKFEGENDFTARALKDTQYLSRIARSYLDALYDGQDRKRHVWVVPGRLTEMLRRHWGLNALLSEGKAAVKAKNRTDHRHHAIDAAVVAATDQSLINMISKAAGRDEAKGNAAEDVARTTTAPWEGFRTDIATQLDKIIVSHRADHGRIDRVARKSGKDSTSGQLHNDTAYGMASDGTAVNRKPLMSLSPNDIAITTRGANISDADLQRHLARVTRGLDGKAFERALSDFAGARKLPDHADNPYFGLRRVRIKENVKVIPISDKNGIAYKGYKPDSNSRYEVWRLPDGTLTHHVVSTFDAHMDDASRPHPGAKRIHRFHKGDLIRLEESKFGPVFATVEKFDGNGTIEMVPHHESNASDRYRKDKEDLYIRLRPKTLQKAKARRVHVDEMGRLRDPGPKI

SEQ ID NO: 16551 - protein, 1079 aa, unidentified
  REGION 1..1079: note = Cas Enzyme sequence
MSVKKSYRLGLDIGIASVGAALLAEDHILALHVRTFDKAETAKEGESLNKIRRDARLTRRRIRRRSFRLTRLRRILHRYGLIKTPEVESVNLVGVSPWQLRSDALDKLLEPKELAFALYHLVKHRGFQSNRKSEVKQDEKAGQMLSGVSQNQALLKEQGYRTIGEMVAKDNSFTQSKRNKGGDYSHTFSRQDLYQEVEVIFKQQIELGNTYINDELKDEVLGLLMARKPALAGDNLLKMVGHCTFEKEEYRAPKACYSTERFIWLSKLNNLKILQLGSSRSLTKAEHELVKEMPFEQAKVTYKQLRKKLQLDDEAKFNGLTYFSKNGKDPETVDFFVAKAFHSFRKVYLAYGLETQWKKDATNHDKLNKLAYAQTVYKEDAEAKTWLEVQGIESQIIEAILEVSFSEFIRLSTKALQKILPFMEQGQRYDEAVISAGYMHHSQLSHSEKTNFIPALNKEEFTNPVVFRAINQTRKLVNAIIKKYGAPMSVHIELARDLNKSFDERRKIEKEQKENQINRQKDIEDFENRFGVQANGHNLAKMRLYREQSGQCAYSQKPIDLNRLCEHGYVEIDHALPYSRSFDNSFTNKVLVFTAENRNKGNKTPYEYLGGELNDQAWINYQAWVQSNIKNPRKVQKLLRKDFDETKAEEFKERNLSDTRYAGRVMKNLIEQHLNLNDESTSQKCVVVSGQLTAYLRGRWGLHKVRADGDKHHALDAAVVAACSHSMVKRLSDYSRKNELSQVKCDFIDPDTGEVLDIQALRKLESQFPMPWPDFRKELIGRLSDNPQEELNTLKHYTSEKLETIQPLRVSRMPTRRGLGSAHQETIRSAKYLDEGISLIKTPLTKLRLKDLEKVYQFQDPRNTPIIEALKTRLKAFDDNGIKAFSKPIYKPSKANGFNAEIPKLDDYDGEPAPLIRSVKLQEVQKSGIPIRGGVANNGDMVRIDIFTKGGKYFVVPLYVADAAKKILPNKAVIANKPESEWIEMDETYEFLFSLYPNDWVKVTFKQKESKEGYYSGMDRATGAISLWAHDRNQNLGKNGLFRSIGIKAAKSVDKYHVDMLGRLYKAQNEVRKPLLQGK

SEQ ID NO: 16552 - protein, 1080 aa, unidentified
  REGION 1..1080: note = Cas Enzyme sequence
MMEKQTNYRLGLDIGVASVGAALLADDHIVALHVRTFDKAETAKEGESLNKIRRDSRLTRRRIRRRAFRLTRLRRVFHRFGLIESPEIENLSLIGASPWVLRAKALDEKLKPNELAFALYHLVKHRGFQSNRKSEVKEDEKAGQMLSGVSKNQALLQEKGYRTIGEMVAKDEAFTRAKRNKGGDYSHTFARADLYQEVETIFAKQAEFGNTFVTDDLKEQVLKILMARRPALSGEDLLKMVGYCTFETEEYRAPKACYTTERFIWLSKLNNLRVLQLGSSRALTDEERELVKEMPFEQTKVTYKQLRKKLNLDETAKFNGVRYFSKNGKDPEATDFFVAKYFHAVRKAYKSHGLEEQWKQDSQTPEKLDAMAYAQTVYKVDDEAREYLQENGIEDKVVEAILEVSFSEFIRLSLKALHKILLFMEQGQRYDEAVVSAGYAHHSQIQSTEKTNTIPPLNKEDFTNPVVFRAINQTRKLVNAIVKEYGSPMSVHIELARDLNKSFDERRKIEKEQKENQLNRQKDIEEFENRFGVQANGLNLAKMRLYREQDGKCAYSLKPIDMNRLCETGYVEVDHVLPYSRSFDNSFTNKVLVLTAENRNKGNRTPFEYLGGVNNDQAWQNYQAWVQATIKNPRKVQKLLRQDFDENKAQEFRERNLNDTRYAGRVMKNLIEAHLKLNDESTSQKCVVVAGQLTAYLRGRWGLSKVRADGDKHHALDAAVVAACSHSMVKRLSDYSRKNELEQVKRDFIDPETGEILDIQAVRQLEDQFPQPWAEFRKELLGRLSDNPKEDLSGLRYYTGERLENIQPIRVSRMPTRRSLGSAHQETIRSAKYLEDGISLVKTPLTKLKLKDLDKIYRHDDPRNIPLINAIRERLERFDDKGDKAFAQPLYKPSKANGFNAELEKLEDYLGAPAPQIRSVKIEETQKSGLPIRNGVANNGDMVRIDIFTKAGKYFVVPLYVADVIKEALPNKAVIPLKEENEWVEIDENYKFLFSLYPNDWVKVTFKSKPTKEGFYAGFNRWTAAIDLWVHDRNQSEGKKGLYQGIGIKTAKSVEKYHVDLLGRLYKVQHEERQTIIQGK

SEQ ID NO: 16553 - protein, 1055 aa, unidentified
  REGION 1..1055: note = Cas Enzyme sequence
MSQPSRSYSLGLDIGMASVGAALLGESEIIALHVRTFDKAETAKEGESLNKIRRDARLTRRRIRRRAHRLLRMRRLFKRTGILTENSPSSFNIPGTSPWQLRAEGLERLLTPIEWAGALYHLLKHRGFQSNRKSEAKSDEKAGQMLSGVTANQQRMKDKGYRTIGEMAWKDESFTNAKRNKGGDYSHTFARVDLAAELKALFDTQRKFNNPHSHSDFESAVHDLLMARKPTLSGINLLKMVGKCTFEPAEYRAPKASYTAERFVWLTKLNNLRITGQGSTRALNVAERQLLISLPYTQARLTYKQVRTKLDLADSDKFVGLSYYKAEKKDPELDSLFEAKYFRALRKAYEAAGLTDFWQRDALDPERLDKLAYALTVFKDDKESTQWMAQQNIEPEIIEAVLEISFSDFIRLSIKALRKILPHMEQGMRYDEAVQQAGYTHHSQLNTNNKSRTIPKIYKDDIANPVVYRAINQARKLVNAIVKEYGPPTEVHIELARDLNKPFDERKKIERDQKEFKATKDKDIKDFEDRFHRSPSGLELTKWRLYREQDAQCAYSQTGFDLNRLFEVGYAEIDHALPYSRSFDDGMNNKVLVHTKHNRDKGNRTPYEYLDGANNNIQWQRYVAWVEGNKKYRLAKRQRLLRKDFNEEEAGKFRERNLTDTRYASRLFKQMIEQHLQLAEDSSSKRCAVVSGQLTSLLRARWGLLKVREDGDLHHALDAAVIAAASHGMIKRMSDYSRRKELDQVRENYVNPETGEVVDLATLRKLEQHFPVPWHGFRDQLTEKLKTVRVSRAPLRRGLGSAHQETIRSAKHLNDMEAGVKTPKSSVKTPLTSLKLKQLPNMVGYEDPRNASLIAAIEQRLKDHNDDGAKAFKEPLRRPTTSGKEHLAPIVRSVNMLDTQKSGLPVRGGIANNGSMLRVDIFTKGGKFFAVPLYVADVVKKELPSRAVVANKPEDDWPVMDDNYQFLFSLHTNDWVKVSYKSEPAREGYFSGLDRATAAISVWTHDRNQAVGKDGLMRSIGIKTALSVEKHHVDLLGNLYKVHQETRQPLNHKRK

SEQ ID NO: 16554 - protein, 1078 aa, unidentified
  REGION 1..1078: note = Cas Enzyme sequence
MQPQKLQPLHGYILGLDIGMASVGAALLAEDHILALHVRTFDKAETAKEGESLNKIRRDSRLTRRRIRRRAFRLLRLRRLLKREGLLLSSAPDALETTVSPWELRAEGLHRKLAPSEWAAVLYHIIKHRGFQSNRISEAASDEKAGQMLSGVTTNQKRMTEGGWRTVGEMAARDPAFANAKRNKGGEYNHTFARADLEDELAKLFEAQRDHGNPNASSVIQNAIHALLMARRPTLSGENLLKMVGRCTFEVGEFRAPKASHTAERFVWLTRLNNLRISDQGAMRGLNDDERQAVLQLPFTQAKVTYKQIRAKADLPDTARFIGVDYWKKRKEGNELAAEDATLFEAKAFHGIRKTYEKTELKTEWARDSVNPDRLDDLAYAQTVFKDDQEARQWMHTKEIEPAIIEAMLSISFSDFVRLSIKALRKILPFMEAGERYDEAVQSARYTHHSQPPIAGKKKPRLPAISKEDFPNPVVYRALNQARKLVNAIIDEYGAPANVHIELARDLSKPFDERKKIERDQKAFAELKDTLARKFRERFGCDPRKDQLLKMRLYDEQHAQSAYSQNPIDLGRLLEDGYVEVDHALPYSRSFDDGMNNKVLVHTAENRNKGNQTPYEYLDGAEDNERWRNFQAWVESNKSYRQAKRDRLLRKDFSDKAAEGFRERNLTDTRYISKAFKNLVEQHLQLAEGSNSKRCVVASGQLTAFLRTRWGLNKVREDGDLHHALDAAVVAAASHGMVKRLSDYARRKELNMVREGFVDPQTGEVLDVEALRKLEKQFPDPWPHFRRELEAWLSPDPALHLQNIPCYDHECAHTIQPIRVSRAPLRRGMGQAHQETIRSAKLLDQGLSAVKTSLENLKLKDMERILGWDDPRNATLIDAIRQRLQTHGDDGKKAFKEPLYKPSKPGKTAPVVRTVNLTDTQKSGISVRCGIANNGDMLRVDIFTDGKKFYAVPLYVADAVKAELPNRAVVAFKPEEEWTLMDEHYHFLFSLHPNDWVRVRLKKDAPKEGYFSGLDRSTGAISLWAHDRNQAAGKEGLLRGIGIKTALSVEKFHVDLLGRLYPVQQETRRPLRRKHIKD

SEQ ID NO: 16555 - protein, 1001 aa, unidentified
  REGION 1..1001: note = Cas Enzyme sequence
MRRRRDRYLRRRQALLRELAVSGLLPLDPEEQKQLTLLDPYAIRARALDEPVEPHELGRALFHINQRRGFKSNRKTDGKDNEAGKIKQGTKRLEDEMERIGARTYGEFLHKRQDSAIIQHQSPPVRTRMRFLQGLNEPDQEGYEFYPDRKHLESEFDTIWTAQQDFQSHLLTDELGKHLRRIIFHQRPLKPPKVGRCLFLEEDRLPKAHPLASRRTLMETVNHLRIVTLGEPDRTLTHSQRTKILTALDFKKPTKSKSNMKLTFKQLRSKIGLQPLQSFNFETEARDAITCDQVLAVMSHPDRWGESWRHMSWEDQWRVICLLINEQDELKVRAALTTDWGLEDERARNVMNADLPEGYTRIGLTATRRILAELEAEIITYSQAVEKCGWHHSDHRLHEGLSSLPYYGEVLDRHVIPGTQDPKDDDITRFGRITNPTVHIGLNQLRRLVNKIMKAYGKPDEIVVEVARELKHSDEQKKQFQNRNRKGREDAEKRGMKLEELGQPNNGANRARLRMWEELSEDCLARRCPYSGKTISATMLFDGSCDVDHILPYSRTLDDSPANKTICIREYNRQKGNQTPWEAWGDTPHWDLIQSNLKNLPSAKSWRFHDDAMDKWKDEEKFLDRALVDTQYLSRIANTYLSTLYDASDGKRHVWVVPGRLTEMLRRHWGLNSLLTDADAGAVNQKNRTDHRHHAIDAAVIAATDQALVKRISDASRQLEIDGAEGVARSTPLPWERFRSDIAKAVDRIIVSHRADHGRMGTASRARGQDSTSGQLHNETAYGLTGLDSKEVTFRVPIGTFAENRKRIANIRDEQLKSDLYRALEGISDKKEASAALAEFARSSETYRGIRRARISEPVEIIRIRDKHGKEYKGYKPDSNHCYEIWELPDGKWIPQTLTTFHAHQGKLTAKPHPAARRVMRLHKKDVLFVTHPEHGKMFVNVVKFSTGQLCLAPHHEANVDSRDRDRQDLFKYFRPAPSTLQKWKAQLVKVDEIGKVSNFA

SEQ ID NO: 16556 - protein, 1065 aa, unidentified
  REGION 1..1065: note = Cas Enzyme sequence
MAQSQTRGLRLGLDLGTNSIGWWLYETEDRQIRRVVDGGVRIFSDGRDPQSKTSLAVDRRQARAMRRRRDRYLRRRQALLRELAVSGLLPLDPEEQKQLTLLDPYAIRARALDEPVEPHELGRALFHINQRRGFKSNRKTDGKDNEAGKIKQGTKRLEDEMERIGARTYGEFLHKRQDSAIIQHQSPPVRTRMRFLQGLNEPDQEGYEFYPDRKHLESEFDTIWTAQQDFQSHLLTDELGKHLRRIIFHQRPLKPPKVGRCLFLEEDRLPKAHPLASRRTLMETVNHLRIVTLGEPDRTLTHSQRTKILTALDFKKPTKSKSNMKLTFKQLRSKIGLQPLQSFNFETEARDAITCDQVLAVMSHPDRWGESWRHMSWEDQWRVICLLINEQDELKVRAALTTDWGLEDERARNVMNADLPEGYTRIGLTATRRILAELEAEIITYSQAVEKCGWHHSDHRLHEGLSSLPYYGEVLDRHVIPGTQDPKDDDITRFGRITNPTVHIGLNQLRRLVNKIMKAYGKPDEIVVEVARELKHSDEQKKQFQNRNRKGREDAEKRGMKLEELGQPNNGANRARLRMWEELSEDCLARRCPYSGKTISATMLFDGSCDVDHILPYSRTLDDSPANKTICIREYNRQKGNQTPWEAWGDTPHWDLIQSNLKNLPSAKSWRFHDDAMDKWKDEEKFLDRALVDTQYLSRIANTYLSTLYDASDGKRHVWVVPGRLTEMLRRHWGLNSLLTDADAGAVNQKNRTDHRHHAIDAAVIAATDQALVKRISDASRQLEIDGAEGVARSTPLPWERFRSDIAKAVDRIIVSHRADHGRMGTASRARGQDSTSGQLHNETAYGLTGLDSKEVTFRVPIGTFAENRKRIANIRDEQLKSDLYRALEGISDKKEASAALAEFARSSETYRGIRRARISEPVEIIRIRDKHGKEYKGYKPDSNHCYEIWELPDGKWIPQTLTTFHAHQGKLTAKPHPAARRVMRLHKKDVLFVTHPEHGKMFVNVVKFSTGQLCLAPHHEANVDSRDRDRQDLFKYFRPAPSTLQKWKAQLVKVDEIGKVSNFA

SEQ ID NO: 16557 - protein, 1057 aa, unidentified
  REGION 1..1057: note = Cas Enzyme sequence
MSNRVPYRLALDLGTNSIGWCLLDLNGNGDPCGVRRMGVRIFPDGRDPKSKESLAADRRLARSMRRRRDRYLRRRSALMNALVAAGLMPADQAGRKALESEDPYELRARALTEPLAAGQVGRALFHLNQRRGFKSNRKAAGEENEAGKIKAGISALKAEIEASGETTLGAWLAARHRKRETVRARLDGAGAKASYEFYPERSLVHDEFQAIRTAQAPHHPDITAEQWDRVESVIFRQRPLKQVRPGKCTLFPDQERAPWALPVAQKFRILTEIGNLKLYRPGEEPRELSAGQHAQLFAKLCRSADLTFEKIRKELKLDPGLKVNLEGEKRDRLKGDAVTSALSAKKRFGPKWNALTPDDRRDIVGRLIEAEDEAELAGWLETVHGLPSENAAHTAASPGLPDGYCRLSEKALVELVPLMRERRLRYDEAVRALDLHHSDFRPDGLLDELPYYGEPLERFIAFGSGEPSDPPELRLGRFPNPTVHIGLNELRKLVNRIVERWGKPADIVVELARDLKRSRDERDTIQREQAQNQRKNEDRFAKIKELGIDPRPDSMLRLRLWEELPKVGVGHVCVYTGEPIGIRRLLEGDVDIDHILPFSRTLSDGADNKIVCVRRANRFKRDRSPWEAFGVTAVDGYDWAAIAQRAEELPKNKRWRFLPDAMDRFEGERGFLDRQLVETRHLSRVARQYLGSIVELEKVRVAPGKLTAMLRARYGLNRILSDGNLKNRSDHRHHAIDAAVLGVIDQRLVQIVAQAAARAEANELERLFDGLPDPFDGLAATSFGDQVREKIRGITVSHRAEHGWQGRMHNDTAYGPVEAVSGVHTVVTRKPLSGLTAKDFPNIRDRVLAKALEDHVAAEAAAGRSFGDALGSFKWGGQPVRRVRMLDVLGNPIPIQDPSGAVFKVYKGDSNAWYEILRDPRGRWTGKIVSTFEAYRLHRDWLAETGGDSGRGGGVFLDWAAKRVVGEAGTPLFRLFKGDLLALGEAPDRRIVRVVKFSEGQVALALHLEAGNLKARDADKGDPFKYQYCSPDSLRKQAARPAGVDLLGYVHDKGPME

SEQ ID NO: 16558 - protein, 1104 aa, unidentified
  REGION 1..1104: note = Cas Enzyme sequence
MKYRLGLDLGTNSIGWCVLALEQSGTASDGRPRYQPCSVVDAGVRILTPNDEAGRDPKSKNSLAAGRRAARAARRRRDRFLRRQLRLMERLVEAGLMPADEAQRKELEKIDPYWLRAAALDQELELHEVGRAVFHLNQRRGFKSNRLADSDDSEKSATKAGMRALDSALAEASARTLGEFLAQRHKRDRYGKRLKDGDSHAEPAVVRFRPTSQGAKNLYDFYPSRDLVESELNKIWQSQARFHRELTDDLLARLKRIIVEQRPLKKPLVGRCTLRPEPGVVERFGLDIDMGERAPKAHPLFQRFRILQETAQLRIERPGQGARPLTLQERSAIAAKLMASSGTTIAFEALRKAAKLPDGVHFNYELAGRSGLQPNQTAVKLANKNVFGKSWRSLPRDRQIEVVERLLAVEDPEELIGWLCVEFDLERAIAERISETRLPQGHGQFGRSVLADLVAAMERESREAVDATTGEVFARPLTYDEAVKAIDPDLHHSDLRADGSAGRLPYYGEALIRHVVSKPDAPEQSQERIGRVPNPTVHIGLNQLRKIVNALIEKHGKPTEMVIELARELKLNREQKDRIQRENRDNEMKNQERRERLLRIGVADSHESRMRLRLFDELPPDERVCVFTGETISLERLFDGSVEIEHVLPHSRTLDDSFMNKVLCTREANRRKGRRPPADVWSGEELRTIFERAERIVLKKAWRFQPDAMDKFAGEGGFLARQLTDTQHMARLAKTYLEHVCDQVWAPPGRLTAMLRAKWGLNSLLPDHNYANTGQPKNRKDHRHHAIDAFVVACTDRSLLNSIAHASGQAEALDIDRLFPKGTFPEPYEGFRDDLGRTLDRLVVSHKPDHGLPPGSRDDPHVTSGQLHEATAYGLVDEEIDGKRYNLVTRKPIEGLTEGELARVRDTALREALQDAAEVAKRTGQKIADALAAYGREHGVRKVRVLKTLDSVRIVRHGGNNGSAFQKAYTPGDNHRVEIFELPDGSWAGEGITVHDANQRGYEPAWRREHPQARLMMRLHGGDLVQADFGSGNGIYRVYRLEPSAKRVRLAAHNEAGSINDRHNDADDPLRWIFGSYERLRQAGAQQVRVDALGRASPIQRLGR

SEQ ID NO: 16559 - protein, 1119 aa, unidentified
  REGION 1..1119: note = Cas Enzyme sequence
MNDKKNLGPLTFGFDIGIASVGWAVLSPTRIVDLGVRCFDKAETAKEGESLNLARRSARLMRRRLRRRAWRLIKLARLLKHEGLIADTKTFIQPSASHASPWQLRKDGLDRALSPEEWARVLYHLCKHRGFHWVSRAEARKADGDTKGEGGKVKQGLASTTKLMNDKSYRTAAEMVLAEFPSAQRNKRGEYTKALSRELLDNELKQLFERQREYGNPHADTNLEAKIRGSGDHKSGLFWEQKPALSGNDLLKMLGKCTFEKQEYRAPKASFTAERHVWLTRLNNLRIIVDGRTRPLADAERTMALSLPYEQVGDFTYKQLRAALVKAGLMPDSFKFASLAYPSEFQKAEGKAKDPESAALTKLAAWQELRATLKKADLESEWQQISCAALEGQPETLDEIARVLSVFKDDDEVLNELQKLGLPGGAKTENALLDIRFDKFHALSLKALRKIVPYMERGLRYDEACERAEYHHSQLHKVGEGNRKYLPPLYKSRDKDGRMVFNDELGDIPRNPVVLRSLNQARKVLNALIARYGSPSSVHIEMARELSKPFDERMKVGKEQEAYRERNEKDKQTFVAEFGIVGAAKGGEFEKWKLYREQQGKCAYSIQGIDLNRLLEPGYVEIDHALPYSRSFDDSKSNKVLVLAAENRNKGNRTPYEYLDGEHNSERWRQFVGFVESNKLYRQAKRSRLLRKDFGKEQADEFRERNLNDTRYVCRFFKNQVEQFLKLAEGSESKRCVVLSGQLTAFLRARWGLIKVRDESDRHHALDAVVVAACTHGMVKRMSDYARRKELDQVAEGFVDVETGEIINAAMFQQLHEHFPDPWPHFRDEVQMRLKIDDPAQLRSDLLRLGNYAEEDVHAVRPLFVSRAPQRRNSGAAHKETIYGQPERLKAQGGVTEKVALTALTMKDLDRLIDPYRNEKLYAAIRKRLEEFGGKADKAFAASNPLHKPDKEGNPTGPIVRTVTLVIDKLSGVPVRGGIAKNDTMLRVDVFTKAGKFHLVPVYVHHKVTGLPNRAIVAFKDEDEWTAIDDSFEFLFSLYPNDLVTITQKGKAPVRGYYASCHRGTGAFSLWAHDRASSVGKGGQIEGIGIKTALAVQKYNVDVLGTTYAAPLEQRRGLA

SEQ ID NO: 16560 - protein, 1035 aa, unidentified
  REGION 1..1035: note = Cas Enzyme sequence
MRVFGLDIGTTSIGFAVVDLDEARGCGKIQRLGARIFPEARDVDGTPLNQQRRAKRMMRRQLRRRRQRRRSLNELLAAHGLLPAFGSPEWAKVMAADPYALRDRGLAAPLAPHELGRALYHLSKRRHFKERDLAESDGERNDAAKPEETEDAKSRDSFVAALRASGETLGQALSRRDPVKARKRGEHATRAIVLDEFRRLADAQAPHHPRLRDRAFVGALEEAIFAQRPVFWRKSTLGRCPLVPDAPLCPKGSWLSQQRRMLEKVNNLAIAGGNARPLDAEERDAILAALAAQKSMSWGGVREALKPFFKARGESVKSVRFNLEYGDEKGGLKGNLVEADLAKVFGAKWTEHSNKAALREFAPQALWEADYGEIGTQRVVIRPEGDRARRRAVLADVLVHDYGATREEAVALTKLHFPQGWEPYSTAALRLFLPELERGERFGTLLASPDRESWRDANFPNRDRPTGEILDRLPTPQDQDEARRQAQLRNPTVVRVQNEMRKVVNNLIDLCGKPDLIRVELAREIGLSKQEREDKTRDMRARERERKAARDDLIENGVADPSRDDIEKWLLWQECRKQCPYTGDEIGFADLFNGRFEVEHIWPRSKSLDDSFRNKTLCRKDVNNTKGAQLPFEFFQGRPDDWAAAKARVDALVREKTMRPGKAKRFFAASMPDDFVNRQLVDTSYAAKQARSFLQRLWPDLGSKAPVNVQAVTGRVTAQLRRRWGLNHILAEDGEKTRADHRHHAVDALVVACTHGGYAQQLSAYFQAVESRDSPRLAEPWPTIRKDAQAAIEAVVVSHRVRKKVSGPLHKETIYGDTGRDERAKGPAYRLFVRRKPLASLTKDELNDIVDPRVRSIVNAWVAARGGDPKKAFATFPRLGNDGPLIRKARLRVKQQLALMAPVSTGYADMGNNHHIAIYRLPNGKADFDVVSLFEASRRLARREPIVRRRRDDGANFVMSLSIGDTLRFAKNAGQQPTMWRVQKIASKGQISLLDLADASPKEPSLFEPMVGGVVSRNAVKLSVDPIGRVRPAND

SEQ ID NO: 16561 - protein, 1047 aa, unidentified
  REGION 1..1047: note = Cas Enzyme sequence
MTNAVPIYRLGLDLGANSLGWFIVWLDPQGRAVGLGPGGARIYPDGRDPQSKTSNAVDRRVARGMRRRRDRYLKRRSRVLSLLIEHGLMPSAEAERKALESLDPYELRARALDEALPPWHVGRALFHLNQRRGFLSNRKTQKGDNEAGAIKAAAGKLEAAMSEAGARTLGEFLHWRHQERKSVRARNRSDTAKAEYDFYPTRQMVEAEFNAIWDKQAAYNPTMTPEARAAIATDINGIFYQRPLRTPQVGKCAFEPARAADDEEGFRCPWAHPLAQRFRIWQEVRNLGLTKEQGDKLALALFQTSKLSFDKARTLLELSPEFRFNLESEKRKELLGDKTAAKLSHKTLFGKTWRGFSLPRQIEIVTRLLYEEDERQLARWLGEAASLDAAAAERVAACILPDGHCRLGLRAIRKIMPFMEAGLKYHDAARAAGYDHALLPTGEVSSTGYLPYYGEWLQDDVLGTGDPRDGSDKRWGRYPNPTVHIGLGQLRRVVNRLIREYGPPAEIAVEMTRSFKLSPAQLAELEREQAENQRRNDARREQLRQLGAPDNARNVLKLRLWEELNLRDPLDRCCPYSGEKIGVHELLSDAVDIDHLIPFSACWDDSAANKTVCMRYANRAKRNATPFEAFGHSPIIDGRAYNWAEIISRASRLPDNKRWRFQPDARDRFEAMGGFQARQLNETGWLARSAKRYLGAVTDPYKISVLPGKLTALIRAKWGLNDLLPDHNFSDAKNRKDHRHHAIDALVAALTDRALLLQMSRAYDDERQRIEVPPPWDSLRDDLDRALKAMIVSHKPDHGAGGQLHEDTAYGPVKKPEAEGANLVYRKPFQGLNENEIDRIRDPRLRALVLAHVAKRKAAGEDLKSALRSFAQRTDFPGMPGGIRHVRLLKPERQEYLVAVRDDTGKAYKYYSAGENAYVEIFETPDGKWRGEAVSVFRANQRDSKPDWPRAYPGARLVMRVHKGDTLALEVEGRREIMVVHRLDASANRFKLAPHNEAGNLDRRHDDTDDPFRWVMARYSTLKRRRAERVRVDEMGRVWRVRPQDKV

SEQ ID NO: 16562 - protein, 1117 aa, unidentified
  REGION 1..1117: note = Cas Enzyme sequence
MSDKPTGSLTFGFDIGIASVGWCVLGEKHIVDLGVRCFDKAETAKEGESLNLARRTARLMRRRLRRRAWRLTKLARLLKREGLIDNTQSIRQPATKSPWQLRVEGLDRKLAPEEWARALYHLCKHRGFYWISKAEEKKAEADGTGEGGKVKKGLVDTKRRMSEKNYRSVAEMVLSEFPEAQRNKQGEYTKALSRLLLGEELVLLFERQREYGNPHATPDLEMRIAGSGDRKSGLFWEQKPPLSGNDLLKMLGRCTFEKNEYRAPKASFTAERHVWLTRLNNLRVVVDGNARPLNEAERRIALPLPYSQASDLTYKQLKSALVKAGLLPEDVKFAGLNYLAQQTEGKAKDPETERLTKLPAWQELRKILKEKGLETEWQSIAGAATGGQPELLDQIAWVLSVYKDGDEVEQELRKLPLSGGEKMIEALSEISFDKFHNLSLKALRKIVPHMEAGLRYDEACEKAEYHHSQLFKTGEGQQKYLPPFYSGRDKDGRMVFDDKEDIPRNPVVLRSLNQARKVLNALVSRYGSPSAVHIEMARGLSRPMDERNKIKKAQEEFRDKNEKAKSDFADEFNMPAKSREFEKFLLYREQQGKCAYSLKPLSIDRVLHDPGYAEVDHILPYSRSYDDSKNNKTLVLACENRNKGNRTPYEYLTSFEGGENGERWRSFAAWVEGNKSYRLAKRSRLLRKNFGEKESGEFKDRNLNDTRYICKFFKNYVERHLQLAEGSDSKRCVVLSGQLTAFLRARWGLSKVRSDSDRHHALDAAVVAACSHALVKRLSDHSRRKELEQARDVVDAETGEILDPELLSKLERHFPKPWEYFREELLLRLNTDDPALLKSEAEHYGYPLEILENLRPLFVSRAPQRRNSGAAHKETIYSQPERLKSTGGVTQKVSLTSLTLKDMDNLIDPHRNEKLYAAIRARLEANNGKGDKAFPPDNPLRKPDRDGNPTGPIVRTVTMVIDKLSGIPVRGGIAKNDTMLRADVFRHKKDKKYHLVPVYVHHTVAKELPNRAVVAFKDESEWTLIDEENFDFCFSLYPNDLIRITQKNKPPITAYYGSCHRGTGNLNIWLHDRNTANTKDGALEGIGVKTAKSLEKFHVDTLGNIYPAPPEQRRGLA

SEQ ID NO: 16563 - protein, 1128 aa, unidentified
  REGION 1..1128: note = Cas Enzyme sequence
MKEGDMVDKPSEPLIFGFDIGIASVGWCVLGEKRIVDLGVRCFDKAETAKEGKSLNLARRTARLMRRRLRRRAWRLTKLARLLKHERLINSIQVLRQPATKSLWQLRIDGLDRKLSAEEWARVLFHLCKHRGFYWVSRAEEKKAEEDGEGGKVKKGLQDTKRRMSEKKYRSAAEMVLKEFPDAQRNKRGEYNKALSRILLAEELALLFEKQREYGNLYATPELETHIAGSGDRKSGLFWEQKPPLSGKDLLKMLGRCTFEKNEYRAPKASFTAERHVWLTRLNNLRIVVDGNPRPLNEAERRVALPLPYQQASDLTYKQLKNALTKAGLLPENIKFSALAYPTQQTEDKPKDPESERLVKLPAWQELRKTLKENGLETEWQSIAGAAVGGNPELLDQIAWTLSVFKDGNEIEQELRKLPLPGGEKIIEALSEISFDKFHNLSLKALRKIVPHMETGLRYDEACEKAGYHHSQLFKGGEGQHKYLPPFYSGRDKDGRMVFDGKEDIPRNPVVLRSLNQARKVLNALVSRYGSPSAVHIEMARDLSRPMDERNKIKKAQEEFRDKNEKAKADFEAEYSMPAKSREFEKFMLYREQHGKCAYSLKPLDLDRVLRESDSKYAEVDHILPYRRSYDNSKNNKVLVLIKENQDKGNRTPYEYLTSFTGGENGERWRNFVAYVEGNKSYRLAKKNHLLRKNFGEDEAKDFRARNLNDTRYICRFFKNYVEQHLKLSNGHRRCVVISGGLTSLLRARWGLPTSTKKREESDRHHAMDAAVIAACGHFVVQRTSEMLNTDGWSHKPDLGEYVNAETGEFLTTQEFVRKDEIYKLMPRPWKYFREELLLRLNTDDPTLLISEAQRYGYPPEALENLRPLFVSRAPQRRNSGAAHKETIYSQPECLKNTGSVTQKMPLTDLALKDMDNLIDPHRNEKLYAAIRNRLEANGGKGDKAFPPDNPLRKPDRDGNPTGPIVRTVTMVIDKLSGIPVRGGIAKNDTMLRADVFRHKKDRKYHLVPVYVHHAVTKELPTRAIVQSKDEDGWTLIDEVNFDFCFSLYPNDLVKVTLKKEVRFGYYSGCNRSTGAIDLWVHDRNQAIGKDGLIQSIGVKMALYVEKFHVDTLGNIYPAPPEERRGLA

SEQ ID NO: 16564 - protein, 1146 aa, unidentified
  REGION 1..1146: note = Cas Enzyme sequence
MAVKQSSSEKFVFGLDIGIASVGWAVLGENRIIDLGVRCFDKAETAKEGESLNLSRRTARLMRRRLRRRAWRLTKLARLLKRGGLIADVRKLKQQPAKGFKTPDLWQLRVDALDRALNNEEWARVLYHLCKHRGFHWISRAEAKAADSDKEGGKVKKGLAGTKLLIQEKNYRTAAEMVLAEFPEAQRNKQGEYKKALSRELLCDELKELFRKQRTFGNPHTDEQLELTIVGNGDKKSGIFWAQKPALSGEALLKMLGHCTFEKNEYRAPKASFTAERHVLLTRINNLRIVENGSIRKLNDEERRIAVWQPYQQAGDFTYKQLGSALVKAGCLAKDSFKFAGLAYPSEAQKTEKAKNPELAAIVKVPAWQELRKTLTGAGLESEWQEMAGAALDGQPELLDQIAWVLSVYKEDDEVERELGNLILPNREKMIEALQFVRFDKFSNLSLAALRKIVPEMEKGLRYDEACRDAGYQPSLPDLDDDNTRTKYLPSFYMGRDKDGRLKFNENMDIPRNPVVLRALNQSRKVVNALIRKHGSPHAVHIEMARDLSKAFDERRRISGEQEKYRVRNENDKATFAEHFNITGTPKGREFEKWQLYREQQGKCAYSLNPIDLNRLIEKGYVEVDHALPYSRSFDDSKNNRVLVFTTENRNKGNQTPYEYLDGKEESERWRRFEMFVKTNKAYRQAKRNRLLKRDFGEEETKGFRERNLNDTRYICRFFKNYVEQYLQLNKESDAKRCVVLSGQLTSFLRFRWGIVKVRSDSDRHHALDAAVVAACGHGLVKRLSDYSRRRELNHARNVIDMETGEIVDSAMLDRLEKDFPAPWEHFRDELLARLSIDNSQVLRTAVERLGTYPVEALDTLRPLFVSRAPQRRNSGAAHKETIYGQPEALKEKGSVTQKVPVTSLKPADVDKLIDPHRNRKLYSYLSAWLEEKDAREKQAKTIEAGAGRGKDKRKLTAIEKAEIENLRALPRKPDKQGNPTGPIVRSVTMVIEKLSGIPVRGGVAKNDTMLRVDVFRHKTNHKFHIVPVYVHHAVTELPNRAIVAHKDEDEWTEMDLNFEFLYSLHSNDLVRVSQKKKVPILGYYSSCHRGTGNINIWAHDRNQAIGKGGMIEGIGVKTALNVEKFNIDVLGNAYPAPPEQRRELA

SEQ ID NO: 16565 - protein, 1133 aa, unidentified
  REGION 1..1133: note = Cas Enzyme sequence
MADKEKLKETYTIGLDIGIASVGWAILGENRIIDLGVRCFDKAETAKEGESLNLSRRMARLMRRRLRRRAWRLTKLARLLKRVGLIADVGVLKQPPSKGFQTPNLWQLRVEGLDRKLGDDEWARVIYHLCKHRGFHWISKAEAKAADSDKEGGKVKQGLAGTKRLMQEKSYRTAAEMVLAEFPDAQRNKQGEYSKALSRELLCEELKELFKQQRAFGHTHADDKLETNILGNGDKKSGLFWVQKPSLSGEALLKMLGKCTFEKDEYRAAKACFTAERHVLLTRINNLRIVENGKMRGLTADERRIALWQPYQQAGDFTFKQLGSALEKHGSLLKGGYKFAGLTYPRETDEKAKNPETATLVKIPAWQELKKTLIGVGLEREWQGMADAALNGKPDLLDKIGWVLSVYKEDDEVELELGKLQLAANVIHALQTVRFDKFSNLSLLALCKILPQMENGMRYDEACKEAGYQHSMPDMQDLEAKVRYLPPFYSGREKDGRLKFNEDMDIPRNPVVLRALNQARKVVNALIRKYGSPHAVHIEMARDLSRPIDERRKIERDQADYRTKNEDARKAFASDFGFEPKGRQFEKYMLYREQQAKCAYSLAPLDLNRVLNDQGYAEVDHALPYSRSFDDGKNNRVLVLTSENRNKGNQTPYEYLDGTSDSEKWRLFESFVSGNKAYSQAKRNRLLKKDFGVKETQDFKERNLNDTRYICRFFKNYVEQYLQLHEESDAKRCVVVSGQLTSLLRFRWGINKIRSESDRHHALDAAVVAACSHGLVKRMSDYSRRKELGQVRDRIEKVDKKTGEIIDHFPSPWAHFRQELLARLHIDDANELRAVVENLGTYPPEALESLTPLFVSRAPQRRNSGAAHKETIYAQPEAMKEKGSVTQKVAVTSLKPADVDKLIDPERNVKLYAYLRKWLAGKDEREKRAKAIEASAGRGKEKRDLTPEEKIEIERLRALPQKPDKQGKPTGPIVRAVTMVIDKLSGIPVRGGIAKNDTMLRVDMFSKAKRYYLVTVYVFHSVAKELPSRAIVAHKDEDDWTVISEDFEFCFSMYPNDFIRISQKKETFMGYYAGCDRGSGNVNLWSHDRNSQIGKSGMIRGIGVKTAVNVEKFNVDVLGNIYPAPPEIRRELA

SEQ ID NO: 16566 - protein, 1118 aa, unidentified
  REGION 1..1118: note = Cas Enzyme sequence
MREDKMAGNTQEALTFGFDIGIASVGWCVLGENRIVDLGVRCFDKAETAKEGESLNLGRRTARLMRRRLRRRVWRLVKLARLLKRSGLNCDPHRPSTISPWKLRVEGLDRRLSDDEWARVIYHLCKHRGFHWISRAEEKKAESDKQEGGKVKKGLSDTQRRMSEKGYRSAAEMVLAEFPEAQRNKQGDYGKALSRGLLSEELALLFLRQRELGNPHAGAELEAVILGNGDRKNGLFWEQKPPLAGADLLKMLGKCTFERDEYRAPKASFTAERHVWLTRLNNLRIVADGITRPLNEAERRIAMPLPYGYANAKLDYKQLRSALTKKTGLDNFNFAGVAEDKEKDPLVKLPGWEALSKTLKDKGLETEWEGMAGAAIGGDPTQLDDIARVLSVFKDGAEVETELRKLNLPGGAKMIEALVEISFDKFHALSLKALRKIVPHMEAGLRYDEACAAAGYHHSSQLRQDNDDKARYLPPLYSGRDKDGRMVFNGELDVPRNPVVLRALNQARKVLNALVRTYGSPAAVHIEMARDLSRPLDERNKVKKAQDEYRERNEKDKAAFVAEYGMAARSREFEKFQLYREQQGKCAYSLKTLDLHRVLHDIGYAEVDHALPYSRSFDDGKNNKVLVLTEENRNKGIRTAYEYLTSFPGGENGERWRNYVAFVETNKSYRLAKRTRLLRKDFGDKAAEEFRERNLNDTRYICRFFKNYVESHLKLAPKVGADEAADADTNKRCVVLNGQTTAFLRARWGLLKVRGDSDRHHALDATVVAACSHAMVKRLGDYARTKKLAKVRDGFPDPETGEILDPAKFQQLHAHFPDPWPHFRQELEARLNIDDPEELRGRLETLDTYPPEALAAVRPLFVSRAPQRRNGGAAHKDTIYSQPERLKPQGSVTQKVPLSSLKLTDLDRLIDPHRNEKLYAAIRARLEAHKGKGDKAFPPDNPLRKPDRDGDPTGPIVRTVTMVIDKLSGIPVRGGIAKNDTMLRVDVFRHKKDGKFHLVPVYVHHTVSKELPNRAIVAFKDEDEWTRIDDQQFDFCFALYPNDFVRVSLKSEVLQGYYAGCDRSTGNTGLWAHDRNQSVGKDGFIRTGVKTAVALEKFHVDVLGNLYPAPPEQRRGLA

SEQ ID NO: 16567 - protein, 1030 aa, unidentified
  REGION 1..1030: note = Cas Enzyme sequence
HGKLEDVSPWHLRVAGLDRCLASADFARVIYHLVKHRGFHWISRAEEKKAEGDKQEGGKVKKGLSDTQRRMTEKGYRSASEMVLAEFPDAQRNKAGDYGKALSRVLLADELALLFQRQRELGNPHADTDLEAKILGNGDRKSGLFWEQKPPLAGVDLLKMLGHCTFEREEYRAPKASFTAERHVWLTKLVNLKIVVDGVTRRLTPDEIRAVLPLPYQYKSALKWKQLHSALIAHGLPSSVAFSGLTGKDNKDPLDQTLMNLPAWHEIREAFEKAGLKTEWQGIASQPELLDQIAWVLSVFKDGREVTTELHRLNLPGGDKAVDALSVLSFDKFHKLSLKALRKIVPHMETGLRYDEACIAAGYHHSQLHQGEEKALYLPPFYSRRDKDGRMVFDENMDVPRNPVVLRALNQARKVLNALVRTHGSPVAVHIEVARDLSRPLEERNKIKKAQDEYREKNENDKAAFAAEYGIAAKSREFEKFQLYREQQGKCAYSLKPLDLHRVLHDIGYVEVDHALPFSRSYDDSKNNKVLVLAEENRNKGNRTPYEYLTAVGGENGEPWRNFVAFVESNKSFRLAKRQRLLRKDFTGQAAEEFRDRNLNDTRYICRFFKNYVERYLKLAEKVDAGGTALPVAKRCVVLSGQTTAFLRARWGLIKVRGDSDRHHALDAAVVAACSHGMVKRLGDYSRTKELAKAHDGFPDPETGEILDLAKFAQLHAHFPDPWPHFRQELETRLGIDDTQELHARLEVFNTYPPETLAAVRPLFVSRAPQRRNSGAAHKDTIYAQPERLKVQGGVTQKVALASLKLADFGEPGNEAETCKLIDWHRNEKLYSAIRARLEAHGGKGDKAFPPNNPLRKPDRNGNPTGPIVRTVTMVIDKLSGIPVRKGVAKNDTMLRVDVFRHKKDGKFHLVPVYVHHAVAKELPNRAIVAFKDEDEWTLIDDEQFAFCFAAHPNDLMRVTLKQEVLTGYFSGCDRSTGNIGLWVHDRNASVGKDGFIRTGVKTAIAFDKFHVDVLGNIYPAPPEQRRGLA

SEQ ID NO: 16568 - protein, 1619 aa, unidentified
  REGION 1..1619: note = Cas Enzyme sequence
MEPIMREERMADKTLGPQTLGPLTFGFDIGIASVGWAVLSDKRIIDLGVRCFDAAEESKEKVTLNAKRRAARVSRNRYSQRSSRLHRLLHLFVDVDLLSRDECKALFSSSTPQTRQRVADVWQLRADALDRPLSPAEFARVIHHLVKWRGYGSLRDAADRLEESGNDKEPGATIHDKTGDGNNPPTSHQQKKPSFSDALDASESRTERLLTKYRTIGQAIYLISRPSFVPSSFPEKEDAALFRAALRNDANSYERTQLRKHLRAELSVIFRRQRELGSPYVNLVVPDNVPAMSSVALGSGKRSNLSRSLEDQVLGLFDEQYPPIVAEQLEQLIGECQLIPAERRAPRECFSSERSRWLQTLNGIKVRFDGGARTESALPPDELTALELAALVALPYQKEKLTYKDLRDALCEKADWPRDYRLASFSRLSYRSVATPDSDQILVLDPDGSPKKLLDIVTSNLPKGKAVKAAKDSFRNWIHEALARQSRSGNDGTKLPLATLREHLAIIGECRFLIKRRRITAILPSGEANEQLPLTGTGGAEFPKGWMLKTRDERTGKLSRLPAAAMQRIAEWSAQGQPRTIADLRATVPAESWPQGNWVFIVEEKQELHPEIADESSTFLELAYTDAQEIEGEVVVQLKGWHKLRRALAESQPDLWNEIQVAWQQPLTDAGQAAACRIDQIFDALTTCFTDQEIEDALRNKVSPALPDGSVKNIRDIVSSGFGHLSRKALKEIQPFLEQGNVFDKACGLAGYDHSAARRKVAPQKYLPSLETFLWKRISTKTGNVVWQEKRYKELSNPVVARSFNQARRVLNALIARYKRSPDYVSIELARDLAKPGEERNRIDRDNKRRAKEKEEGRDTFIQKYNIPDPSPTLMRKVRMREEQQCKCMYSGKEIRFDDLLLDEKYCEVDHVLPRSRTGDNSLDNQVLVLAGENQRKGKQTPFEWRGQSDSVWWHDFQARVRSLPLMSEKKKAKLLLEKLDEATENEFIARNLVDTRYMTRLFARMVRDGLLFANDDRATKEEISPDAPAEEKLERFRHNRVRTPQGGVIAKLRGLWGLSKVRADGDLHHALDACVIAAATPSLIQRVNEYHRFEEIVVVQSDGMAFWRETGERLPEKELTQFVDKTFPNPFAPHAFREEVLARLSPDGKTYWTKSGRKKVYDFSNYAPDTEATIGPVLVSRLVQRHIKSNELHSANPQALRRVSIPLTHLTQEILDPSRYPEQFIKPRHFLFESLGARLAMHEGNAEIAFSEGHPEPDSQKVIHAVSIPWLLLTPSERKKLEHLLPTQLGNGASKKFKAGLRKVKLTDLTLEQLKKDNLIDALGAQVYLRNASLYQALYDALSKPGAKAEEVFKNGFPRPETRNQTRLEIRMADNPGYRPPIVRSIGLPETANSGYYVRGGLVGRGVPVVVHLYRHRITGKYAFRSIYAMADAYEIMDKDDDIEAENCERIALHKNDLLRIDHPSLVFCFRELHRWSEPDNGGKMLTCIEVEPIFPDKMFQGNYCYYEESNDRPVLQLHDRSPFFLLQDGAVPLQPTVLVEREKIAKRKNSRDKAEPVLEYVLRADLNLEPKQQRTFDLCNNIKRKINDARLIQQLHVDVLGQVANGSVATGRLHGLA

SEQ ID NO: 16569 - protein, 1104 aa, unidentified
  REGION 1..1104: note = Cas Enzyme sequence
MPDKTLDNLIFGFDIGIASVGWCVLGDNRIIDLGVRCFDKAETSDGKPKNLERRTARLNRRRLRRRAWRLTKLTRLLRKAGINWDPRQPATISPWKLRLEGLDRRLSDNEWARVIYHICKHRGFHWISRAEEKKAEGDKKEGGRVKQGLTDTQRRMAEKGYRTAAEMVLAEFPDAQRNKAGEYRKALSRVLLAAELALLFQRQREFGNPYADADLEMKILGNGDRKSGLLWEQKPPLAGADLLEMLGKCTFEGDEYRAPKASFTAERHVWLTRLNNLRIFVDGYTRPLNEAERQIALPLPYKKAGDLTYKQLRAALTKRGLGDFDFAGLAKDKENDTLIKLPGWQTLRKTLKDAGLDAEWEGMASAALGGDPTLLDDIGRVLTIYKDTVEVEAELRKLPLPGGDRMIEALSQISFSNFHALSLKALRKIVPHMEAGLRYDEACQAAGYHHSQLHAAGAGEHKYLPSFYSHRDKVKKNMVPRKELDAPRNPVVLRALNQARKVLNALVCKYGSPVAVHIEMARDLSRPLDERKKIEKAQGEYRERNKKDKAAFAVEYGIAAKSREFEKFQLYHEQQGKCAYSLKPLDLHRVLFDIGYAEVDHILPYSRSYDDGKNNKVLVLADENQIKGNRTPYEYLMAMDVSGERWRNFVDFVESNRNFRLAKRQRLLRKDFSGKAAEEFRDRNLNDTRYIARFFKNYVERHLKLAPRIEADGSVLPVAKRCVVLNGQLTAFMRARWGLLKIRDESDRHHALDAAVIAACSHGMVKRVADYSRTKELEKARVGFPDPETGEILNPAMFRQLHQHFPLPWPHFRQELEARLFIDDPEKLRAQLEAFGTYPPEVLTAVRPLFVSRAPHRRNGGAAHMDTIYSQPERLKAQGGATQKVPLASLKLSDLDKLIDPHRNEKLYAAIRARLEAHGGRGDKAFPPDNPLRKPDRDGNPTGPIVRSVTKVIDKVTGIPVRGGIAKNSEILRVDVFRHKTDGKYHLVPLYPHQKTLPNRAIVASKDEEHWTLIDEQHFDFLFSLHHKDFLRVTLKERVVAGYFTGCDRSTGSISLLVHDRNSSDGKEGVIRTGVKTAVALEKFHVDVLGNIYPALLEKRRGLA

SEQ ID NO: 16570 - protein, 1114 aa, unidentified
  REGION 1..1114: note = Cas Enzyme sequence
LYINKEVICSFYLHVNTFFRYIDVVVYEIVEKQMTAFKPNPLNYILGLDIGITSVGWAMVEIDNEENPIRLIDLGVRVFERAEVPKTGDSLAAARRLARSIRRLIRRRAHRLLRARRLLKHEGVLRSEDFDENGFIKLLPNTPWQLRAAALDRKLMPLEWAAVLLHLVKHRGYLSQRKNEEQTADKELGALREGMKSNTQALQTGNFRTPAELALNKFEKESGHIRNQRGDYSHTFSRKDLQAELVLLFEKQKEFGNPYVSDDLKNGIENLLMTQRPALSGDAIQKMLGHCTFEPTEPKAAKNTYTAERFIWLTKLNNLRILNQGSERPLTDTERATLMEAPYTKKLTYAQARKLLGLDDTAFFKGLRYGKDNAESATLMEMKAYHAISRALEKEGLKDKKSPLSLSPELQDEIGTAFSLFKTDEDIAGRLKDCLQPEILDALLKHISFDKFVQISLKALRRIVPLMEQGKRYDEACAEIYGDHHGRRNSEETLYLPPIPADEIRNPVVLRALSQARKVINGVVRRYGSPVRIHIETAREVGKSFKDRKEIEKRQEENRKDREKAAAEFQEYFPNFVGEPKSKDILKLRLYEQQHGKCLYSGKVIDIRRLNEKGYVEIDHALPFSRTWDDSFNNKVLVLGSENQNKGNRTPYEYFNGKDNSREWLEFKARVETSRFPHSKKQRVLLQKFDEEGFKERNLNDTRYVNRFLCQFVADHMQLTGKGKRRVFASNGQITNLLRGFWGLHKVRAENDRHHALDAVVVACSTVAMQQRITRFVRYKEMNAFDGKTVDKETGEVLHQKTHFPQPWEFFTQEVMIRVFGKLGGKPEFEEADTPEKLRALLAEKLPSRPEAVHEYVAPLFVSRAPNRKMSGAHKDTLRSAKRFVKHNEKISVKRVWLTDIKLADLENMVNYKNGREIELYETLKARLEKYGGNAKQAFDPKDNPFYKKGGQLVKAVRVEKTQESGVLLNKNNAYTIADNGDMVRADVFCKTDKKGKNQYFIVPIYAWQVAENILPDIDCKGYRIDDSYTFCFSLHKYDLMAFQKDEKSKVEFAYYINCDSSDGRFYLAWHDKGAKEQQFRISTQNLVLMEKYQIDELGKEIRPCRLKKRPPVR

SEQ ID NO: 16571 - protein, 1165 aa, unidentified
  REGION 1..1165: note = Cas Enzyme sequence
MAVKQTSSEKLVFGLDIGIASVGWAVLGETRIIDLGVRCFDKAETAKEGESLNLSRRTARLMRRRLRRRAWRLTKLARLLKREGLIADVRKLKQQPAKGCKIPKLWQLRVHALDRALNNEEWARVLYHLCKHRGFHWISKAEAKAANSDKEGGKVKQGLAGTKRLMQEKNYRTAAEMALAEFPEAQRNKRGEYNKALSRELLCDELKELFSKQRAFGNPHAEEQLELAIVGNGDKKSGIFWVQKPALSGEALLKMLGHCTFEKNKYRAPKASFTAERHVLLTRINNLRIVENGSIRKLNDEERRIAIWQPYQQAGDFTYKQLGNALVKAGYLAKDSFKFAGLAYPSEAQKAEKAKNPESAAIVKVPAWQELRKTLTGAGLESEWREMADAALDGRPELLNQIAWVLSVYKEDDEVERQLGKLDLPNREKMIDSLMLVRFDKFSNLSLAALCKIVPEMEKGLRYDEACIKAGYHHSLPDLDDDNTRTQYLPPFYVGRDKDGRLKFNEDMDIPRNPVVLRALNQSRKIVNALIRKHGSPHAVHIEMARDLSKPFDERRRISGEQEKYRTRNENDKTTFAGHFNITGSPKGRDFEKWQLYREQQGKCAYSLNPIDLNRLLEKGYLEVDHALPYSRSYDDSKNNRVLVFTAENRNKGNQTPYEYLDGKNNSDRWLQFRSFVETNKTYRQAKRNRLIKKDFGEEESRGFRERNLNDTRYICRFFKNYVEQYLQLHEDSDARRCVVVSGQLTSFLRFRWGIVKVRSDSDRHHALDAAVVAACGHGLVKRLSDYSRRRELHHARNVIDMETGEIVDSAMLDKLEKDFPAPWEHFRDELLARLSIDDPQMLRTAVERLGTYPLEDLDKLRPLFVSRAPQRRNSGAAHKETIYGQPESLKEKGGVTQKVPVTSLKPADVDKLIDPHRNRKLYDYLRTWLEGKDTREKQAKTIEAGAGRGKDKRELTEAEKAEIENLRALPRKPDKQGNPTGPIVRTVTMVIDKLSGIPVRGGVAKNDTMLRVDVFRHKINHKFHIVPVYVHHAVTGLPNRAIVAFKDEDKWTEMEENHAFLFSLHSNDLVQITHKNGETMMGYYRSCHSGTGTVSIALHDRYAFGDKTTSKRMYEKNPNKVLPNDKRGLIESIGVKTATNVKKYNVDVLGNIYPAPPEQRHELA

SEQ ID NO: 16572 - protein, 979 aa, unidentified
  REGION 1..979: note = Cas Enzyme sequence
GLDQALPLTHFGRALFHLNQRRGFKSNRKTDKGDNESGKIKDATKRLDEEMAIKNARTYGEFLHMRRTSATDPKNVPTVRTRLSIARRDNAEKEEAGYDFYPDRRHLAEEFDKLWKAQAGYSPDVLTDELRDEISVIIFHQRPLKTPEVGLCLFSGSHGVPKKDKRIPSAHPLNQRRILFETINNLRVAARGEPARGLTRDERDAIVHALDNKAHTKSLSGMSMKLKALGKVIKLRPEQSFTLQTANRETIACDPVRASLSHPDRFGPRWSMLDADAQWDVVQRIRAVQSEAEHDALVKWLMATHGLDRDHAESTAKAPLPEGYGRLGLTATKRILAALEADVIPYSDAVKACGWHHSDGRTGEVLTELPYYGQILDRHVIPGTYNESDDDVTRYGRITNPTVHIGLNQLRRLVNKIITVYGKPDEIVVELARDLKLSEDQKRDVQRDIKKNTDAAIARGAKLSEMGVPDTGANRMVLRLWESLGDDVMTRNCPYSGKRISATMLFDGSCDVDHILPYSRTLDDGFANRTLCLKEFNRQKTDKTPWEAWGDTPAWATIEANLKNLPANKAWRFAPDAMERFEGENDFTSRALKDAQYLSRIARTYLDALYDGADGKSHVWVVPGRLTEMLRRHWGLNSLLPDKDGAVKAKNRTDHRHHAIDAAVVAATDRSLIQRISKMARKDEVNGAEEVARSVPPPWEGFRTDIETQLDRIIISHRADHGRIDPAARKDGHDSTSGQLHNDTAYGLGEGNSVVSRKPLLSLKSNDIEVTTKGANIRDVDLQRHLERITRGLDGKALEAALAEFAATAKLPDGTDNPYYGLRRVRLEETLQQGARVEVKDRNGKPFKAYKGDSNHCYEIWRMPDGKVVPQVITTYEAHQIDVEKKPHPAAKRLLRIFKRDMVAIEQDDKAIIGYVQSMHVANGLFIAPHTEANADARSRDKSDSFRLIQMSAGPLVKANARRVYVDEMGRLRDPGAPS

SEQ ID NO: 16573 - protein, 1079 aa, unidentified
  REGION 1..1079: note = Cas Enzyme sequence
MRLGLDIGTNSIGWWLYSTERGEISDVVDGGVRIFSDGRDPKSKASLAVDRRAARAQRRRRDRFLRRRAALIKRMADVGLMPHDPAEAKKLEQLDPYALRAEGLDRELPLTHLGRALFHLNQRRGFKSNRRTDRGDNESGKIKDATARLDQAMMAKGARTYGEFLHMRRTEAPTPRETLSVRTRLSVARRGTTDKEEAGYDFYPDRRHLSEEFDRLWSAQAAFHPKVLTDELHDEIRLIIFHQRPLKAPEVGLCLFTDEKRLASAHPLNQRRILLETVNALRIAARGEPTRALTLEERDTILHAINNRKHTKSLSGMAMKLKSLGKEIKLRSDQHFTLETANRDAIACDPVRASLSNPIRFGPSWSSLDAEAQWQVIRRIREVQSEADHDALVAWLEDRHGLDRAHAVMVVHAPLPEGYGRLGLTATTNILAELEAEVIPYSEAVLRCGWHHSDERTGEVLTELPYYGEILERHVIPGSFDSAKHDPEKQAPEYFGRITNPTVHIGLNQLRRLVNRIISVYGKPDEIVVELARDLKLSEDQKREVQRDIKKNTEAAIARGEKLEELGVPNTGANRMRMRLWEELGPAIGPRKCPYSGEAISAAMVFEEGICDVDHILPYSRTLDDSFANRTLCLREWNREKTNQTPWEAWGGTPKWSAIAANLKNLPSNKSWRFAPDAMERFEGESDFSARALKDTQYLSRIARTYLSALYDGGDGKSHVWVVPGRLTEMLRRHWGLNGIDALADSVKETGKAKKRTDHRHHAIDAAVIAATDRSLIKRISDMAKRNELYGAEEVVRSVPPPWEGFRADVAAQIRSIIVSHRADHGRIDLAARKKGKDSTSGQLHNDTAYGIAEDGVVVTRKQLLSLSANDIAISKRGANIRDVDLQRHLARVTRGLSGKDFETALSNFAAERKLPDGSDNPYIGIRHVRVEEVLNVIPIKNKEGEIYKGYKPDSNSRFEVWKLPDGSLTHHVVSTFDAHKDDASKPHPAAKRLLRLHKGDMVRLESSKIGPVVATVEKFNINGGIEMVPHNEANASDRYRKLKEDLYIRLNAVTLIRSGARRVLVDEMGRVRDPGPIA

SEQ ID NO: 16574 - protein, 963 aa, unidentified
  REGION 1..963: note = Cas Enzyme sequence
PAARFKSNRKTDRGDNESGKIKDATARLDHAMMAKGARTYGEFLHMRRAAAPDPRRVPSVRTRLTVARRDNADKEEAGYDFYPDRKHLSEEFGKLWATQAHYAPDVLTDDLRDEIATIIFHQRPLERPEVGLCLFTGQHDVPERDKRIPSAHPLNQRRILIETVNNLKVAARGEPSRLLTREERDQIVHALDNKKQTKSLSGMTMKLKALAKVIKLRPEQSFTLETANRDAIACDPVRASLSHPDRFGARWSTLESAGQWDVVQRIRAVQSDAEHADLVRWLMDVHRLDRTHAEETAKAPLPDGYGRLGLTATTRILEALESDVLTYGTAVAACGWHHSDGRTGEALENLPYYAEILERHVIPGTGDPNDDDVKRYGRITNPTVHIGLNQLRRLVNRIIEVYGRPDEIVVELARDLKLSEDQKKDVQRDIKKNTEAAIARGKKLEELGVPNTGTNRMKLRIWEDLGPAIGPRRCPYTGQPISVSMIFTPEVDVDHILPFSRTLDDGFANRTLCLKEANRQKTNKTPWEAWGGTDQWETIAANLKNLPVNKAWRFAPDAMEQFEGENDFSARALKDTQYLSRIARAYLDALYDGGDGKSHVWVVPGRLTETLRRHWGLNGLTVLTDSDAQTVKAKNRTDHRHHAIDAAVVAATDRGLIKRVADMARRDELNGAEEVARSVPPPWEGFRDDVSAQVAQIIVSHRADHGRIDPTARKSGRDSTSGQLHNDTAYGIGQNGTVVSRKPLASLSPNDVAVTKRGANLRDVDLQRHLARVTRGLDGKAFEAALLAFAASPILPDNTDNPYFGLRRVRLEETLQESARVEVANQEGRPYKAYKGDSNHCYEIWCLPDGKIKPQVVTTYEAHQSGAEKKPHPAAKRLMRIFKRDMVMLERDGETIIGYVRKMKQNGSIFVAPHTEANADARDRDPKDDFKLIQLGAGSLLKAKARRVIVDEMGRLRDPGPPL

SEQ ID NO: 16575 - protein, 1080 aa, unidentified
  REGION 1..1080: note = Cas Enzyme sequence
LRLGLDIGTNSIGWWLYATDEEKITEVIDGGVRIFSDGRDPKSKASLAVDRRVARAQRRRRDRYLRRKAALMKRMAAVGLMPADPTEAKALELLDPYALRAAGLDQALPLTHFGRALFHLNQRRGFKSNRKTDKGDNESGKIKDATKRLDEEMAIKNARTYGEFLHMRRTSATDPKNVPTVRTRLSIARRDNAEKEEAGYDFYPDRRHLAEEFDKLWKAQAGYSPDVLTDELRDEISVIIFHQRPLKTPEVGLCLFSGSHGVPKKDKRIPSAHPLNQRRILFETINNLRVAARGEPARGLTRDERDAIVHALDNKAHTKSLSGMSMKLKALGKVIKLRPEQSFTLQTANRETIACDPVRASLSHPDRFGPRWSMLDADAQWDVVQRIRAVQSEAEHDALVKWLMATHGLDRDHAESTAKAPLPEGYGRLGLTATKRILAALEADVIPYSDAVKACGWHHSDGRTGEVLTELPYYGQILDRHVIPGTYNESDDDVTRYGRITNPTVHIGLNQLRRLVNKIITVYGKPDEIVVELARDLKLSEDQKRDVQRDIKKNTDAAIARGAKLSEMGVPDTGANRMVLRLWESLGDDVMTRNCPYSGKRISATMLFDGSCDVDHILPYSRTLDDGFANRTLCLKEFNRQKTDKTPWEAWGDTPAWATIEANLKNLPANKAWRFAPDAMERFEGENDFTSRALKDAQYLSRIARTYLDALYDGADGKSHVWVVPGRLTEMLRRHWGLNSLLPDKDGAVKAKNRTDHRHHAIDAAVVAATDRSLIQRISKMARKDEVNGAEEVARSVPPPWEGFRTDIETQLDRIIISHRADHGRIDPAARKDGHDSTSGQLHNDTAYGLGEGNSVVSRKPLLSLKSNDIEVTTKGANIRDVDLQRHLERITRGLDGKALEAALAEFAATAKLPDGTDNPYYGLRRVRLEETLQQGARVEVKDRNGKPFKAYKGDSNHCYEIWRMPDGKVVPQVITTYEAHQIDVEKKPHPAAKRLLRIFKRDMVAIEQDDKAIIGYVQSMHVANGLFIAPHTEANADARSRDKSDSFRLIQMSAGPLVKANARRVYVDEMGRLRDPGAP

SEQ ID NO: 16576 - protein, 1064 aa, unidentified
  REGION 1..1064: note = Cas Enzyme sequence
MRLGLDIGTNSIGWWLYATEGTEITEIIDGGVRIFSDGRDPKSKASLAVDRRAARAQRRRRDRYLRRKAALMKRMAAVGLMPADPVEAKALELLDPYALRAEGLDRALPLTHFGRALFHLNQRRGFKSNRKTDRGDNESGKIKDATARLDQAMMTKGARTYGEFLHMRRAAATDPKNVLTVRTRLSIARRDNAEKEEAGYDFYPDRRHLSEEFAKLWAAQAAYFPEALTDDLRDEMSVIIFHQRPLKTPEVGMCLFTDEKRIPSSHPLNQRRILLETVNALRVAALGEPARKLSREERDMIIHALDNRPFTKNLSGMSMKLKALGKVIKLRPEQSFTLESANRDAISCDPVRASLSNPDRFGPRWSMLDADAKWEVVQRIRAVQSESEHDELVKWLIITHGLDRDHAEAVAHAPLPEGYGRLGLTATKNILAALQADVIPYSAAVAACGWHHSDGRTGEVLLNLPYYGQILNRHVIPGTYDENDDDVTRYGRITNPTVHIGLNQLRRLVNRIISVYGKPDEIVVELARDLKLSEDQKRDVQRDIKKNTDAAIVRGKKLEEMGVADTGANRMVLRLWESLGEDVMARNCPYSGKRISAAMLFDGTCDVDHILPYSRTLDDGFANRTLCLKEFNRHKTNKTPWEAWGNTPAWDAIEANLKNLPGNKAWRFAPDAIERFQGENDFSARALKDTQYLSRIARAYLDALYDGADHESHVWVVPGRLTEMLRRHWGLNSLLPDRDGAVKAKNRTDHRHHAIDAAVVGATDRAIIKRISDMAQKDEVNGAENVARSVPPPWDDFRTDIKSQLDRIIVSHRADHGRIDLAARRTGKDSTSGALHEATALSIIDDQNVAVRIPLLSLSAAHFEEGGRSGWVRDPQLRAALHIATNGKESKAFEAAVLSFAAKPGPYHGISRVRIVKPLQHTARVYVPADLPIKAYQGGSNHRYEVWQLPGGKVVHYVVSMFEAHQGKMTRPHPAAKRIHKFMKGDLVWLEESKFGPVIATVEKFNGKGVIELVPHNEANASDRYRKTKEDLYVRLGAATLLKAKARRVHVDEMGRLRDPGPPK

SEQ ID NO: 16577 - protein, 1077 aa, unidentified
  REGION 1..1077: note = Cas Enzyme sequence
MQINNSPYTLGLDIGMASVGAALLLPDQQRILALHVRTFDKAETAKEGESLNKIRRDSRLTRRRIRRRAHRLLRLARLLKRTGLIESANPDAFALPGVSPWDLRAAGLDRLLEPKEWATVLYHMVKHRGFQSNRKSEAKADEKAGEMLSGVNRNQALLKETGYRTVGELAARHAAFAEAKRNKGGSYSHTFARADLEVELNLLFQRQGALGNEFTEPGFRSAVSDLLLARRPALSGENLLKMVGRCTFEKNEFRAPKASYRAERFVWLGKLNNLKIVGAGNARPLTETERRTIIDLPFTQAKLTFKQVRKALGLEDHERFNLLSYRPDPKGKDKDPEEATFFEAKSFHRLRKAYESAALNAEWQRDALDPDRLDTLAYALTCYKEDAESRHWLSAQGIEAPIIEAVLEESFDQFIHLSQKALKAILPHMEAGRRYDEAAQAAGYNHSQPDDAPDKRSYLPPPDKDSIRNPVVYRALNQARKLVNAIVREYGPPAAVHIELARDLSKPFDERRRIEREQKEYREEKEKSAKRFIETVGREPKRDELLKMRLYHEQGSQCPYCQSALDVGRLFDLSDVYAQVDHALPYSRSFDDSLNNKVLVHTKCNQDKGNRTPYEFFDGENDGPRWRSFVAWVQGNKSIRQAKRNRLLRVNFGEAEATEFRERNLNDTRYICREFKHMVETHLQWHPNSAEGNRCVVLSGQLTSLLRARWGLIKVREEGDLHHALDAAVIAAANRGLVKRMADYSRRNELGMVRERYVDPETGEVLDLAGLRQLEEHFPEPWPHFRRELLARLSPDPASRLDGVPGYDEALRAAVRPVRVSRAPTRRGLGAAHQETIRSNRGGGQSAVKTPLTALTLKDVENIAGFGRDTALIEAIRAGLEAFGGDGKKAFDSKQPPLRKPSKDPEKAPIIRSVKLLATQKSGIPIRGGIANNGAMLRTDIFTKGGKFHAVPVYASDAVKTELPNRAVVAFKPEEEWTVMDETHEFLFSLYPNDWVSIRYKNAPVREGYYSGLNRATGAIDLWVHDRNQSQGKKGMLEGNGIKTALAVEKYHVDHLGRLHRVHKEARQPVNGKQRKA

SEQ ID NO: 16578 - protein, 1125 aa, unidentified
  REGION 1..1125: note = Cas Enzyme sequence
MESRYTLGLDIGIASVGWCLLGENRIIDLGVRAFDKAETAKEGDPLNLTRRMARLARHRLAQRAWRLKKLTRELKRHGLIDDTRFFQPTNPVTTSPWQLRVQGLDRKLETDEWARVIYHLCKHRGFHWVSRADKKKSEGDAKGEGGRVTAALNDTSKRIDGYRSAAEMVIHEFLKPAQTDNGLPLLDKIGQPIPSGAARNKRGEYTKALSRVLLGDELKQLFAEQCRLGNPLASESLETAILGNGDRKSGLFWMQKPPLSGAALLKMLGKCTFEKGEFRAPKASFTAERHVWLTRLNNLRIVVDGETRPLDAEERAIALPLPYKQAKELTYKQLHSALVKSGRLPETFEFAGLRPTKDGKDPKSERLVKLPAWQELRATLKAAGLETEWESLAGAAGRGQPQILDEIARVLSIYKDDDEARAELNKLALPNREAMVEALLDIRFDKFHALSLMALYKIVPRMEAGLRYDEAVAAIPEYGHHSQLHKPGEGASRTLPPLYAGRDPDGRMRFAEDEDIPRNPVVLRALNQARKVVNAIVRRYGSPMAVNIEMARDLSRPLDERNKIRKEQEDYRARNEKDKAFFAEEFGQAPKGGEFEKFRLYREQLGKCAYSQEGIVIERLLEAGYVEIDHALPYSRSFDDSKNNKVLVLAKENRDKGNRTPYEYLGGEENSFRWQQFVAFVESTKSYRLAKRSRLLRKDFGAKEAEDFKERNLNDTRYICKFFKNYVERHLKLADGSEAQRCVVLSGQMTAFLRARWGINKIRSESDRHHALDAAVVAACTHGMVKRLADYSRTKELAQVHTGFVDTTTGEIVDPAIFRQLKQHFPEPWPHFRHELEARLKIDNPALLREEMTHLGTYDTTALDEIRPLFVSRAPQRRNGGAAHKDTIYGQPEKLRENGSVTQKVPLTSLTLKDLDKLIDPHRNARLYAAIRERLEAHGGKGDKAFPPDNPLRKPARAGKPTGPVVRTVTMLIDKLSGIPVRGGIAKNDSMLRVDVFTKAGKFHLVPVYVHHKVAGLPNRAIVAFKDEAEWTLIDDSFAWCFSLYPNDLVKIIQKGKSPILGYYSSCHRGTGNVNVWAHDRNSDIGKDGMLEGIGVKTALVLEKLHVDTLGNIHPAKPEPRRGLA

SEQ ID NO: 16579 - protein, 1122 aa, unidentified
  REGION 1..1122: note = Cas Enzyme sequence
LDSVHPRRDNLIAATALTPESYNWTKSTPKETRIAMRKNQMLPYTLGLDIGMASVGAALLTDRRILGLHVRTFDKAETAKEGDPLNKTRRESRLTRRRIRRRSHRLLRLVRLFKRTGLIAEAHPEAFALPGVSPWDLRADGLNRLLTPDELAAVLYHLVKHRGFQSTRKSEAKDDIKAGQMLSGVAANQQRCQEKGWRTVGEMAARDEAFAAAKRNKGGAYTHTFARADLVAELDFLFKQQASFGNPYISADFENSVEQLLLARRPALAGDALLKLVGKCPFEPTEYRAPKASYSAERFVWLTKLNNLRISEVGEQRALTAGERQILLGLPYALAQLTYRQVRQKLGLADTSKFTALTYRGDKDPESAPFFGAKAYHELRKAYEKAGLEKSWQRDALDPARLDRLAWALTCYKTDDDIRAHLAEHDVEPEITEAVLGESFDKFVGLSLKALGKILPFMEQGQRYDEAVQSAGYVHHSQLNRDAAKAQYLPPPDKDQIRNPVVYRALNQARKLVNAIVREYGPPAAIHIELARDLSKPMDERRKIEREQKEFQERRAKDRNAFVEQFDFDPKGLELQKYRLYREQMSQCAYSQKEIVVTRLFEPGYAEIDHALPYSRSFDDGQNNKVLVLTAENRNKGNRTPYEYLDGASDSPQWQQFEAWVLQNKAYRRAKRDRLLRKHFGEDEAEGFRERNLNDTRYICRAFKTMVETSLQWHADSDAKNRCVVVAGQLTSLLRARWGLIKVRENGDLHHALDAAVIAASSRSLVKRMADYSKRNELAQVRDRYLDPETGEILDIAAMRQVEEHFPAPWPHFRSELLAWLSPDPTHGLDGLAQYLPDELEHLRPVRVSRAPTRRGLGAAHQETIRSIGHEGRLLDQGRSAVKTPLTALKLKDLENIVGYSHSHNHAMIEAIRKRLEANGNDGAKAFKAPLFKPSSANGYDADKSHVGETNQRAPQIRSVKLLATQKSGIPIRKGIANNGSMLRVDVFGKGGKFYAVPVYVANAAQTKLPNRAVVAYKPETEWPEMDEKQFMFSLHPNDWVTVKLRTETITGYFAGMDRSTGAISVWAHDRNQNIGKDGQWRGVGMKTALTVEKHHVDLLGNLHRIHAEKRLPIHCGKASTG

SEQ ID NO: 16580 - protein, 1076 aa, unidentified
  REGION 1..1076: note = Cas Enzyme sequence
MALNTLQPYTLGLDIGMASVGAALLAEQRILGLHVRTFDKAETAKEGDPLNKTRREARLTRRRIRRRAHRLLRLVRLFKQTGLIAEARPEAFALPGVSPWDLRAEGLDRLLAPAEWAAVLYHIVKHRGFQSTRKSEAKDDEKTGQMLSGVAANQTRCQEKGWRTVGEMAARDETFSAAKRNKGGAYTHTFARADLVAELKLLFKQQASLGNPYVSTKFENGVEQLLLARRPALSGDALLRLLGKCPFETTEYRAPKASYSAERFVWLTKLNNLRISEVGEQRMLTAGERQTLLGLPYTLAKLTYKQVRQKLGLAETTKFNTLTYRSDKDPEGATFFEAKAYHALKKAYREAGLENPWQRDALDPTRLDRLAWALTCYKTDDDIRAHLAEHSVEPEIAEAVLGESFDKFVGLSLKALGKILPFMEEGQRYDEAVQSAGYAHHSQLHQDSAKTRYLPPPDKDQIRNPVVYRALNQARKLANAIVREYGPPAAIHIELARDLSKPMDERRKIEREQKEFQERKAKDREAFIDQFGFEPKGLDLQKYRLYREQMSQCAYSQKAIDVARLFEAGYAEIDHALPYSRSFDDGQNNKVLVLTAENRNKGNRTPYEYLDGESNSPQWQQFEAWVLSNKAYRRAKRDRLLRKHFGEDEAEGFRERNLNDTRYICRAFKSMVETHLQWHPDSDAKNRCVVVAGQLTSLLRARWGLIKVRENGDLHHALDAAVIATANRSLVKRMADYSRRNELAQVRDRYLDPETGEILDIAAMRQVEEHFPAPWPHFRSELLAWLSPEPAHGLDGLAHYPTEELEQLRPVRVSRAPTRRGLGAAHQETIRSVGREGRLLADGQSAIKTPLASLKLKDLENIAGAEDPRNAAWIAALRERLEQFKGDGAKAFAANQPPLTKPSAPGKNAPAIRSVKLLATQKSGVPIRKGIANNGSMLRVDVFSKGGKFYAVPIYVADAARAELPNRAVVAFKPESEWPEMDEAYAFLFSLYPNDWVCLRFKNAPNREGYFSGLNRATGAIDIWVHDRNPSTVKNGLFEGNGMKTALAVEKYHVDLLGNLHRVHTETRQSIHRKGR

SEQ ID NO: 16581 - protein, 1116 aa, unidentified
  REGION 1..1116: note = Cas Enzyme sequence
METRYTLGLDIGIASVGWCLLGEDRIIDLGVRAFDKAETAKEGDPLNLIRRQARLARHRLAQRAWRLKKLARELTHHGLIADKRLFHPENPSVVSPWQLRVAGLDRLLAPEELARVIYHLCKHRGFHWISRAEEKQADGDAKSEGGKVKQGLAGTKRLMEEKGYRSIAEMVLAEFPDAQRNKRGEYTKALSRVLLGDELRKLFAEQGRLGNPFASESLEAAILGSGDRKSGLFWMQKPPLSGAALLKMLGKCTFEKDEYRAPKASFTAERHVWLTRLNNLRIVFDGETRPLNAQERAIALPLPYQQASDLTYKQLHNALVRSGLLPETFEFAGLRHTKDGKDPKSEKLVKLPAWQELRATLKAAGLETEWEGLAGAACRGQPEILDEIARVLSIYKDDDEARAELSKLALPNHEKMVESLLDIRFDKFHALSLKALYKIAPHMEGGLRYDEACAEAGYHHSQLHKPEDKKELYLPPLYENHRGKEPGEVDKMIFSERIERETLGGIPRNPVVLRALNQARKVVNAIVRRYGSPLAVNIEMARDLSRPLDERNKIKKDQDEYRARNERDKALFTEEFGQTPKGGEFEKFRLYREQLGKCVYSLDAIDLERLLEPGYVEIDHALPYSRSFDDSKNNKVLVLARENRDKGNRTPYEYLGGAENSLRWQQFVAFVESTKAYRLAKRSRLLRKEFGVKDAEEFKERNLNDTRYICKFFKNYVERYLKLAEGSEAKRCVVLSGQMTAFLRARWGIHKIRSESDRHHALDAAVVAACTHGMVKRLADYSRTRELTQVHTGFVDTTTGEIVDPAMFRQLKQHFPEPWPHFHHELEARLKIDDESVLRNEMTHLGTYDAAALDELRTLFVSRSPQRRNGGAAHKDTIYGQPEIMREKGSVTQKVPLASLTLKDLDKLIDPHRNARLYDAIRERLEAHGGKGEKAFPADKPLRKPDRDGNPTGPIVRSVTKVIDKLSGIPVRGGIAKNDSLHRLDVFTKTSKFYLVPSYAHHRVAKALPNCTADGETQVDDSFQFQFSIHPNDLVRVALGGGESIIGYFKGYGGPPNPSNITLQVHDRNKNGHRRANDKGEIPSIGVRTALALEKFHVDVLGNIHPAPPEKRRGLA

SEQ ID NO: 16582 - protein, 1114 aa, unidentified
  REGION 1..1114: note = Cas Enzyme sequence
MNKTYTIGLDIGIASVGWCVFGESRIIDLGVRAFDKAETAKEGESLNLARRSARLMRRRLFRRAWRLKKLARLLKNEGLIADTKLFNLEQTFSNSLWHLRVDGLDRRLKTEEWARVIYHLCKHRGFHWISRAEEKQAEGDGKSEGGKVKQGLAGTAKLMDEKGYRTAAEMVLAEFPEAQRNKQGEYRKALSRVLLAKELALLFAKQRAFSNPHAPDELETAILGTGDRKSGLFWQQKPALAGADLLKMLGSCTFEKSEYRAPKASFTAERHVWLTRLNNLRIVTDGVTRQLSEQERQLCLPLPYRQAGDLTYKQLGSALTKAGLLEPGSFKFIGLAYPTEAQKIEGKAKDPESAALLKIPAWQELRQTLTKAELSDEWEKLSGTALCGQPEIFDKIAWVLSVYKDDDEVRFELAKLPLPNSVEMIEALLSCPRTAFSKFHALSLKALRLIVPHMEQGLRYDEACVQAGYHHSQLHKVGEGEHKYLPPLYSGRDDDGRMIFAEDADIPRNPVVLRSLNQSRKVVNAIIRRYGSPSAVHIEMARDLSRPFDERNKIKKDQDEYQARNQRDREQFFELFGHPPKGLEFEKWRLYREQNGQCAYSQKPLAASGDVAEIFLDGSTEIDHALPYSRSFDDSKNNKVLVLTRENRDKGNRTPFEYLVGAENSERWQRFVSFVESNKAYRLAKRTRLLRKDFGAKESEEFRERNLNDTRYICRFFKNYVEQHLKLAEGSTAKRCVVVSGQLTNFLRARWGLLKVRSVSDRHHALDAAVVAACSHSMVQRLSNYSRSRELEQVRDGFVNIETGEIINPAMHQQLREHFPDPWPYFRHELEARLNIDSPELLREEMDRLGSYTEEELASLKPLFVSRAPQRRNGGAAHKDTIYGQPQKMKENGSVTQKVSLASLALKDIDSLVDPHRNVKLYGAIRERLETHGGKADKAFPASNPLRKPDKDGNPSGPIVRTVTKVIDKLSGIPVRGGIAKNDSMLRVDVFAKAGKFYLVPVYVHHRVTGLPNRAVVGKKDESQWLVIDSVYEFKFSLYPNDLFSLTIDGEALFGYFSGININDCGLKYFPHDHKSVESLRKKGVSSAKDFRKYDVDVLGNIYPAPPEKRRGLA

SEQ ID NO: 16583 - protein, 998 aa, unidentified
  REGION 1..998: note = Cas Enzyme sequence
DRLLDAEAWARVIYYLCTHRGFHWVSKAEEKQAEGDSRGESGKVKQGLAGTAKLMKEKGYRSVAEMVLAEFPAAQRNKQGDYGKALSRVLLAEELALLFQKQREFGNPHASAELETAILDRKTGLFWAQKPALAGNDLLKMLGKCTFEKAEYRAPKASFTAERHVWLTRLNNLRIVVDGTTRSLNEQERLVALPLPYEQAGDLTYKQLHAALVKKGLLPETFDFTGLRADKGKDPKSEKLIKLPAWQELRSLLKKEGLETEWQGMASAAMDGRPALLDQIAWVLSVFKDDDEVVTELGKLPLQNTDKMIDALLNIRFDKFHALSLKALRQIVPHMENGLRYDEACVQAGYHHSQLHKVGEGEHKYLPPFYEGRDRDGRMRFREDADIPRNPVVLRALNQARKVVNAIIRQHGSPQAVHIEMARDLSRPFDERSKVKKEQDEYRERNEKDKAEFASQFGIIGNPRGGDFEKWRLYREQQGKCAYSIEPIDLNRLLEPGYVEVDHALPYSRSFDDSKNNKVLVLSKENRDKGNRTPYEYLDGEGNSARWLKFATFVETNKAYRLAKRSRLLRKEFGKKESAEFRERNLNDTRYICKFFKNYVERCLQLASDSEAKRCVVLSGQMTAFLRARWGINKIRAESDRHHALDATVVAACSHGMVKRLSDYARKKELEQVKEGFVDRETGEIVNPAMFDLVNRHFPNPWPHFHHELEARLKIDSRALLNEEMARLGTYSPEALAELKPLFVSRAPQRRNSGAAHKDTIYASAPTTEQPQRVTQKVALSSLTPKDLDKLIDPHRNEKLYSAIRERLEAYGGKGDKAFSSSNPLRKPDREGNPTGPIVRTVTMVIDKLSGIPIRGGIAKNDSMLRVDVFAKAGKFHLVPVYVHHSVAKELPNRAIVAFKDEDEWTLIDESFDFRFSLHPNDLVQVKLKGNTSLGYYSGCNRSTAAINLWTHDRNILVGKNGMIESIGVKTALSVAKFHVDVLGNIYPAPPEKRRGLA

SEQ ID NO: 16584 - protein, 998 aa, unidentified
  REGION 1..998: note = Cas Enzyme sequence
MRLARLRSWALRQGLPDPYQLMRRKEFQCQPGEFNVGRKKLKITTGKKKDELGSWVEAVQSGVRNDPEAFVIALTQLFQKRGFQWAGSDLQEMTDDELAKELDEIDGVRITPSVAEQIENEVRRRADNPQPEYEGKIKDLGRLLQKALDRERQPRTAEHRSIIEDDLRRLVDAYTSQHCPQNTIAWTKALVRLLNKRVRKLRFENRVLSGCSWCGKNTPKKSGPQVRELAYRAAVTNLRADAANSRRPLSDAERKYFFDLWDRRKSDKPPSPETLKKKLLALRSQTEMAKQLWELLGSPAPLGRTNLCHQHLKMQAEGAFLCSAHHAICQQSSADFGRHVLQERVRHVGPAVRGAPNPCREAHDQRVIQRIERILFESNGDDVPDLITVEFPRPNTAQTYNCPSCTEKLAIDLRVRYRLRDVKVVNVEPREEVFRFTCPACAVVVQLKATRQITIRGERRRIPVTLKNTDAFLRKAKGGLKDKKIRTYLAETRSTCVYCGTRIDRSTIQIDHIFPEADSGPGIDSNLVASCLNCNQKRKGKQTPWRWKGEPDRKWWQEFEKRVRKLPLPLRKQQILLSTEDIYPENPTALARAGARPRAFIEELKTMLERHGVKRDQIADNYEEGKLVIQAIDGWMTSQLRRSWFKNHDDTPNFPEKNVWDLRNHAQDAALIAACPPHTWRERIFAFGPYGDLAPNGLAPNWAEFTSRHYGKKPIVSVLGSYETRWRRRFANTEFWRDPLGAHEKPVKGELLKDLTAEQAKNIRSRALRLKFRAICKKYRVKDDSVLPAEALAELQARLKAKKISETDVRRVQCSSHKGGKPFVIHPSDGPPRITEAKPAADGVAIWLANGKTLEKANKEDLVFSLVRGRPLQQFNVPREEPRIEEGATRLVLWKRHDLRRLPAKGEHQAGWYKLKEFYDDKVILLPEQAIPKDLAERMKLKKDGQEREVPSKERELRKTELLQYFKKGLLSVEGGNSQSITLVDFHGGKHHDPGTKS

SEQ ID NO: 16585 - protein, 1275 aa, unidentified
  REGION 1..1275: note = Cas Enzyme sequence
VRNNSNFYKKAKILIKNPAPYILGLDIGTNSIGWAVVDCNLTEDNHQGIYAGFEPVSLRALNARIFQEMVEAKTQVPKNQKRRTARGARNRRTYYQKRRRDLINALIENGLLPRDYLKNLAKERVLNGIDRRFAERKLNKTWSRTWSEQEKSYSSPYAMRYFALKETLEPYELGRLLLHLQRRRGYRSNRGAKYVELIEKLNLTLEDEEHDNKQTSSEEKSEEKKEPRKVLDAISQLDDKLGGRTIGQFIWEESQATGIPPQRITLFRYEKNKEPKGETLTERLQYRAKREMHETEFDKIWEEQKKYHDFPPEMESAIKKAIFHQRPLQSQKGKVGSCNIYPNKKRAAVMRLEFQEFRTLQVINNIKVDGQPLTDEQRQALLSMADDPEHLNQKGRISWSKVKSTPEINKKSLNYGRGEDGKSEKAGLPGNRTIQAISKSIGYDRWKQMDKKKQTLLIEDLLSINNKRALYDRLVNHWKFEPWDGQKSEALDLAMNEELEAGYGKHSLKAINALLPHMRNGRDYYAAVEKIGEIESITPSIQTTDSTYLLPVKAVPNIANPIVQKALYEMRRVINSIIKRYGKPAIIRIEMAREMKASKKHRAELAAQQQENLRLKLEAEKEILEHLKNPNIALRKLRGGRSKVKDGDIKKYIMWHNEQDEQCPYSGKPISFNQLFSGATDIDHILPYTGYRENHMNTVVCLLKENQNKGKRTPFQTWGADSDRWDQIEKFAKEKYKYKGKLYSKQLKILEKNYKPEEIDDFVERQLNDTRYIATATKAMLKHYGVPIDVNNGAATSQLRGRWGLNEILPRDPDADIRRTTPDDGIQRYDKKIEHKSERKKALKSRRDHRHHAIDAFIVAMTDRAMLKEMVDAHQKKQEQSHDQTRQQTREDRTKETRLKLPKTWKDGDVDDLHHLLKQKLNATVVSHMVKRKVWGTLHDETRYGKSHFNQELDIEGMGESDLKKVIKIAETGSDSNQDWIADENLRSVLLQWATETLKKKPSDRSLPCYRNKEWKKINYQTPCITIRKEISGELLSGLAETWSPGSGTWIAEESIHNHLYQWLDKNKLVGKTAKEITKCLKNFPPCLPNRHGKPVSMYRVRMARAMSNSYTKIAGCYMEPGSNHHFVLFHNGKQGKEKKRKIHMVTMLEVAQRASAREMIIDKTPSPEWEGEWYYELALCVNDMVVCEDLSIFDGKSNDGKSNFATEHKETPWFRVQKMSSNSEDKVDMTLRHHSISGTDTKWGEWRIASLNKIACRKVQIGNLGLLPDDPQDH

SEQ ID NO: 16586 - protein, 1155 aa, unidentified
  REGION 1..1155: note = Cas Enzyme sequence
MNYNDCIIRENAMTSKHKNLGPLTFGLDIGIASVGWAVLGENRIIDLGVRCFDAAETAKEGESLNLVRRSARLLRRRLRRRAWRLTKLARLLKREGVIAEANLFKCKIEKNTPVPKSSWQLRVDALDRPLTAEEWARVIYHLCKHRGFHWISRAEEKAAEGDTKSEGGKVKQGLAGTKRLMHEKNYRSAAEMVLAEFPEAQRNKQGDYSKALSRILLGDELKALFEHQRKLGNTYATEKLEAAILGNGDKKSGLFWAQNPALAGSDLLKMLGHCTFEKTEYRAPKASFTAERHVWLTRLNNLRIVVDGTTRPLNEAERRIALLMPYQQAGDFTYKQLRTALTKAGFLPESFRYTGLSYASGQKADEKTKDPESATLVKFPAWQELRKTLEKKELASEWQKISTDALDGKPQQLDDIAWVLSVYKDDDEVKAELLKLNLPNAEKMIDALLDIRFDKFSNLSLKALRQIVPFMEQGQRYDEAVANIPEYGHHSQLHKVGAGEHKYLPPFYKERDKTGRMVFNDDMDIPRNPVVLRALNQARKVVNALIKKYGSPHEVHIEMARDLSRPLDERRDIEKLQKEFQVEKEKGLEHFISVVKREPKRDELLKMRLFRQQLDQCPYCQSELNIHRMFGDSDDMYTQVDHVLPYSRSFDDSMNNKVVVHTKCNQDKGNRTPFEYLDGKDNSERWRQFVGFVEGNKSYRLAKRSRLLRKDFGDKEAKEFRERNLNDTRYICKFFKNYVEQYLQLHEDSEAKRCVVLSGQMTSFLRARWGLVKVRSDSDRHHALDAAVVAACNHSMVKRLSDYSRRKELEQVREGFVDVDTGEIVNPAMFQQVQEHFPNPWPHFRDEVKLRLSMDDPALLRSEMEKFGTYSPEALQALHPLFVSRAPQRRNSGAAHQESIRSIGKENRLIDAGTSAIKTLLTKLKYRDIENIVGWNDPRNAAWVDELRGRLEPHKSEDTKQNKCAGAKAFATGQPKLYKPSAENKVAPEIRSVKLLSTQKGGVLLRGGVADQASMLRVDVFEKGGKHYLIPVYQSDRLKKVELLNRAATAAKPRDEWTLIDETYSFKFTLNKNDAVLLKNRDREYFGYFAGLNVATAAIDIASHDNNANINLGKTWQGTWPGNGLKTGILRFEKFNVDVLGNRYPAPPEKRRDLA

SEQ ID NO: 16587 - protein, 1415 aa, unidentified
  REGION 1..1415: note = Cas Enzyme sequence
FKLSIRNKDKSYRHAFLRTDLRDELETLFIEQERLGNSFTNIAIPKDKAPLKLVNIGGEKKEVPPTFKDQVFALFDMQKPPISTEQMKGLIGDCEFEKGEKRAPKNSFSNERSTWLQKLNGIKVKRFGKEGFLTPEERLALIALPYKKEKITYGDIRDALCQETGFSRDWREASFNMLSYRPKIKADAGWINVIDSGNVTALNKYNNFSDKDQPKEAKKKLKGTLLNSSITYAELRTLFNVPEHCKFQHAHKEQELIQKELEVVHALPFSADDSEYILRDGITYKINLQKTNKSNKLSERSYALLAELKRSKPDATLADLRMIVEQAEPFHEPWLFEFNQTARVEIPPSIEAKTRVPIEYENIQSVEDSTCIELKGWHKLRKALAEKYPDFWQSLAVAYQQPTSTQGKVTANQLDEVVRILAIYQTDFERKRELVLLDLKEEVIGELLKINLKDFRNLSIKALGKILPFLEDGDVFSKACEQADYNHSQRPAQQRKTTLDPFETYQFERWRSRNDGGKALMSKKETRYKDLNNPTVARALNQARRVLNALVEKYGSPAYINVELARDLSRSKRLRDRIKNEQNTRRDERVNADTIIRETFKDKYGINNPSDRQITKVRLYEEQNQQCAYSYPEKSLDIRLILSDENYVQIDHIFPKSSTFDNSLNNRVLVLSGANQNKGDSIPYDFFGKQNATHWQHFQAWVNSCKGMPKEKQDRLLAKELDADGFAARNLVDTRYVTKLFARVLRERLVFAGGTTEDFAEIDNDEAGKEKLEKFYRSRVRTPQGGAIAFLRRCWGLPKIREESDLHHALDACVIAATSPSLIKRVNDFNRREEQFPYRYKKDDDGKFVDTKTGEVLTKDEALEAGVFFPKPWLHFREEVLARLSSNGKTYQTKKGERRIYDFANYTPDEIASVNPILVSRAVKKKRNVELHDANPMAIRFFSVKLTDLTQEIFDALPIGLAPKRKHLIEQLQNKLNAHQGNAEEAFTDGFIAVTPSGKATKINTIPIPLLALPDSYIKNHAKTARDYVKRSKAKAFLDVDYEKISLSELTLSKLDKDNLDAVFCLRNSFLVNQLRERLKKYNDNARLAFAEPFYPIFIDKESGVEKLSSSPIQSIRLTIKKSENFSDAATKIVPLSKLALKMLTEDELGSTFYHRNQRMINALKIQLEEYGGNAEKAFPESIFYPFGKDHPFIKSIRLPAPRSSGIFVRGGIANLGDALYTEIYKYQDSYWFRARYKAAKEQTFGLPVMPIGAEIICKFTKNEYVRIKHPNLAHCYREISRYTDSWGNTLINVEAIFANGVFEGYWNNFEPSAKRPVLYLQDKKSFFLLEDGKTLDKKSLTLIAKPKVKKTAKQEVELEYFEYLGDQPQEKPLKFDLKLGKDAVIQRGIKDALFIEKVKVNILGFLQENNNDLA

SEQ ID NO: 16588 - protein, 1198 aa, unidentified
  REGION 1..1198: note = Cas Enzyme sequence
MNYNGFIIRENTMSGKQKNLGPLTFGLDIGIASVGWAVLGENRIIDLGVRCFDKAETAREGESLNLARRTARLMRRRLRRRAWRLTKLARLLKREGVISDVNLFKQPPMKGTPAARPWQLRVDALDCKLEAEEWARVIYHLCKHRGFHWISRAEEKAAEGDSKGEGGKVKQGLAGTAKLMQEKGYRTAAEMVLKEFPDAQRNKHGDYSKALSRVLLADELKKLFEHQREKFKNPQASVGLEAAILGNGDKKSGLFWKQEPALSGEALLKMLGKCTFEKSEYRAPKASFTAERHVWLTRLNNLRIVVDGKTRPLTDEERRIALPLPYQLASDFSYKQLRKALTRAGLSEDIRFAGLAYPSERQKSEEKAKDPEDEKLVKLPGWQELHKTLKDAGLENEWQKISTDALTGKPQLLDQIARVLSVYKEDDEVVRELGELELPNKEKMVDALLTVRFDKFSNLSLKALYNILPHMEAGLRYDEACEKAGYHHSQLHKVGTGIHKYLPPFYSGRDKDGRMKFDENMDIPRNPVVLRALNQARKVVNALIREYGSPHEVHIEMARDLSRPFDERRDVKKAQDEYRERNEKYKVAFASEFKIVGTVKGKEFEKYQLYREQQGKCAYSIEPMDIHRLFELGYVEIDHALPRSRSFDFSKNNIVLVLARENRNKGNMTPYEYLDGKSNSERWRQFVGYVEGNKSYRLAKRSRLLRKDFGENESREFRDRNLNDTRYICRFFKNYVEQYLQLHQDSEAKRCVVLSGQMTAFLRARWGLIKVRGDSDRHHALDAVVVAACSHGMVKRLSDYSRRKELDQVREGFVDVETGEIVNPAMFQKLQHHFPEPWPHFRDELMARLFEDAPALLRVKMEGLGTYPPEALEALRPLFVSRAPQRRNSGAAHMDTIYTKPRDGHVLMVEDKEAKKNAKENAEKILRPATAEEKASMAIARIGVTDKDSKGNYKLTLEKLKDIIDPRRNARMIEALRQWIASRDEREKTAKEIEASFGRGKEKRKPTDAENADLERLRALPRKPLQADPNSGPFTGPIIRAVKVNAGKTTGISVRGGIATNDTMLRVDVFTKVGKFHLVPVYVHHLVTGLPNRAVVAFKDEEKWTVIDESFAFCFSLYPNDLVRVQQKNKAPILGYYSSCHRGTGNINIWAHDRNQQVGKDGMIEGIGVKTALSIEKYNVDVLGNIYPAPPEKRRDLA

SEQ ID NO: 16589 - protein, 1088 aa, unidentified
  REGION 1..1088: note = Cas Enzyme sequence
MSQRQSITYDLGLDIGIASVGWCVLGEQHIVDLGVRAFDKAETTDGESLNATRRSARLLRRRLRRRAWRLLKLARLCKREGLIGNSRLFQQQTPIAKSLWLLRVEALDRQLNGEEWARVIYHLCKHRGFWFARKAEAEGSEVGQVKKGLDRTRKLMQEKGYRSVAEMMLAEFPENQRNKRGDYSQSLGRDLLAEELANLFQYQRNLGNPYTSDDFEQRILHPETGLFCQQKPALSGEAMLKLIGKCTFEKTEYRAAKHTWSAERFVWLTKLNNLRISINGETRGLTADERAAVLNLPYEKAILKYKQLKDHLAKLGFGYWDESVRFAGLNYHEGGKDPEDAKLMELTGWHELRKTLEKTELKKEWQEISAQPALLNSIGSILSIYKTDEEIRTQLTNVGLTEAVVEALLIVSFSDFIRLSLKALDGILPHMEQGQRYDQACDVAGYKPITLAESTNSHYLPALDEDAPNNPVVKRALNQARKIVNALIRQYGSPNRVHIEMARDLSRPLDERYKIEKAQSEFAERNEKDRQRFAEAFGRRPTGREFEKWQLYHEQDSKCVYSLAPIDLNRLIDDIGYAEVDHALPYSRSFDDSKNNKVLVLTRENRDKGNRTPYEYLNGADDSERWQRYQAFVTSNKKYRQAKRDRLLRRHFGKDEASGFKERNLNDTRYACRYFKNFVERNLKLSGDEKRCVVVSGQLTSFLRARWGLAKLREGSDRHHAIDAAVVAACSHGMVKRLSDYARRKEMEHVKTGLVDIETGEVISTEMLNQLEAHFPRPWPHFEFELAVRAGLDRSTGKVNHEFGDEEYRAHLAALGYSEEMLAATRPLFVSRAPKRRNGGAAHEATVYSLRPTDDLPNRVTKKEALSKLKLSDLDLDPERCTLIEPHRNEALYTALRERLEAFGGKADKAFAEPFYKPTRDGSQGPIVRTVTKVINKLTGIPLRGGIAPNDSMARIDVFRKSGKYYLIPVYEYHRVAKELPNHAIDAHKSEKDWTLVDDTFSFCFSLYPNDLVRVELKGKSIIEGYYAGCDRSTAAIHLWTHDRNQALGKDGLIRSIGVKTAVKVERFNVDVLGNIYLAKPEVRRGLA

SEQ ID NO: 16590 - protein, 1214 aa, unidentified
  REGION 1..1214: note = Cas Enzyme sequence
MTKILGIDTGTNSLGWAIVEKQADEYHLLDKGVNIFQEGVKIEKGIESSKAAERTAHKAARVRNYRIKLRKIRLLRILSDAHLCPPLSKAELSAWRLKKEYPKNELFMQWQSTDDESEKTPYAYRHKCLHECLDFNSMTDRYILGRAFYHIIQRRGFLSNRKDQSGDDTGKVKESISNLTQEMHDDGYEYLGDYFYSLYNKGEKIRNHYTARNEHYLAEFKAICEKQKLDENLGPEIVRQIEKAIFDQRPLKSQKGQVGKCVFEKNKTKCPSSHPMYEEFRMLSFINNIKIQTPNDSALRPLSAEEREIIMPLFFRKSKKQFDFEDIAKKLAPKKHYGFYKKSSDAEMPYLFNFPMDTSVSGCPVTAALKDIFGENWIDALFETYTLAEGKSRLDVVNDIWHALFFYTDETKLAEFGKNRLQLNDEEAKKFSEISLPSDYASLSLKAICKILPYLRRGLIYSHAVFLGNLCEMMPQYEWNIEEMRNAAIDNVIHEMNQIDSKDARTFEVCIKEYLKEQYHVSDEKLKKLYHPSMMEMYPRVQRTNNHGVYQLGSPRIDSVRNPMAMRSMFRLRKLVNRLLEEGKIDQDTEIHIEFARELNDANKRNAIAAYTKENQNKNDEARKKIRILFKAETGNDIEPTDVDVLKYVLWEEQGHICLYTGKQIRISDFVGANPKFDIEHTIPRSVGGDSTRMNLTLCDSRFNREIKKTKLPTELSEHDDIMARVNDWREKYESLDGQIRRQKKLSKGATTKDQKDALIRKRHLLELQRDYWRGKYLRFTMESVPDGFSRRQGTDISVISKYARLYLKSLFKHVYTVKGIATSDFRKIWGIQKVYSKKERVNHVHHCIDAIVIACIGLDEYNKLGAYYHDEENHEWYGMSKAYFKKPWSTFVEDVEKVQDEILVYHYTPDNMPKQGRRRILIDGKKVLSKGDAARGSLHNDTYYGAIESDGVVKYVKRINLASMKENDVKNIVDDTVRGIIEAAINEKGFKEAMSSTIWMNEEKQIPIKKVRCYTPSVTKPLNIRQQRDVSSKEYKQQYHVTNDSNYLLALYIGKDKKGKEKREFEIINMLQTAQYFKTSNDKVAVGKNIVPLKSEHDYPFAYSLKIGTMVLLYEKSPNEIWDASLMDNNKRLYKVVGLSAMRMKGRNVDYATIKLKHHEEARLSTELKAKNGAFKQGEELRPSIIMLHTQLNALVQGYDFEINELGKIKRLR

SEQ ID NO: 16591 - protein, 1214 aa, unidentified; identical to SEQ ID NO: 16590
  REGION 1..1214: note = Cas Enzyme sequence

SEQ ID NO: 16592 - protein, 1108 aa, unidentified
  REGION 1..1108: note = Cas Enzyme sequence
MKKILSLDLGITSIGYSVLDELENDRYSLIDYGVSMFDSPIDKDGNSKKLLHSQSKSTKNLFNLRKIRKQNLASLFEKYDLGKSEQLLEQEKANIYINKWQLRCEKAFNEKLKVEELFTIFYALAKHRGYKSLDSDDLLEELTRELNLELKNSSKKKVDDEKGKIKKALKTVEALKEEYPDKTIAQIIYEVEMNGTNPTFRNHDNYNYMIRREYINDEIKKIILAQKNFGLFKGNFSVDVFILELVKTIDDQKESTNDLSLFGNCEYYQDEKVAHQYSLLSDIYKMYESVSNINFNKEKTKITKEQIRAVSDWFFEKIEKGKSFSEIKHKDIKRILNLDENTKIFNKDDGRIVKFHFVSNLSKIDNSFIIEAFKKENKYEVLKEIFDVLEFEKAPKRIYEQLKSLVDDKTIIDLIKYKNGNSLHISAFAMIEFIPYFEQGLTLSDIKKKLNLKENEDYTKYKKGIKYLHLDTFEKDDDLKINNHSVKYVVSATIRLIKHLHSTYGAFDEIRVESTRELSQNEETRKNIEKANRELEKQIDEVMLNKEYQEIANEYGKNLRKYARKILMYKEQERRDIYTGDGIEFKKIFTNEVDIDHIVPQSLGGLSVKHNFVLAHRDSNVRKSNQLPINFVLDKQAFINRVENLFKEHKINWKKRKNLLANTIDDVFQDTFESKSLRATSYIEALTAQLLKRYYPFANEKKQADGSAVRHVQGRATSNIRKVLHVKTKVRDTNIHHAIDAILIGLTNKSWLQKLSNTFRENVGVIDDEARAKIKKEIPLIEGIKPKELVSMIEENYNSFGEDSVFYRDIFGKTKTVNFWVSKKPVSSKVHKDTIYAKKEEGIFTVRESILNQFVSLRITPKTSSVKFMEEFNKKILQKMYLFKTNPKDVICLVVQNRAEDIKNMLYSFEGIDAKNKELMSEAKQKLEGLIHSNLVDNNENIIRKVKFYQTNLTGFYVRGGLATKEKTFIGFKAILENGKFLYERIDVINFAKIQKENDNSFKVFKNDIVFFIYPDGSFRGGKIVSFLEEKSIVAFSNPKFPAKISSQPHSFLTLFNGKANSHKQFTIGKAAGIIKLKLDILGNIKSYQVIGNAKSEFLETIKGIVNG

SEQ ID NO: 16593 - protein, 1078 aa, unidentified
  REGION 1..1078: note = Cas Enzyme sequence
MRDNPSDGGTQKDRSGYLQSRSLKEKKKNRVNKIKTLFILAGLNYKDKINYDIWYLRAVKSFNEKLSNDELFALFRYFAKHRGYKSLKIEDLIAEIESQEKIGDCEGGEIIPPKDLEKFSDTLAYLDALKCKHKEKTVAQILWEIESASPTPTFRNHDNYRYMIRRDDIGKEIETIVRTQHTYGFFDPGFDIETFIDSLKKIILYQAPVRLNEALIGNCTIYKNEKCAPIYSLAYDRFNAYKLINDLKIGNNSATSEQKERLIAYIDNKIAEAKNLVGLSVKELKAILDINDEALKLNNHGEYRTIKGKKEPNHLIKFSFVSKLSKFDSDLLKTLLSHQERDQIFDQIATIIQRNINPENMLNAFKELFQTIRLNTDEDTIRTFALSLFKEKKSGSGNYSFKALGDLTRLLLEGKNETDAKTVLGVSSSENYESFAKGIKYLHVNQYENDEAVISNHIVKSIASWAIRIIKDLHDKHGPFDQINIESTRELSQPEEIKRQIKSSNDANEKEWQELIRKYTPHAIQKGINLSQSPSYVLKLKLWEQQKFFGIYSHQPLGIDDILSEKTEIEHIVPRACGGSNAEYNKAVDLKNENMQKGNRLPLDYLHDERRSIFIGFVAELKETGLINWKKMKNLLAESLDETYKEAKDTISLHATSYAEKLLGEIIKRYYPFMDESKRRNGIGVMHISGRATSYLRRILSIENKSRDTNFHHAEDAIILGLMSRSYLQNISTNFTENYAKTVQEAKENFKKIIPLIDGAHPNEIFAHLRKSYEQEIETNPFYKGLDGSLRIPSYWVSKKPIGTKAHNETIQSAKNFAYYVPVASLLGRIKPNHKMHPDDFKKSYDTEVLEKLQVFQTNPKDHTAKAFVARRDETIAILNKANFITSKDEQSEIDKALRSAYNAPILDVNGNPMRRVKRVGEEASISVRGGVAYTAPSLLSMRCEYADTTKLVLKRIDIRAFASSDQIKAHQIDIYNNDLIEIFIIKSKSIESKVIGILKGFTESKGGRANIRNPKFPALKEKQPKIYQNEISIGSICGIKKYKTDATGKVLGFYYLGRVKEESAELFSPVVAYRKLL

SEQ ID NO: 16594 - protein, 1100 aa, unidentified
  REGION 1..1100: note = Cas Enzyme sequence
MGYKRTVLGLDIGVGSVGWGLVELAEEKYLDRNPDGTSRDRFRICDGKILASGVRTFQLPQDRDGKSLAVKRGVARRNRQRTRRKSQRLKRLIALGREFGLIDDTFTHENVLKPHKGDKEQRWDIWWIRKEALKRKLTDIELFRVLYHIAKHRGFYFHTTAEEIQEEESGTEAGKAKAGLAHIRQKLEKGGWQTVGQMFWEEFNQQNEVGKRKRNTKDNYQNSIHRLLLKDEITVIFQQQKKFKNSNAKPDLLKLYIDEVLMAEEGIDDKKLQGMMNHCEFTGEICAPKEGYAAERFSLFNRLNSLELIDTGNKDKQISLDDNQRQKITALAYEKNKVTFAHIRTELGLKKSLQYRFNLCSYRENNPEYSKKIDCQVKDGQLLFDDKHQIPIVDIRTGEVSILDREIQSVLKSKKRWSNSKKVSVYYSDIRKQLNLSDEYRFKNLSGYTKSIEEFGDEEKYIKQFENKDVFIELRGFHKIRKAILEHTDDMTWQKLQKDRIQLETIAEALTYCKSNDTREIYLKNNGIRDKKVVDSVLTLNMSQVANFSSKAIDRLLEYMEAGDLFHDAKEQCGYHRQEYDKHAILKPYEGFFEKNPVVARVFSQTRKVVNAIIRKYISTYPIDQIHVEVATELANSKKRKIEIASGQKRYREEKEAAIIRCREKGLNPEEGQTLLMFRLAEQQNNRCPYTNTPISFEPTGSSGEVYIMDCEIDHIIPMSRSFNDSLNNKVLCTQKANQNKQNQIPFEWFEKQYGKNSQEWADYEKWVKKLYNMPYSKRINLTRKSWTEKDKERFFSRNLNDTRYASRHFSDYLRKYFDFSGSHREDIKDVSRIQLRSGGVTAFLRHMWGLNKNRDENDLHHALDAIVVACSTFGHVYLVSNLSKEIERKGKSWYKHFGREKFKPWGSIREDIQAAVDNIFVSRMPRHTVTAAAHEETVKSLTDKPKNRVIELNQGYAKLGPMVRADVYIDEAGQNYMVPIYAVDMVNKRALPNKYIYKSDAPYEEWPTVEDNGLSFKYSLFKDDLVEVDGKMYYVSYVKGTRPKMAVKNIDGSSFNDGSQELEFAYRKRCLKKYSIDILGNYKEIEQEKRQGNRFEKKR

SEQ ID NO: 16595 - protein, 1094 aa, unidentified
  REGION 1..1094: note = Cas Enzyme sequence
MDATTAIWGCQVKYRLGLDIGTASVGLVALELDGKGRPVKPVHHSVRIFDEPLLPAKSGGVGETKKSDRRIHRQQRKLHMRRARRLQRIAQLARPMGLDPKIIPADKGQRVHKLRAQAASVEIPLEDLLLVFLKMAKRCGYYGGFRVKKSGDAGKEAGMVETGIGKLKSEMKKAGCGTLGEYLLHRIQNGQHLRLKEEGLFAHRDMVEEEFNRIWDVQEERHEKLRDEDLRKDFHKVIVLQRPLKSPAHMVGNCSLEPMLPRAPMAQPIVQAFRIEKQLADLRWGASSRAEPLTAEQTKVVRELLQAKKEVTFPACYKALEKAGCPAPQGRELNYAHGDRQVMTGDRTAAAMKWLGLLQDWNALDAGHQISVINLLADMGSPDAFDNPRWAENLVGANNTQRKIKSEVKCFIDRMVETGKFDRLSKMGFDGGRASYSIKALNKLVFVMREGSVDEYDAIAAAYPEDEKTDTKREKEKELPPHRSTGNTVIDVALGQVRREVNAAIKKLGAPPSEIIVELSRDMNVGLKKRGEINNKMRANEKRRRDAAGTIEEHTRKAATESQIRRYLLWQEQGEKYCPYCERHINLSDALNGNETEYEHILPRSLTRIGKKRDFLVLAHKSCNQEKGKRTPRQAWGHDEERWNIIERRAEQFEKGYKVTVDGDNGKERTFKHRGKMRQLLMKDFEDESLSDDIIGDFTDRQFQETAWIAKACGTWLRSVCADVSFSRGLLTAHLRRNWKLDTVIPDARYKEGLPVFDEDYRPGTSESGQINTVVSKESFDEYRAYWEGRHGDGISRTHRRLNKRIDHRHHLVDALVIALTTRGLYQRMARHYKQVTDAGENNLRLYAEPGIKDVRDLALDMVRECQPSHRPDRWPGGGFFKGNPGAIVEENGEQFYARRKQLVGLAKTDMEKILPESVRGIVGNVYQSRIQKGADHESALKEPIFHPHWKTPIRRVLVRRNKATDSVRVEHGNRTAGLYKHLEPDGYAYLEYIPGDVTTEPQLVRLHPLPKSKPASPKTVRLYKKDTVRDSKDGQCYVIHKFGARGTSLFLSPVTEAIANIGNVSSKISKKRKKEISGKQIVKRLTPVKDERP

SEQ ID NO: 16596 - protein, 1094 aa, unidentified; identical to SEQ ID NO: 16595
  REGION 1..1094: note = Cas Enzyme sequence

SEQ ID NO: 16597 - protein, 1095 aa, unidentified
  REGION 1..1095: note = Cas Enzyme sequence
MDANTAIWGCQVKYRLGLDIGTASVGLVALELDGEGRPVKPVHHSVRIFDEPLLPPKSGGVGKTKKSGRRVHRQQRKLHMRRARRLQRIAQLAPLMGLDPKTIPADKGQRVHKLRAQAATVEIPLEDLLLVFLKMVKRRGYYGGFKVKKSGDTGMVEIGIGKLKAEMKKAGCGTLGEYLLHRIQNGQHLRLKEEGLFAHRDMVEEEFNRIWDVQEGRHEKLRDEDLRKDFHKVIVLQRPLKSPAHMVGNCSLEPMLPRAPMAQPIMQAFRIEKQLADLRWGASSRAEPLTAEQRNVIREQLQAKPEVELPALYKVLEKSGCPGPQGRELNYERGDRQVMTGDRTAAAMKWLGLLQDWNALDAGHQISVINLLADMGSPDAFDNPQWAENLVGAKVGANKTQRNIKPEVKHFIDQMVTTGKFGRLSEMKFDGGRASYSIKALSKLVPIMREKGLDEHDAIAAAYPDNEPGTKLEKEKELPPHPSTGNTVIDVALGQVRREVNAAIKKLGTPPSQIIVELSRDMKVGLTKRGKINDKMRANEKRRREAAGTIEEHTRKAATESQIRRYLLWQEQGEKYCPYCERHINKLSDALNGNETEYEHILPRSLTRIGKKRDFLVLAHKSCNQEKGKRTPRQAWGHDEERWNIIERRAEQFEKGRKITIAGKERTLFKRPGKARQLLMQDFENEALSDKIIDNFTDRQFQETAWIAKACGKWLRSVCADVSFSRGLLTAHLRRNWKLDTVIPEVRFEEDLPVFDEDYRSNTKESSQQGCAVSKDDFKKYRSYWEGHHGDGIPRTHRRLNKRVDHRHHLVDALVIALTTRRMYQRMAKHYKQVTDSGKNSLRLYAEPGIKGICALALDMVRECQPSHRPDRWPGGGFFKDNPGAIVEENGERFYARRKKLTDLGKTDMDKILPESVREIVGNAYKSRIQKGADHESALKEPIFHPHWKTPIRRVLVRRNKAEDDVLIEHGDSQRIQGKAADSKSSLHKYLEPDGYAYLEYIPGDLTTEPRLVRLHEAKSTSSQTVRLYKKDTVRDSQDERRYVIHQIMAEGPALFLSPVTESIADIGKVRGNRKRKIFGKQIAKRLTLVKDERP

SEQ ID NO: 16598 - protein, 1046 aa, unidentified
  REGION 1..1046: note = Cas Enzyme sequence
MDKAKGADIGELGFDPDTFATALMTLEEFRSKDRVIWAGLDIGVASTGLCLVDVRNHEIVLMASHLFKSPVVDKKKANAAPESLASVRRGARSVRRNIIREGRRKKAIRAVLADSDLIPADADGEWFAARRDERTVVKLRSKALGHLLSSRELARVLYSFASHRGYIDHGKSDNEDDAGKVKKALAANHAALADGGCATFGQYLAGQPRSRNRAGDYSFTTDIDMTVDEVRTIFARQRELGSEIATEALEERYIAELTWLTDTSKRDMSTYLKVGFCTYLGAPHRRGATSTISFEMVRAHQTLCNTVILHADGTSSDIPGDIRIEIVRELFAVKRSIKPLKWSGLRRRLGLAEGDSFKERSLEEEKRDCIALPAWAVLCSGLYEGHRDLLERLHDHIDDADAVCSALTFASSAASLAGRLAPLALTDDEVEAIIDLPYSARLFSGYASASLEALQMLRGTFEDPRVTSLRQAEEDSGLAQVRATLAEERGEADDGLLCAFSDYDPTCKNPVVLRATAQVRRMVNSVIRHYGLPDVIRVEVARDLKRSKHERQIVAESNRSRLKLNEQAKKDIVEFLGLPDGHHVRGRDLDMVKLYREQGGKDPYTGAGIDFGRMLEEHGYAEIDHILPISRTCDDSQANKVLCLTKSNRDKSNRSPCEWMTSSEASAPDWDEFCGRMERWAKMCEPRRYARKKLANLTCENLAEHAEDFIKRNLNDTRYMSAALAKWLRECLPFARDGREHVYCVAGGATAIMRNVWGIGITGPDGKKNRDDDRHHAVDAAVIACCDSSIVKNVALVNEGHARADVRQRLFSDSLPYPEFKEQVNAWIPCIVPTLTLPNTVTGSVLKDTVYPYLGRDEAGKDLYLTVKRDKDGRIVERKVNKATTMWKDGQGGCRAYGSMCALDAVFDASAGKRGRWSFDPVYCIDIPHRDAERRTIRAFSKEKAIDLWDTVEVPEAAPRMTIRRGDVLVCDGKAARFHCFDISVNAIRLFSQRGGKQLQATGPLSAEAFPPPSKWGEGVRVMQEDCLGLCWLSFLAQRAADMQSE

SEQ ID NO: 16599 - protein, 960 aa, unidentified
  REGION 1..960: note = Cas Enzyme sequence
VKLYAHRDLLEAEFERLWTMQAQFHPILNGNQTTGGKEESIKGIFHQALFFQRPLKSPAAMVGRCPLEKDLPRAPMAQPAAQAFRIEKQLADLRWGMGQRAKALSSEQKTVIRELLHNQATVTFKNIYIALEQADCPGELGRRLNMDRSSREELTGEKTRAALRSAKINLLEPWDALDRNTQVQVINFLADLGSPEQLYDQHWPAQFSAGFIGFINKIKESAGYGRLTPMGFDSGRSAYSVKALEKLTQPMREYNVDEHNAIDKAYPDYYAKKPPLTKLPPPPLTGNTVVDVALHQVELEIRKAIKQLGGLPSEIIVELARDMALGVKRRNAIEDENTKNKNLRKKAADELQKEGLPDSKTNVFRYQLWEEQDKRCPYCDGGQFSLNEVVDGNATHIDHILPRSLTQIGRKRDQSVLAHIACNHAKGDNTPREAWGGDPPKNRERWDAVQDQARRFRDKKHHRKLEGKARLLELEDFDDETVKGFSDRQFQETAWIAKLTAQWLRNICPPGEVHVSRGQMTAHFRRIWHLETVIPQVRFEDKLPVLDTDKEPISQEDFDRHRSFWEGRDHQEEVERTDRRMDKRLDHRHHLIDALVIGLCTPPLYRLMASEYKQKAEQKKQGKLRLSVEPPFHDLRNKALDLVRHCNLTHKHDRFPDGPLFKETAYGMAEVLPDGKIRLGLKPPSLTGGGEPPGNAVELSSKAPSPNGGGLGWGRVKSMVSFPFDRPPPSLPPLGGCVNSTALEPPGGERRLTLRMKLADFVDVKKDTPDKVREKLQDIISAEVRELVLEAYDQRIASGQKPLQALSEPVYYPHYQTPIRAVKVFVANKPGAYLDADDMRPVIHHSRQGWHYKLLPHEGNACLDVWAVEKGVETRLLRPVEALMEKRKGIKPPKGVMRFYKNDTVQHFKGGKLYLVRQIWSNNGGILVLTLATEAREVRDMNAAEGLKKVSGKSLLQWRR

SEQ ID NO: 16600 - protein, 1149 aa, unidentified
  REGION 1..1149: note = Cas Enzyme sequence
MKYRLGLDMGATSIGWAVYDIDNMNLIDTGVRIFDDGRDDKTKASLCVKRRMARGARKLQTRKHIQKQFLLKTLVELGLFPQSRMEQQNLKSLNPYLLRVLALDKKVDCYELGRIFFHLVQRKGFLSNRKDNKEEGGKLKEGYCLLQEKIKTLNARTYGEYLYLCHQEKPNQPIRLKNTFDAFGKFIGAEFPFRELYKEEFYKIFDKQREFYPQLLTPEVREKIENILFFQRPLKEAEEGFCPFEPKERRIAKAHPLFQEHRMWQHILNLTFAPETSSEYEGLTKQQIEKLIHILKNPTEYVKTKQPILTYSSIKKLLGLDKKGLFNFERKSGSVDTNTKGIYVDTTEHAIGMVPIVYEEWKQLTVSQKETIIKVLSRPTEYIDFPKTLSIEQQDKLIIQYLCSTFSFSTSAATALLYDVDLEDGYGSLSEKALNKIVSAMKLGMPYDVACKEVGYHHSFKNHTSLNTLPYYGEILAQSCIGQKNNPKTPEEKYGKINNATVHVALNQIRHLVNELIHRYGKPFDISIEYARDLNASTEERKKLSDTRDKNELENQRILQELNEKIENRAWTKRDIEKYKIWKTLGTPKGENPLNCRECPFTGEKISVADLMNGDRFQIEHLIPFSRSLDNSIHNKVIASAWANKIKANRTPFEAFHDDTYAPKITWADIQRRVKKLSLEQQWRFSKNAMAKFEEKEGPIARSLNDTRYMTRLLQDYLLPIVREDGKKTVQAVVGQLTAMIRKSWGLNQYKNKEEAEEYRSYHNHHAIDAIIVATIDRGQINNTAHQLKNVRYSAIEEFKDEFYKFKDSSVSKEEKENLRTRIKDFVKEREAAIIKQYIPMPSTLSISEILNQVQNISISHKPKLKNVSDRNATVGQLHEDTAYGLKSFIDENSLTARFKTGNGSNKKIVEKDITEYIPIFYTKEDKQAYYDAYKNWFIIERKAKYLNAKTSAEKAIKKALMIQEATAVQNLRIAATKAFKWFVGGGNFCAEIYQINPTNKINGVPTKDAGEWKSEIISNYNATIRTSRNENIFYWKNRYPNAKRIMCLKRNDMVLGFFTKEQAYQEDFPKGIQNYVRQIFTQNPLLERTEVLFRVKKISSDGRIYIIPHNIAKEEADSKSWCSSAQSLQKYQAKQVFISPTGRISHAQ

SEQ ID NO: 16601 - protein, 1109 aa, unidentified
  REGION 1..1109: note = Cas Enzyme sequence
MSKKILSLDLGITSIGYSVLEELENDRYSLVDYGVSMFDKATDKDGNSKKLLHSASSSTANLFDLRKRRKKTLAQLFEEFDFGEKEYFLYQEKQNIYKNKWELRAKKAYEEKLKLEELFTILYTLAKHRGYKSLDSDDLLEELCLELKIPLDEKQTKKADDEKGQIKKALLTIEELRENSSKTVAQIIYDLEMTKNNPTFRNHDNYKYMIRREYIDEEIEKIISSQMKFGLFGSGFDSDDFIQKLKKIITWQNPSTNNMDLFGNCEYYPQDKVAHQYSIISDIYKMYQSVSNINFNKEKTPITKEQIKIIADDFFTKIKKGKNIPDIKYKDIRKLLKLDDTVKIFNKDDEKLTITKFHFLSNLSKINNSFIVDALEKENGYEELKDIFEVLQFSKDPKDIYEQLKNKIDDNQTIINLIKNKTGNSLNLSANAMIKFIPYFEGGLKTKDILKELKLNECENYGKFKKGLKYLNLSQYEKDDIDLKINNHPVKYVVSATLRVIKHLHTTYGVFDEVKVESTRELSQNEETRKEIDKANRALEKKIDDIVANKEYQKIAEHYDKNLRKYARKILMYEEQNRRDIYTGEGIEFKEIFTNAVDLDHIIPQSLGGLSVKHNFVLVHRDSNMQKSNQLPMNFIKDKQDFKNRVEELFKEHKINWKKKINLLATNLDETFKDTFESKSLRATSYIEALTAQILKRYYPFINQEHQKNGISVSHIQGRATSNIRKLLKVKTKIRDTNIHHAIDAILIGLTNPSWLQKLSNTFRENMGVIDDIARENIKREIPLIEGIEPKELVEMIEDRYNEFGEDSVFYKDIWGKTKAVNFWVSKKPMVSKIHKDTIYSKKEDGIYTVRENIINNFINLKTTITTSSIKFEESFKKSILNKMYLYKTNPNDVICKVIQQRAEDIKILLKSFIDIDTKDKEQLSEAKQKLENLLHKDIIDNNKNIVRKVKFYQTNLTGFDIRGGLATKEKTFIGFKAELENDKLNYKRIDVANRDTMQKEDNNSFSLKVFKNDLVFFIYPEGSFRGGKIVSFLNDKNLGAFQNSRFPTSLKYQPDSYCKDKAHTGAKQHSLNKAIGIIKLNLDILGNIKSYQKTGQCESELLNFIKAV

SEQ ID NO: 16602 - protein, 1063 aa, unidentified
  REGION 1..1063: note = Cas Enzyme sequence
MKVLGLDLGSNSIGWALLEEKDGKLTRIIDLGSRIFTKAVEEKTPTPTNAKRRDKRLARRVLQRRARRKQRMMNYLISLGLLPEELKGHLQPEKVLNKVGEPLIGNAGNQLKTMKGKSLYPNPYELRAKALDIALAPHELGRVLLHLVQRRGFLSNRKTLLSDMMDDPDVLSVLNELDAQDEQSGDSEKAKEETAFKKDISELRSKINAAHCRTLGEYLSKFPHHTAKRNRIRNGGHLRTDRQMYQDELNEIWQEQKKHHVVLTENVKEQVEQIIFFQRPLKLKADRVGKCSLEPRNKRAQIARLEYQQFRYLQDINNLQYLDFFEDQWVALNNEQKEKLKELFETRSSISFAGIRKALQLDKSAEFNLEHGNKKLKGNITACEMRKALPEWDDMNRDHQLVLVEDMLTIHKKSTLKTRLMNHWHLDARTAVNLCLIEFEPGYGSHSLKAIRKLLLFLEKGEIYSEARQKAGYGYEQEDTDTIDRLGMPPEIPNPIVSKGLHELRRVVNAIIAEYGKPDKIRIEMARDLEMNTKRYKAFQKQQRANTKANDDATKLYQEMGKKYPHLHLSKYPSYADKIKYRLWRDQKGLCAYDLAGTEILAAELFSADIEIDHILPYSQSLDDSYMNKVVCRTQENRIKGQRTPIDAFGSEKDRWNQITRRLGKWDRGLKSKKNRFYMTAEDVQKRDFISSQLNDTRYISKVALEYLKPLGADINVTKGIMTSWLRHQWNLNSLIGQDKKNKDRVDHRHHTIDALVTACIDRTFYQVLVKLAKDLEKEKSQFTPKDIHTDTPWPNLRNNLNEALENMIVSHTPQRKISGSLNEETGTGFVEGVGTVYRANLSPEFKLPQVKKIVDSEVRELVTKHLLAYDNDPKKAFAEGITVYHKDGKTPIKRVRIVQSRTSRKKLETTKFGVKDKQGKVFRWMAYGNMHHVEIVQHKETEHYQGVFITMMEAHRRAMTGTKSARERCVPFEPIVMTNHGEDFQFIMAFHINDLVSIGTDDGERFYRVQKLDSGSARVMLRLHTAATIKNTDEEFLLYISRFEEVKTSLHHLNAIGKMLND

SEQ ID NO: 16603 - protein, 923 aa, unidentified
  REGION 1..923: note = Cas Enzyme sequence
LSVLNELDEQDEHDDTTEKAKEETAFKKVISELRNKINAANCRTLGEYLSKLPHHMAKRNRIRNGGHLRTDREMYQDELNQIWEEQKKHHPVLSENVKEQIEHIIFFQRPLKLKEDRVGKCSLEPRNKRAQIARLEYQQFRYLQDINNLQYLDLFENKWIALNAEQKEKLKVLFETKPAITFANIRRELKLDKSDEFNLEHGNKKLKGNITACEMRKVLPQWDDLSHDDQLALVEDMLTIHKKAALKTRLINHWNFDVRTAVMLCLVEFEPGYGSHSLKAIHKLLPFLEKGAKYSKKEGDEAAGAIQLAGYKQEDEEAIERLGMPPKTPNPIVNKGLHELRRVVNAVIAEYGKPDKIRIEMARDLEMNTIRYESFTMQQKENTKANDEATKLYQEMGKKYPHLHLSKYPSHTDKLKYRLWKDQNGWCAYDLLGTEILAAELFSADIEIDHILPYSQSLDDSYMNKVVCRVRENRIKGQRTPIDAFGSEKEKWNQITHRLEKWAKVRRPQKGSGKNRKLKTYCLVDTLKSKKNRFYMTAADVQKRDFISSQLNDTRYISKVALEYLKPLGADINVTKGRMTGWLRHQWNLNSLIGQDKKNKDRVDHRHHTIDALVTACIDRTFYQDLIKLAKGLEKEKSQFTPKDIHTDTPWPNLRNDLNETLEKMIVSHAPQRKITGSLNEETGTGFIDGVGTVYRADLSPSFKLPQVKKIIDSEVRELIAKHLLAYDNDPKKAFAEGITVYHKDGKTPIKRVRIVQSKTTRKKLETTKFGVKDKQGNVFRWMAYGNMHHVEIVQHKETGAYRGAFITMMEAHRRAMTGTKSARERGVPFESIVLTNHGEDFQFIMALHINDLVSIETDDGERFYRVQKLDCSNKRVHLRLHTASTIANDNETFPDRELTVIALMEKRMKLYPVNAIGKPMHD

SEQ ID NO: 16604 - protein, 1016 aa, unidentified
  REGION 1..1016: note = Cas Enzyme sequence
MAKVLGLDLGTNSIGWALLESSGHKGNDFTGIIDSGVRIFQEGVDRSTTGAELSKNAQRRAARGTRKLHKRSNQRREALKNLLIKHDLLPSDEVTWQKTMQKNPYELRTKGVGGKILLHEFGRVLYHINQRRGFKSNRKSGESDGKVATALVELEKQIQDGGFETLGQYLYSLDPREQRIRCRYIKRSMYEEEFEILWSHLAPFYPDKLDDKLKNMVKNNIFYQRPLKVQKHLVGLCEFEKREMLNDKGEKVWTGKKRSPKGTWYAQQFRLLSEINNLTVIDGNDEWKLSDDLDLRDKLLNALGKSKTKNFSAIKKLLFGKSDQPYEHIRFNLEEGGRDKLQGNEIEASLRKILSKKYDTLSIEQRDSLVHDLLFLEDQGVVQSHCEKLGEVLELTSEQAQDLAKIKVVDGYGHISEKAIKKLLPYLEQGLNYSDAVEIAGYQRKDQQEDNIVPQLGEPPKLRNPIVQKGLYEVRKVVNAIVMKYGKPDFIRVEMARDLKQSSTQRKEVSFQNAKNRRRNEEIKKRLHDEYGIHNPSRDDVIKFRLWEECNHTCPYTNQTISAAMLFSSEVEIEHILPYSRTLDDSYINKTLCMSTENKVKGNQTPYEAYHTDADRFSMMLSRVRKFQTPFGYKKFNKFRQKEIDLDSFIKRQLNDTRYISREVSKYLQQLVGKYGVQSGRGQMTAKLRHLWGLNGILHESGEKTREDHRHHAVDAIVTALSTPKALKAVSANSKYGRSDKLNIKQFPIPWENFRSDAENSIKSIIISHRVMRKIRGALHEETAYGELKFTDEKNQKMYAVRKAVSALSHKEITQIADEKIKGAISSYILQKGFDPKVKTDVAKGLKDADANPPTMESGQVIKRVRLHKPFSKMRMLNNKQGQAYRAMQEGSNHHIVIYEYQDKKGKIKRGGTVVSMFDAAQRARHGKPIINRKLGEGQRFVMSLSSNELVQVPKGEDEFDIYRVQQISLDTKMMFRLDKAALIGNNSERLIKMPNTLKGHKVVIDPLGQIYPAND

SEQ ID NO: 16605 - protein, 1083 aa, unidentified
  REGION 1..1083: note = Cas Enzyme sequence
MGTILGLDLGSNSIGWALLEERGGKPYQIVDLGSRIFTKAVEEKTPTPKNAKRRDKRLARRVLQRRARRKQRMLNYLVLLNLLPEELKGNPQPEKVLNKIGDPLTDNGGNPLRTLKGNALYPNPYELRAKALDNPLAPYELGRVLLHMVQRRGFLSNRKTLLSDMMDDPDVLSVLNELDEQDEHDNTTEKAKEETAFKKDISELRNKINATDCRTLGEYLSKRPHHTAKRNRIRNGGHLRTDRQMYQEELDAIWMEQKKHHAVLTDDVKEQIEQIIFFQRPLKLKEDRVGRCSLEPRNKRTQIARLEYQRFRYLQDINNLQYLDLLEDRWVPLSDAQKEKLKIFFETKPTISFAGIRGELELDKSAEFNLEHGNKKLKGNITACEMRNILPQWDHLSDDEQLALIEDMLTIRKKSALKTRLMNRWKFDARTAVNLCLIEFEPGYGSHSLKAIHKLLPFLEKGAKYSKKENDEAAGAIQLAGYDDGKEKSKKPDDTLGMPPEIPNPIVSKGLHELRRVVNAIIAEHGKPDKIRIEMARDLEMNTKRYKAFEKQQKANTKANDDGTKLYQQMGKKYPHLHLSKYPSHADKLKYRLWKDQKELCAYALARTTISNAELFSANIEIDHILPYSQSLDDSYMNKVVCRTRENRIKGQRTPIDAFGSDKDKWQQVSGRLKHWDRKLKSRKNRFYMTAEDVQKRDFISSQLNDTRYISKVALEYLKPLGADINVTKGIMTSWLRYQWALNSLIGNDKVKKDRVDHRHHTIDALVTACIDRRFYQALVKLAKDTNPDDIHIDPPWQSLRADLNEALHKLIVSHAVQKKLTDELHEDTGAGFIDGKGTVYRKGLLDYFDDADAKKRTKEHALKKLKAVVDQAVADILKNHMERFQYNIREAFSDNQIVFHKDGETPIKRVRIYQSQKLKTQQQLKKEKFGKRDKSGNIFKWYSYGNIHHIEVFINKDTGKVEGRFVTMMEAHRRAMTGTKSARKRDVEFEPITNKYLDTSCDFLMAIHKQSLVELTVDEKKGFYYVKSLGQISQGKQPRLTLMPHIVAVGNKGKKSDSIDRLVRNHNMKLRKVNAIGKLLGD

SEQ ID NO: 16606 - protein, 1195 aa, unidentified
  REGION 1..1195: note = Cas Enzyme sequence
MENSGKKRILGLDAGTNSLGWAVVERGDDGYQLIDKGVQIFQEGVNIEKGTIEKSRAAERTEHRSLRKTYWRRKVRKIRVLAVLSKAGLCPPLTSEELHKWRVEGRYPLENEAFIQWQRTDENRDINPYASRVKCIKQRLDMDKATDRYILGRALYHIAQRRGFLSNRKDQADKTTGAVKTGIKELSTKIQDSGCEYLCQYFYQLYQKGERIRGCYTDRTEHYEKEFEAICTKQQLDEALKIELHKVIFEQRPLKSQRCGVARCPFEPSKHCAPISHPLFEAFRMWSFIRNIKVMGPYDNALRPLSGAEIEKILSLWQRKSKDNFHFEDIAKTIAGKGQYCYYKSSEDKPYRFNYHLDSNVSGCPVSTRLREIFSDDILSDRAQIDMIWHALDNFDDDHKLREWVIRHYNVSEEQADAFVKIHLPQGFASLSLKAIENILPPMRDHGMLYTEATLIAKLRELLKGYNFDDEIEAYLKDDIRDYLKIPTDKNDKPTISRDERKQALLIKWRERYHLEPKDLDKLYHPSMIEEYPKVESKINGVFQLGSPRISALKNPMAMRSLFRLRAVVNQLLKDGTIDENTIVHIEFARELNDANHRDALRRYQNDLKKEREEAKKQIISYVPNPNDDDILKYLLWEDQDHKCIYTNKTISLEALYNGTDFDIEHTIPRSMGGDTTRENLTICDSTFNREVKKTNLPINLSNYKIIEQNIAPWKEKYENLDKQIRKINTSGVSDKGTKDSMISKRHYLELQRDFWKNKYNAFTIEEKDVQGFTRRQGTDISVINRYGRLFLRSLFNRVDVVKGSMTAAFRKLWGLQSAYEQKNRENHVHHCIDAITIACMGKAEYDNLSAYYREDEENRYHNSGKIFPKPWATFTEDVRHIEDELLVAHHTNNPMGKQTRKRIRTAKGKIIPNQFAQGDTARGALHKDTQYGAIKIEDQIKYVVRKPLDANFTDVKNIVDQEVKAKVEAAIAEYGSLGKALESGPIWMNKEKGIAIKRVRVFTPSVTRPNHIRQQRDLSKYEYKRQYHVMSDSNYALAIYEGVVGNNTKRAIKLLSNLDAAIIYNNNNNHPLIPEYDEHNYHLLLTLYSGSLVLLYEKSPEELYSAHNDILKRRLYKVTGLNSTLIGNVNYGRIELTYHQEARPSTEVKSKNGAFEANEELRPKITMLHTQIKALVEGKDFIMSETGKIEFRHA

SEQ ID NO: 16607 - protein, 1044 aa, unidentified
  REGION 1..1044: note = Cas Enzyme sequence
MKYILGLDLGTHSAGWAILELDSAGKAAAVKDAGVRIFEAPVEPKTQAPKNLARRTARQHRRQLARRKQRRVKLTRVLQEAKLLPVNQVELETLLLDDNECNPYMLRAKGLDSELGGYEFGRVLFHINQRRGFKSNRKTSFSEVLKKVPAIAELIEQEESAESTKILQKQNKLSAATTGDDDDGVVKAGISLLRATIETSNARTLGEYLYLVKEGRASRPNRMSIEVPKKVRGLYTERAMYEDEFEQLWAKQSQYNQSLDAQLKVLVFDAIFSQRPLKTQKYLVGDCVFEYHRKRAAKATLEFQRFRFLQTVNDLEIKNTATRLYRKPTEQQRLNLLALLEKSEKVTWGRVRKALQIHSDETINFEEGGKEELLGDSTSSRIGKAISAQWEALSVEKRNELVADLLTIPQKDWLLVRLLDHWKFSPVEAYKLAILTLEPGYGAVSMKALRKLIPLMGGGLNYKTACDKLSYIEGANRKSTAGEVLPFPPNVRNPVVQKALYQVRRLLHAIVRKYGVPEIVTVELARDMKLSKKQKEESEARNRKNKRERDIARAALQSNGLPEPSHDDLLKYRLWKEAGCMCPYTGQPISMGMLLGKEGEVDIEHIIPYGRCLDDSYMNKTICLASENRAGKREKTPYEAYSINKERYEDLLSRVSHMSEMPFGKKRRFELRPEDISLDEFVTRQLNDTRYICREVSNYLLGLGCRVQVSKGEATSALRHKWALNEILSPDGSGEKNRADHRHHAIDAIVVALTTPTLFRQLSNLSAQTGFGIKNRRFLLEEPWRNFHKSVEDLVEAIVVSHEAHRKITGKLHEDSAYGPTEKEGQFVRRRSIEDLTAKDLPDVRDGAVKAILTQQLERFNGSAEKAFSMPVSHNNPSILIKKVRLNVRLNPEIVFPISRGGGTPFKYHNLGNNHHVEVIQDNASKKFEFEIVSAAEAARRVRREGSPVVKTDFGPAKKFVMSLCANDTVELSGKDGVRRVFRVKSFAKERDRRRIVLQLHNSASPTDFERLPPNGFQERKPRKLEVDMLGRIIDSRMNDKSNN

SEQ ID NO: 16608 - protein, 1044 aa, unidentified
  REGION 1..1044: note = Cas Enzyme sequence
MKYILGLDLGTHSAGWAILELDSAGKAAAVKDAGVRIFEAPVEPKTQAPKNLARRTARQHRRQLARRKQRRVKLTRVLQEAKLLPVNQVELETLLLDDNECNPYMLRAKGLDSELGGYEFGRVLFHINQRRGFKSNRKTSFSEVLKKVPAIAELIEQEESAESTKILQKQNKLSAATTGDDDDGVVKAGISLLRATIETSNARTLGEYLYLVKEGRASRPNRMSIEVPKKVRGLYTERAMYEDEFEQLWAKQSQYNQSLDAQLKVLVFDAIFSQRPLKTQKYLVGDCVFEYHRKRAAKATLEFQRFRFLQTVNDLEIKNTDTRLYRKPTEQQRLNLLALLEKSEKVTWGRVRKALQIHSGETINFEEGGKEELLGDSTSSRIGKAISAQWEALSVEKRNELVADLLTIPQKDWLLVRLLDHWKFSPVEAYKLAILTLEPGYGAVSMKALRKLIPLMGGGLNYKTACDKLSYIEGANRKSTAGEVLPFPPNVRNPVVQKALYQVRRLLHAIVRKYGVPEIVTVELARDMKLSKKQKEESEARNRKNKRERDIARAALQSNGLPEPSHDDLLKYRLWKEAGCMCPYTGQPISMGMLLGKEGEVDIEHIIPYGRCLDDSYMNKTICLASENRAGKREKTPYEAYSINKERYEDLLSRVSHMSEMPFGKKRRFELRPEDISLDEFVTRQLNDTRYICREVSNYLLGLGCRVQVSKGEATSALRHKWALNEILSPDGSGEKNRADHRHHAIDAIVVALTTPTLFRQLSNLSAQTGFGIKNRRFLLEEPWRNFHKSVEDLVEAIVVSHEAHRKITGKLHEDSAYGPTEKEGQFVRRRSIEDLTAKDLPDVRDGAVKAILTQQLERFNGSAEKAFSMPVSHNNPSILIKKVRLNVRLNPEIVFPISRGGGTPFKYHNLGNNHHVEVIQDNASKKFEFEIVSAAEAARRVRREGSPVVKTDFGPAKKFVMSLCANDTVELSGKDGVRRVFRVKSFAKERDRRRIVLQLHNSASPTDFERLPPNGFQERKPRKLEVDMLGRIIDSRMNDKSNN

SEQ ID NO: 16609 - protein, 1044 aa, unidentified; identical to SEQ ID NO: 16608
  REGION 1..1044: note = Cas Enzyme sequence

SEQ ID NO: 16610 - protein, 990 aa, unidentified
  REGION 1..990: note = Cas Enzyme sequence
RTARQHRRQLARRKQRRVKLTRVLQEAKLLPVNQVELETLLLDDNECNPYMLRAKGLDSELGGYEFGRVLFHINQRRGFKSNRKTSFSEVLKKVPAIAELIEQEESAESTKILQKQNKLSAATTGDDDDGVVKAGISLLRATIETSNARTLGEYLYLVKEGRASRPNRMSIEVPKKVRGLYTERAMYEDEFEQLWAKQSQYNQSLDAQLKVLVFDAIFSQRPLKTQKYLVGDCVFEYHRKRAAKATLEFQRFRFLQTVNDLEIKNTDTRLYRKPTEQQRLNLLALLEKSEKVTWGRVRKALQIHSDETINFEEGGKEELLGDSTSSRIGKAISAQWEALSVEKRNELVADLLTIPQKDWLLVRLLDHWKFSPVEAYKLAILTLEPGYGAVSMKALRKLIPLMGGGLNYKTACDKLSYIEGANRKSTAGEVLPFPPNVRNPVVQKALYQVRRLLHAIVRKYGVPEIVTVELARDMKLSKKQKEESEARNRKNKRERDIARAALQSNGLPEPSHDDLLKYRLWKEAGCMCPYTGQPISMGMLLGKEGEVDIEHIIPYGRCLDDSYMNKTICLASENRAGKREKTPYEAYSINKERYEDLLSRVSHMSEMPFGKKRRFELRPEDISLDEFVTRQLNDTRYICREVSNYLLGLGCRVQVSKGEATSALRHKWALNEILSPDGSGEKNRADHRHHAIDAIVVALTTPTLFRQLSNLSAQTGFGIKNRRFLLEEPWRNFHKSVEDLVEAIVVSHEAHRKITGKLHEDSAYGPTEKEGQFVRRRSIEDLTAKDLPDVRDGAVKAILTQQLERFNGSAEKAFSMPVSHNNPSILIKKVRLNVRLNPEIVFPISRGGGTPFKYHNLGNNHHVEVIQDNASKKFEFEIVSAAEAARRVRREGSPVVKTDFGPAKKFVMSLCANDTVELSGKDGVRRVFRVKSFAKERDRRRIVLQLHNSASPTDFERLPPNGFQERKPRKLEVDMLGRIIDSRMNDKSNN

SEQ ID NO: 16611 - protein, 1140 aa, unidentified
  REGION 1..1140: note = Cas Enzyme sequence
MPTFKNNLTLSFDIGHSSIGWAVLDQQKPHPNILGCGSVIFPKDDCLASARRGHRRTRRNIRSTRQRIRRMKQLLEHLGVLTPKELDRHPGHPAPHWLAARALISDKPQLKWPELWDVLRWYAHNRGYDGNSRWSRQDQNDDDTEKERVAKSLLDQHQTKTMAQTICAELGIDPSSSRFSSNKPFKTLNAAFPRHIVRDEVLAILEKHKGHLAKLDDAFIACLISRDRSTDEFASKSITVPELKLPKRYRGGLLFGQLVPRFDNRIIGKCPISGDKIPNKACREFLEYRWAMLLANIRSAGKPLSSEHRKEVDALMRSKGRLTPTELRNKVEELTGTDDNNIKSSFEIHPDSKDALVLDPAEDYFHKAQTKPKQSKDPAGIWVFWPHLTEETRNRIRGRWRKRRTISLQWMLVDAAKNEIDSSTLLEAIDQAFAADQKKPKPSYTTRQHLLNQPYGPDWPSGRAPYSRPVMKEVVRFVLSTDRHPTEAGSNGKEAGPIYRSPDVLRKERERTISDLTNNHLLRQRLNILAIDASNRNSLLTDIINKYAEGDSTAISDIVVEVARDLQEYSGMTSKEMAGELTKRLSHFKEAVKYLEDKAPDLEITGSLIRKCRIAMDMDWKCPFTGESFDAYTLPKLEREHIIPYADRPTNAMDAQVLTWPEVNRMKKKRTALEFIIDAGGNPVDGKKNLSLFTRKQYEEFVDKLKVAKKFTYPDDFRRQSARKKWLLMEHYDGKNHNFTQGALTQTSHLNRLSQSQLAKRFTDPETGDCSARIHALPGQVTAEARKVWDILHTLDTACPECAGKNKTEIRGITHLHHALDAATLGLIQHYLPGTIKSQKENEKGTLWRALLQRRKSPDDISLLLRTGVFRKSRRPDRQGTPLPDAELVDLEPAVKNQLANRLGEKRVVQHIPADQSGAALEQNPWRVRKVLDHEVILTQWNTGGTGDKQVSFHWDEKRQHGIYQRKKEPQNKELQQIDKLIAACDPNAFTSSELRQLRRGTLKIASEARQKIIGLKPGKLKKNKSVLVISDNFGLSTGSPPRIIRHHEVPKQLSQLARENSGRVPPILKIGSIIDVASGTWKGIWRITSIKETEAYGLSVDVATLDGCKLAKGNARILQMIEDGMKIIKPGLTGLNPTD

SEQ ID NO: 16612 - protein, 1210 aa, unidentified
  REGION 1..1210: note = Cas Enzyme sequence
MKKRILGIDTGTNSLGWAVVDKNDDGSYSLVRKGSLIFQEGVKIEKGIESSKAAERSSHRALRKQYFRRRLRKIEILKVLIEYGWCPYLSAEDLHKWHTKKIYPMDDAFISWQRTNDNYEENPYYYRHLCLHEELNLKDKDKAYLLGRAMYHLAQRRGFLSNRLDQGTEDETGKVKEGITSLSKSMTEAGCEYLGDFFYKIYSEKGNTERIRNRYTDREEHYKKEFYAICDKQKLSEEQITRLEKALYFQRPLKSQRMGVGKCTFEPSKSRVSDSHPSFELFRMLSFVNNIKVQGPYDIELRPLSSEEFEKIRPLFFRKSKVQFDFEDIAKAIAGKGNYQNIKDAGDKNYKFNYRMTQGVYGCPTMANLMSVFGEDYSISIAERYVLSDGKTLEQMVNDVWNVLYSFADKEKVKQWGMDKLQLNDEEAEKFSKIKLTHSFASLSLAAINKILPWLEQRMIYSHAVLMAKIPDIVGQDVWEKRGNEITKELTSLIANFDPRDISMRGTLDYCIKDILKDMCELKPGMAELLYHPSMIETYPDAQKNSYGIYQLGSPRTNAVRNPMAMRSLHQLRKVINTLLQDGTINNETEVHIEYARELNDANKRKAIAQWNKERETLRKKYYEDIRKLYKEECGQEIEPTEDDVIKFQLWEEQKHICLYTGKSIGVTDFVGPKTKCDIEHTIPRSVGGDSTLENMTLCFNYFNRNTKKAKIPTQLSNHDEIMERLEDWRVYIEKLRKDIDRIKTNSSMVKSVKDRLIQKRHLLKQELSYWREKYKRFQMEEVPEGFARRQGTGIGLVGKYAGLYLKSLFHKTDDRTKSNVRVVKGTTTDEYRKMWGIQKEYEKKSRDNHVHHCIDAITIACIEPGEYNATAKYYQQLEEYERENAPKPSFPKPWPTFAEDVKAIANEMLVVHSTPDNMPKHARKYVLTSRGKKIAKGDSVRGSLHNDTYYGAIERDGKIKYVVRKELSVLKESDVENIVDDVVRDIVKKVVAEKGFKKAMEEDIFMNKEKGIKIKKVRCYAPTVTEPLHIRKHRDVSKKEYKRQYHVTLDGNYCMAIYEGEVKGKIKRTFEIVNMIDAAAYFKESANLTKYYPIAPEEKNGLQFRCAVRTGTQIILLQSDDEEIDLSNKEDLARRFYHVAVMQKDGRIILRYNQDAREATVLKKERKAGAYKIGEKYRPEISLSLSDFHALVEGVDFKINVLGEVTLLK

SEQ ID NO: 16613 - protein, 1380 aa, unidentified
  REGION 1..1380: note = Cas Enzyme sequence
MKRILGLDLGTTSIGWALVNEAESNNEASSIVRLGVRVNPLTVDEKSNFEKGKAITTNADRQLRHGARINLQRYKLRRQNLHDCLQKQGWLGTEAMYEEGKASTFETYKLRAKAAEEEISLHEFARVLFMLNKKRGYKSNRKANNKEDGQLFDGMTIAKKLYEEHLTPAEYSLQLLNKGKKFTQGYYRSDLNAELERIWDEQKKYYPEILTDEFKQQLEGKTKTNTSKIFLAKYGIYSADLKGLDRKLQPLKWRVEALKQQVDKEVLAFIISDLKGQIANTSGLLGAISDRSKELYFNKQTVGQHLWASLEENPHISIKNKPFYRQDYLDEFEKIWETQAAFHKQLTPELKQEIRDIIIFYQRSLKSKKSLISVCELEQRKVKATIDGKEKEITIGPKVAPKSSPVFQEFRIWQNLNNVLLIDNDTNEKRPLDEDERNLLYEELSIKAKLSKTEALKILNKKGKQWDLNYRELEGNRTQAILFDCYNRIITLTGHKECDFKKIKASEIRHYVTTIFKNLGFNTDILDFDPSLKKHELEKQPMYQLWHLLYSYESDNSRTGNESLLRKLETTFGFPEEYATVLCDVVFEEDYGNLSVKAMRKILPKLKEGKIYDKACEDVGYNHSRHSLTKEELDQKVYKERLELLPKNSLRNPVVEKILNQMINVINAIIDEYGKPDEIRIEMARELKSSAADRKKTTHAISQGNTENQCIREILEKEFALSYISRNDIIKYKLYEELKPNGFKTLYSDTYIPKDKLFSKDFDIEHIIPKARLFDDSYSNKTLEARDINLAKSNKTAFDFVKEKYGEQGAEAYKKKLDMLLGNNVISRAKYNKLLMAEADIPSGFIERDLRNTQYIAKKACEILGELVRTVTPTTGEITNRLREDWQLVDVMKELNFEKYEKLGLTEIVEDRDGRKIKRIKDWTKRNDHRHHAMDALAIAFTKPSYIQYLNNLNARSNKGDSIYAIENKELHYEEGKLRFNAPIPVNEFRAEAKRHLSAILVSIKAKNKVMTQNVNKIKTKHGIIKKIQLTPRGPLHNETIYGTKMRPIIKMVKVGAALDEATINKVNSPAIREALLKRLNEYSGNAKKAFTGKNTLDKNPIYLNAERTKTVPASVKTVEWENYHPIRKPITPDLKVDKVIDKGIGEILKARLEEFNGDAKKAFSNLEENPIYLDQTKKIALKRVSIEGVLSTIPLHTLKNQAGKPIMGKDGKPVLGNYVQTSNNHHIAFYYDEDGNLQDNAVSFFEAAERKSQGIPVIDKDYNRDKGWRFLFTMKQNEYFVFPNEATGFIPSEVDLTDEANYGIISPNLYRVQKMSRIEKGTSVSRDYWFRHHLETILNDDSRLKNSAFKRINSLKPLEGIIKVRINSIGKIVAVGEYD

SEQ ID NO: 16614 - protein, 975 aa, unidentified
  REGION 1..975: note = Cas Enzyme sequence
PAQIIGGGVRVFPAGVNIDPKSGKNNSLNKDRREARLRRRLLDRRQMRKQYVLKVLQQHGFLPQGKATYKDDNWKNFLLTDPYKLRAKALDNFLEPYEFGRVIFHLCQRRGFLSNRKSKAKEEKSLIKEQTDLLSEEIKKAGARTLGEFLARLNPQEQRKRGRYTLRQWYEDEFNLIWNAQQSNPKLNLNTTLYEQLKRGLFFQRPIKIKKSLIGHCELEPKKYRASVALLSSQQFRLLQTINNTRIFIQKKGVERPLTLEEKRMLIPVLEKTERLTFAKAKKILKLETGDKFNFERGGEKEFKGNTTAAKIIKVVGEEKWNSWNETEKKQIVEDLLSIQNENALVKRAKSKWQLNDQEAEELADIELEDGYINLSTKAIIKILPHLNEGLTYAEAVQKEYPHKAQPPEQELLPPVENLRNPIVQRSLSELRHLINAIVKKYGKPHLIRIELARDLKQNARAREETWKKMRNRQQEREKIIEKILREAGIQNPSRQDIEKGLLWEECGGECPYTGEEINFANLFGEQPLFDIEHIIPYSRCLDDSFANKTLCKANENRNVKHNKTPYEAYGNSERWPEIIRRVEKFKGAYREEKLRRFLLKEIQDENSFIEMFCSAQLNDTRYASRKAAEYIAQLYPAEKRKTAVQTCVGKTTSYLRSAWNLNKILNSDGIKNRDDHRHHLIDAIVVALTSPSTVRTLTMISQRSLRPGTFKDMPLPWENFNSSVESLVQSCIVSHYVDRSINGQLHEETNYGIIIKDGKPRTVIRKPVSQLKDASDIVDDAVRKAVADKLAELNLPPNKAFQDEKNLPFLTTRAGRKIPIRRVRIFENVEFTEIDSDENKRRVKTGNNHHLEVFACKDKKGRDTWRGVVVSVLEAMKRRRMCQPIIRKFDEYNNPLVFSLVKGDTVQMQWEGKNIIAVVQKFSDHDYTFKPHTDARLASDIEKPIRIRSDKTFYATGCQKLSVDPLGNYHISHD

SEQ ID NO: 16615 - protein, 1047 aa, unidentified
  REGION 1..1047: note = Cas Enzyme sequence
LLGTGVVLFPKDACLASARRGFRRSRRNIAARRSRIDRLKNYLAGLGVLSRDQLDANSNSYPWLLAARILASDGKKTLTWEELWSVLRWYAHNRGYDGNALWAGDDADAGDKEDTDKVKNSIALMEKHKTATMAETVCKALGLDPMGEVKASRIYFKGNNAAFPRGVVTEEVRRILAAHAGKLPKVDDALSDILLRNAATSGLELPARFKGGLLFGQYVPRFDNRIIPACRITGKNTPLKRCPEYLLYRWGRLLNNLTVFGADGQIRTLLPAERQALHSRMEADGFFTKRTLNAALKDVTGCTPANTESFFLTEEMEEALVLDPVKKLLATNQIMKDLWPQLSAESREKAQSSLSAGKKIRLGDILAEMETAGQDTTAASDALASHQKKAKKKNADLATRRLSADYPKGRAAYCREILAKTFDESISGKDSTKEGGCLYETEEIRNRLLREPLVQQTNNHLVRHRLLVFERLLAHMVEEFAGGDEKRIAATVVEVVRELQEFSGLNSKEITHKLNEKLGNFRSVVKNLEEAIANSEERVAITGSLIRKARILEDQGFVCPYTGTHLSYNHLLADRLEIEHIIPRSLRPSDALSSCVMTFRSVNDMKGQRTAMQFICEEQGREVPGHENIQITTKKAYVDYVAKHKKQYPQKSDDRRRCERRAELMLMERYDQRNADFTERDLTQTSHLNKMAIRLVKQRIGIDAKHLPGNVTAFIRQKLHIDECLFNAVPRLQTAAKGQPKSSKRKKKAEEAPVEPIQDDMPPRKLTKADIRELTYLHHAMDAVTQGLALLLFAPEDWPLLVKRNLPDSEQRHLKARYPFLDFSADKHISIQDLPEDTLHTISERLAECRVVRHIPAKMHGIIVDQTTWGIVAAGAITTLRQKTTEKNARCDENGKRFIKTTEKKRSLLLGGPDAPDGKLAKIKGAILVTENWGCALDPSPTVIPHFKVYPQLRALREKNGGRPIRILRKGSLIQVKAGTYQGIWSVASIKDNADGICLDINAADKVKLENRSDDSKINVRLDSLRKSGLKILKPKLTGACPTTSSP

SEQ ID NO: 16616 - protein, 1543 aa, unidentified
  REGION 1..1543: note = Cas Enzyme sequence
MKKILGLDLGTNSIGWALVEGNFEEKQGRILGAGTRVIPMSQDILGEFDKGNSISQTAERTKYRSVRRLRERYLLRRERLHRVLNILGFLPKHFANNIDFEKRLGQFKDEQEPKLAYNDNGFIFQNSFNEMLEDFKTLQPELVAEGKKVPYDWTIYYLRKKALSRKIEKEELAWILLNFNQKRGYYQQRGEEEEENPNKLVEFHSLKIVDVTADEQQKSKDDIWYSLILENGWVYRRSSKTTLLDWKDKTRDFIVTTDLNDDGSIKTNKEGNEKRSFRVPSEDDWTLLKTRTEQDIEKSDKTVGAYIYATLLQNPNQKIKGKLVRTIERKFYKDELKAILSKQIPLHPELQDESLFADCVRELYRNNENQQNTLDGKSFLHLLINDIIFYQRPLRSQKSTIGSCSLEKRKYKDTNGDEQIISLNGISKSNPIYQEFRIWKWMFDLSLYQKDNDSNVTNQFLQSYEDYEKLFEELNSRKEIKQEGLVKYLVEQTGLKGKAATAEAGKYRWNFVEDKPYPLNETGSLIANRMEKVEGLAKDFLTKEREHQLWHIIHSVTDKTEYEKALKSFALKHKVDENTFVENFKKFPPFKSDYASYSEKAIKKLLPLMRLGKYWNWEAIDTSTRDRIEKIINGEYDENISDRVREKTKSLSEQHHFQALPDWLAKYVIYGRHSEASDLTKWSNADDLKGYLEEFRQHSLRNPIVEQVITETLRVVKDIWQHYGRGAKDFFDEIHIELGRGMKNTAEDRARITSQVTENDNTNLRLKALLVEMMQQGDVENVRPYSPTQLEILKIYEDGVLNSNIEVPDDILKISKTAQPSRKELLKYKLWLEQRYRSPYTGEMIPLNKLFTPDYEIEHIIPQSRYFDDSFGNKVICEAVVNKLKDNQLGLEFIKKHHGEKVETGFGKTVTVFEEDGYQNFLKEHYAKSRGKKAKLLMEEVPEKMIERQLNDTRYISKFVSSVLSNIVRAEKDDDGINSKNIIPGNGKITSQLKQDWGLNDAWNNLILPRFERMNELTKSDAFTSYSKNHQRKLPTVPLEFSKGFQKKRIDHRHHALDALVIACATRDHVNLLNNQHANSDTKRYDLQRKLRKYEKVKYFNKKEGREIERDVPKDFLKPWANFTTDAKTQLEKIVISFKQNLRIINKATNKYESYKDENGTLRIGKDGKPKKDFIPQTKGDSWAIRKSMHRDTVAGLVKLQKKKEVSLNNSLDEVQNIVNKSLRKKIFNLMTEGLDKNKIIKHFKELGGQWEGQPLNKVEIYFWEIDKEGNGINTASRVKLDDTFNESKIETITDTGIQKILLNHLNKYKDHKDDNGKDITPETLAFSPEGIEDMNKNLTELNGGKNHKPILKIRTYEVKGTKFNVGGIGNKKDKFVIADKGTNLFFAVYEDEEKKKRNYETIPLNEVIEHQKWRATLSKEEQTQTPLIPVKPENGRFLFSLSPNDLVYVPDDDETTLSIDFKNLSLDQTSQIYKVEKASGTECYFVRNDIAYLIKQYDSKTKIGELESQNKLQTTMCKNRIKIVDRCFKIEVDRLGIIRKKY

SEQ ID NO: 16617 - protein, 1426 aa, unidentified
  REGION 1..1426: note = Cas Enzyme sequence
MKNILGLDLGTTSIGFAHIVEDENKEKSEIKELGVRIVSLTTDEQSDFEKGKSISTNANRTLKHGARLNLDRYQQRRKYLIDLLQKANLITSSSILAENGKNTTHSTWQLRAKAVTERIEKEEFARVLLAINKKRGYKSSRKAKTEDEGQAIDGMVIAKRLYDENLTPGQLSLQLLQQNKKLLPDFYRSDLQKEFDLVWNFQKQFYPDILTDSFYKELQGKGKDATSKAFSKRYHFDTAENKGSKESVRLQAYQWRAEAISKQLSKEGVAYVLTEINNNLNNASGYLGAISDRSKELYFNRQTVGQYLYAQLQENKHNSLKNKVFYRQDYLDEFERIWETQASFHKELTEELKKQIRDVVIFYQRKLKSQKGLISFCEFESKEIEIEKDGKTITKSIGARVVPKSSPLFQEFKIWQILNNVTCKRKGIRKKKSSAKSTELDLFNEPSQTIFSLDMECKQLLFEELNLKGDLKSDKVLKLLGYSPQEWEINYNQLEGNRTQKALYEAYLKIVEIEAHDVKDILQIKSAKDDWALDESPLSASEIRESVKAIFQALGICTKILYFDPLLPVKEFEEQDSYQLWHLLYSYESDDSTSGNETLYRILEKKYAFKREHATILANIALQDDYGSLSTKAIRKLYPYIKENQYSTACEKAGYKHSKLSLTTEELEARELKNIIPLLKKNALRNPVVEKILNQMINVVNALIEKNSERDAEGKITKYFHFDEIRIELARELKKNAQERYEMTQNINKAKLEHQKISEILQKEFGIKNPTKSDIIRYRLYQELEHNGYKELYTNAPIARDMLFSKNIEIEHIVPKARVFDDSFSNKTLAFREFNIKKGESTAFDYITSLNSEEELNQYLTRVENAYKTKSISPTKYKNLLKKASEIGDDFINRDLRDTQYIAKKAKEILFQVTKNVLSTSGSITDRLREDWGLVDVMKELNMPKYQSLGLTEVEERKEGNKVTVIKNWTKRNDHRHHAMDALTVAFTKPSYIQYLNHLNARKDENNKNYSVILAIEEKETIKVPTNNGKNKRVFIEPIPNFRQVAKKHLEEIFISHKAKNKVVTKNINKPADTDNQQITLTPRGQLHKETVYGKYQYYVNKEEKIGVKFDKETIAKVSNPVYREALLKRLQANDNDPKKAFTGKNALSKNPIYLDEAKTKTLPEKVNLTYLEEDFSIRKDISPDNFKDLKSIEKVIDQGVKRILIKRLQAYGNDPKKAFVDLEKNPIWLNKEKGIAIKRVTISGVNNAQPLHIGKDHLGKTTLNKEGKEIPVDYVSTGNNHHVAIYRDKEGNLQEQIVSFFEAVVRAQQGLPIVDKTYKQAEGWQFLFTMKQNEMFVFPNEATGFNPAEIDLLDPKNKKLISPNLFRVQKIATKDYFFRHHLETNVETDNILKNVTWKREGLSGLKDIVKVRMNHLGDIVSIGEY

SEQ ID NO: 16618 - protein, 1153 aa, unidentified
  REGION 1..1153: note = Cas Enzyme sequence
  REGION 1107..1121: note = misc_feature - Xaa can be any naturally occurring amino acid
MKRILGLDLGTNSIGWALVDSEEQRILGMGSRIIPMDQGVLDTFSGGNPVETQTAARTAYRGTRRLRERALLRRGRLIRVLNMMKFLPEHYASQIDFEKRLGQFLDEKEPKLAWKQNDEGRFEFIFQQSFNEMIEEFKNSGVVGEDKKIPYDWTIYYLRKKALFQEIEKEELAWILLNFNQKRGYYQLRGEEEEENPNKLVEYYSLKIVDVIADEKPNSKGDTWYSLHLENGWIYRRSSKIPLFEWKDKTRDFIVTTDLNDDGTVKKDKEGTEKRSFRAPSENDWTLLKKKTESDIEKSHKTVGTYVYETLLQNPMQKVRGKLVRTIERKFYKDELKQILEKQREFHPELRDEDLYNDCVRELYRSNETYQFILSKRDFVHLFLNDILFYQRPLRSQKSAIGDCILEFKTYKDKDGNDIKEYLKVISKSNPLYQEFRIWQWLYNLKIYRKEDDEDVTLQFIANIEDKEQLFDFLNNRKNIEQKPLLEYLIKAKGLKKQVKTEAYRWNYVEDKIYPCGETKTMISTRLAKVENIPDDFLTKEIEQKLWHIIYSVTDKNEFEKALRTFAEKYDLDIISFVDNFKKIPPFKNEYGSFSEKAIKKLLPLMRLGKYWKWSDIDNNTQNRISKIITGEYDEEIKDIVREKSIALTNEDDFQGLQLWLAQYIVYGRHSEADIAGKWHSVADLEKYLNEFKQHSLRNPIVEQIITETLRVVKDIWQKYGQGAENFFSEIHVELGRDMKNTADERKKIANVVTENENTNLRIKALLMELKNNSDGKLEVENVRPYSPMQQDILKIYEEYAISTGLDNEKDEKVKEDIKKISRVAQPTTIELQRYKLWLEQKYCSPYTGKVIPLGKLFTEEYQIEHIIPKSRYYDDSFSNKVICEAAVNKLKDKCLGLEFIKNFHGQIVETGFGQKVTVFDEESYQNFVKQHYAHNRSKRTKLLLEEIPEKMVERQMNDTRYISKFVLPLLSSLVRAEKDDDGINSKNVLPGNGKITTILKQDWGLNDVWNDLILPRFVRMNELTRTTAFTSWNEQYQKYLPTVPLDLSKGFQKKRIDHRHHAMDALVIACATRDHINLLNNKHANTDTVRYDLQRKLRLFERVTYXXXXXXXXXXXXXXXFRKSLKSHGIISLLMLVMNWKELLLALNKTCV

SEQ ID NO: 16619 - protein, 1094 aa, unidentified
  REGION 1..1094: note = Cas Enzyme sequence
MKTATRNVIALDLGVGSIGYCLAKFDGETLVDTLNGSHIISNDESSYNEGKFVSSTKKRTLERGARKTKTRKKNNKRKVANLLSILGYDNKTHRFDNLHLLKIKALTGKVGLPELSAILYSYASHRGYNELTDINHEDNQKGGLKDVANSLKKECDDMGITISEYFQRSDKNIRRNNIFPNSHILQEMYVDELRKIYTTQQKYHKELTQIFLEKIINQIYFRLPLKSVREMKNDCIFENKRKVTPIANPLFQEYRAWSAIHNLRITSHNIVIPNEIKQHIFDTLKTKENLTRKEITSIIQKQLSIKNITINDMTIKGLTTFIRIKKCGYDIYGNVDKTNVKPFGVCWEDVYSNINLSKYGINDNVHLEKTNSSLSNKAIAYMLPYMNGEKDFLNSYEAEQICYPKKDTNMVSKSILDLKYIQKNTLKNPVVTKIINCAINIIKKLSETHHIDEIKIEMIRAMTTPSAKREQLHKDNKKREIVNNIVKKLIETNFNVSSESIKNINKVKMWLEQADVSVHFSNLAVLKNVDVSVLTSYCLYSGKVIPFKSIFDSNIDIEHTIPKSRIYDDSFENTTLAYREYNQNKGRYTAFEYFEVNDITMRELSSFSYRKMKNFKYADPKYVSSDNDSIDISEKSQFAASSLNNTAYIAKYLVSHIKDYFGKVSVTNGSITNEIRNMELMDGENVHFSQVLSGENFPLYLRNDKDIRKRKTKRDDNRHHALDAFIIAITSEKHKQMFSKIGKHGDNDMNGIKQIREDIIKNILGGQHPKDYIDNILIPLFKKMPVNIKKEKSIIYKKKVNGVDSLCVRGNLFGATIYGKRKIDGVEIITSRSRIDAIRYCDIDDIIDDVTREIIKNIVKPFEDIIKGKEKENLFNFVNEKTSNYYGELNFNTNFKINIPTFNIVDSQNNVFKRIKLKVCRKNDSHVVTKGGIYSGNTNVMCVIKKENGKLKTETVTLNKLAIVRRSNADVKKEFYKDVIYKIKTNDYFVLGHSKQEIEELIVNGKTNEFMDKLFYVTETSKDGSIKTRPHHVGRGGKVLIYNEKNGIYDEKTGQAYYKNMNIGGYIKEFNVLTKVKIDILGNIIPLSSFSNTN

SEQ ID NO: 16620 - protein, 1094 aa, unidentified
  REGION 1..1094: note = Cas Enzyme sequence
MKTATRNVIALDLGVGSIGYCLAKFDGETLVDTLNGSHIISNDESSYNEGKFVSSTKKRTLERGARKTKTRKKNNKRKVANLLSILGYDNKTHRFDNLHLLKIKALTGKVGLPELSAILYSYASHRGYNELTDINHEDNQKGGLKDIANSLKKECDDMGITISEYFQRSDKNIRRNNIFPNSHILQEMYVDELRKIYTTQQKYHKELTQIFLEKIINQIYFRLPLKSVREMKNDCIFENKRKVTPIANPLFQEYRAWSAIHNLRITSHNIVIPNEIKQHIFDTLKTKENLTRKEITSIIQKQLSIKNITINDMTIKGLTTFIRIKKCGYDIYGNVDKTNVKPFGVCWEDVYSNINLSKYGINDNVHLEKTNSSLSNKAIAYMLPYMNGEKDFLNSYEAEQICYPKKDTNIVSKSILDLKYIQKNTLKNPVVTKIINCAINIIKKLSETHHIDEIKIEMIRAMTTPSAKREQLHKDNKKREIVNNIVKKLIETNFNVSSESIKNINKVKMWLEQADVSVHFSNLAVLKNVDVSVLTSYCLYSGKVIPFKSIFDSNIDIEHTIPKSRIYDDSFENTTLAYREYNQNKGRYTAFEYFEVNDITMRELSSFSYRKMKNFKYADLKYVSSDNDSIDISEKSQFAASSLNNTAYIAKYLVSHIKDYFGKVSVTNGSITNEIRNMELMDGENVHFSQVLSGENFPLYLRNDKDIRKRKTKRDDNRHHALDAFIIAITSEKHKQMFSKIGKHGDNDMNGIKQIREDIIKNILGGQHPKDYIDNILIPLFKKMPVNIKKEKSIIYKKKVNGVDSLCVRGNLFGATIYGKRKIDGVEIITSRSRIDAIRYCDIDDIIDDVTREIIKNIVKPFEDIIKGKEKENLFNFVNEKTSNYYGELNFNTNFKINIPTFNIVDSQNNVFKRIKLKVCRKNDSHVVTKGGIYSGNTNVMCVIKKENGKLKTETVTLNKLAIVRRSNADVKKEFYKDVIYKIKTNDYFVLGHSKQEIEELIVNGKTNEFMDKLFYVTETSKDGSIKTRPHHVGRGGKVLIYNEKNGIYDEKTGQAYYKNMNIGGYIKEFNVLTKVKIDILGNIIPLSSFSNTN

SEQ ID NO: 16621 - protein, 1363 aa, unidentified
  REGION 1..1363: note = Cas Enzyme sequence
MKKQQFSDYYLGFDIGTNSVGWCVTDLNYNILKFNKKDMWGSRLFDEAKTAMERRIQRNTRRRLKRRKWRLNLLEEFFSEEILKIDSNFFRRLKESQLWLEDKSIKENFTLFNDDNYKDYDFYKQYPTIFHLRNELVKSSEKKDIRLVFLAIHSIFKNRGHFLFEGQNLEEIKNFETLFNNLISFLEDNNINKKIDKNNMERLKEIICSPKKSIKEKEIKEMFGSDKQLVSFFKLCVGYNVSLNNLFETDEYEKEKISFKEQIYEEVKPTYYSLLGEKIEFLDIAKSFYDFMILTNILDNMTYISDAKVKKYEEHKEDLKNLKYFLKKYAKDDYKKIFTKNEEKLKNYTAYIGLNKVNNKKEVLKEKKIKIDDLSKLIKDCLSKIDNIDSADKAIYMELLNKAEQNTLLPKLRITDNGTLPYQVHEIELKKILENQAKHYEFLNNKEDGITVKDKILMTFKFKIPYYVGTLNFYHKNKSKNSWVVRKEKGKILAWNFDKKVDIERSAEEFIKRMTNKCTYLNGEDVIPNDSFLYSEYVILNELNKIRINGKFLNVENKQKVIDNLFKKQKRIAEKAFKEFLLKNNIIDNIKEIEGILGSFNSNYNSYIKFETIFGNKLDLELYKEIAENSILWKCLYGDDKKIFEKKIKSIYGDILTEEEIKNINSLKFNSWGRLSKKLLTEIEFSNLETGEHYSSIMDALRKTNYNLMELMTPKFDLEKSIDNENKETNNFSYKELIENSYVSPSIKRAIFQTIKIYEEIKKITGKIPKKVFIEMARGGDETMKSKKIPARQEQIKKLYDNCKKEVSNFSIDIKGLKETLKSYSNNDLKQKKLYLYFLQLGKCLYSGEKIDLNTLLKNNDIYDIDHIYPRSKIVKDDNFDNLALVLKTENAKKSDKFPLNENIQTKMKKFWYFLKENNFISAEKYKRLTETSQVEIKGFLARQLVSVRQSTKEIGKILQQIEPEIKIVYSKAEIATSFREMFDFTKVRELNDSHHAKDAYLNIVAGNVYNTKFTEKPYRYLKDTKENYDVKKIYNYNIKNAWDKEKSLEIVKKNMEKNTVNITRFIQEEKGQLFNLTIKKKGKTTNEIVPIKPKCYTGNNEKLNEKYGYFQSLEPAYFLFVEHKEKNKVTRSFERITLVDVNKTKEKSDLIEYLIKIKGLIEPKIIKKIYKKQCILIDGFPYLLTGLTSDKNLELKNNKPLYLEKEYEKILKNSIRFYEDNFGNSEEKYKYIFLKKKDRFEKQEAITSVKERYNTQFNKMYDKFLEKLNSKEYKKYMNSQKYQILLEKKKDFLKLNLLDKAYTLRAFLKLFTNETNGDFSKLKLSATLGRLNGKSSNAISKNELYLFEESITGLFAKKIKLN

SEQ ID NO: 16622 - protein, 1320 aa, unidentified
  REGION 1..1320: note = Cas Enzyme sequence
MNDYYAGFDMGTDSVGWAVTDPDYNLCKFKGNAMWGIRLFDESNTAEERRGFRTSRRRTERKRQRIEWLQMLFDTEIAKKDIAFFQRLKESKLYLEDKSTAVPYAVFADEDFTDVDYHNLYPTIYHLRKELILSSEPHDVRLVYLALHHLIKNRGHFLFDNMGSDFEKESSFEVLFSNLQEYLCTEYELSLECTDCTQIAEILKDKTKRKTAKSSEICKMLGISKKTHPKQTAVILLLCGQSVKLADLYGDDSYNNEEKPSITFEKGYDDNEEYYRDLLLERFELIEKVKALYDWAVLADILKGEKYISFAKVKTYEEHKSDLQQLKSFVKEKCKSEYNEIFRETKDKLNNYTAYCGKFKEDGKNGAIIYRTNQIDFCKYLKGKFDKLDKTGYESMFEKIENATFMPKIVIKDNGVIPMQVNKSEVKAILKNASEYLDFLNDADENGVTVADKILQIFEFRIPYYVGPLNNSSDKAWLVRKEGKIYPWNFKSVVDVDKSAEEFINNLTAKCTYLPDKDVIPKNSILYCKFMVLNELNNLKIDGKKPDVSFKQAVFNNLFMRRKKVTQKALRDYIKAQTGNTPEITGIDGDFKANMRSALELSIYNLTEQDKEDIIKAITIFGDDKKLLKRRIKMKFSDKLSEDEIKKICKLKYKDWGRLSREFLTEIYDFDTTTGECKDNIINTLWNTNDNLMELLGSKYNFAKSVENAVLGSTHKASIEKMIEDMYVSPKVKRPVYQSMKIMQEIVKVKGGAPKKIFVEMTRHDGTKGDAGRTKSRKIQLEELYKKCKEDSGELWEELEKTEDDRFKQDKLYLYYTQMGRCMYSGESIELKDLFANNLYDIDHIFPRSKIKDDSLDNRVLVKKQINDHKDNDYPLDGSTREKMKNHWQYLYQHNFISKKKYERLTRVTPLTDDELSDFIARQLVETSQSTKAVATLFKTLYPNTEIVYVKAGLVSEFRNEYKFTKCRDVNDLHHAKDAYLNIVVGNVYNVRYTHNKSTFIKGLQTKKYSLNKMFTFETKGTWDIENSKSISTVKKSMHKNNILFTRYSYVQKGGLFKINPLKKGNGQAPLKKDLPLSDISKYGGYDKPTAAYFSYVKYDGKKGKECRQLVAIDNYLKKYYEENPTEYLTARLGLKNPVVLIPIVKYNSCIEIDGFRVHMSAKTGKYISCKPATQLVLGADKEAYVKKISKLLSKPEEWKITSFDGISEDENIALFDAFVDKMTNTIFKVKFADMGSKISSHRDKFVSLDVRKQCYVLSEILKIIHCNVVTGDLTFINEAKKAGAIKFGMVVTDLKGINSIKLINQSVTGLFESKVDLLN

SEQ ID NO: 16623 - protein, 1320 aa, unidentified
  REGION 1..1320: note = Cas Enzyme sequence
MNDYYAGFDMGTDSVGWAVTDPDYNLCKFKGNAMWGIRLFDESNTAEERRGFRTSRRRTERKRQRIEWLQMLFDTEIAKKDIAFFQRLKESKLYLEDKSTAVPYAVFADEDFTDVDYHNLYPTIYHLRKELILSREPHDVRLVYLALHHLIKNRGHFLFDNMGSDFEKESSFEVLFSNLQEYLCTEYELSLECTDCTQIAEILKDKTKRKTAKSSEICKMLGISKKTHPKQTAVILLLCGQSVKLADLYGDDSYNNEEKPSITFEKGYDDNEEYYRDLLLERFELIEKVKALYDWAVLADILKGEKYISFAKVKTYEEHKSDLQQLKSFVKEKCKSEYNEIFRETKDKLNNYTAYCGKFKEDGKNGAIIYRTNQIDFCKYLKGKFDKLDKTGYESMFEKIENATFMPKIVIKDNGVIPMQVNKSEVKAILKNASEYLDFLNDADENGVTVADKILQIFEFRIPYYVGPLNNSSDKAWLVRKEGKIYPWNFKSVVDVDKSAEEFINNLTAKCTYLPDKDVIPKNSILYCKFMVLNELNNLKIDGKKTDVSFKQAVFNDLFMRRKKVTRKALRDYIKAQTGNTPEITGIDGDFKANMRSALELSIYNLTEQDKEDIIKAITIFGDDKKLLKRRIKMKFSDKLSEDEIKKICKLKYKDWGRLSREFLTEIYDFDTTTGECRDNIINTLWNTNDNLMELLGSKYNFAKSVENAVLGSTHKASIEKMIEDMYVSPKVKRPVYQSMKIMQEIVKVKGGAPKKIFVEMTRHDGTKGDAGRTKSRKIQLEELYKKCKEDSGELWEELEKTEDDRFKQDKLYLYYTQMGRCMYSGESIELKDLFTNNLYDIDHIFPRSKIKDDSLDNRVLVKKQINAHKDNDYPLDGSTREKMKNHWQYLYQHNFISKKKYERLTRVTPLTDDELSDFIARQLVETSQSTKAVATLFKTLYPNTEIVYVKAGLVSEFRNEYKFTKCRDVNDLHHAKDAYLNIVVGNVYNVRYTHNKSIFIKGLQTKKYSLNKMFTFETKGTWDIENSKSISTVKKSMHKNNILFTRYSYVQKGGLFKINPLKKGNGQAPLKKDLPLSDISKYGGYDKPTAAYFSYVKYDGKKGKECRQLVAIDNYLKKYYEENPTEYLTARLGLKNPVVLIPIVKYNSCIEIDGFRVHMSAKTGKYISCKPATQLVLGADKEAYVKKISKLLSKPEEWKITSFDGISEDENIALFDAFVDKMTNTIFKVKFADMGSKISSHRDKFVSLDVRKQCYVLSEILKIIHCNVVTGDLTFINEAKKAGAIKFGMVVTDLKGINSIKLINQSVTGLFESKVDLLN

SEQ ID NO: 16624 - protein, 1127 aa, unidentified
  REGION 1..1127: note = Cas Enzyme sequence
MAKILGLDLGTNSIGWALIDDKLNKIIGIGSRIFPMGVENLGDGDNEMSKNASRTGARGVRRQFFRRRLRKKVLLKALSENNMCPMDANDFEYWKKTKLFPSEKLATWFALNPYELRQKALNEKLSLEEIGRIFYHLIQRRGFLSNSRKGGSDDGAIFKGNAKEGKIGIDDTLESIEGKTLGSYLYEIYPKENKPFQDGLERIRNRYTTRKMYIDEFELIWDKQAQFHSVLNHDLKTKFGGRKQDNYDADGILFYQRPLRSQKHLVGNCSFESTKTKCPISAIPVEMFRIWQWVNTVEYNGNKISHTEKEKLIEQLLLSDKIEFKKLRKAIEKESAEFKFNYKDDDKIVGTYTISNLSNKKFFGKKWFEFSEKEQEDIWHVLYFFDSKSNLKEYAIKNWNFTEEQAIAISKFNVKDGYASLSRKAIANILPFMQQGYTYDVAVVMGGIKNTFGDKWQNDISENNQKQLDLIDNVYDIVRSKISGGFIDTIKDFLRKDFNFDDKQLKKLYHHSATIDVETLLEKLPVNKEADKEIQAIRNPIVITALFELRKLVNELIEEHGQLDEIKVEMARDLKISKSQRNKIRRDQKRLERENDRIKSEVEKYARVSHDNILKFKLWEECKQTCPYTGVAIPVAKLFTGEVQIEHIHPWSRSLNDSFNNKTLCYADENRRKGDKTPFEFYGNDELDWGARKERALKLFSDTKEYPNAYQKFKRFVQQKFDDDFSSRQLNDTRFISKEASSYLKQVCKKVNVSPGQMTANLRQKWGLNTVLNDENAKTREDHRHHAIDALVMACSKTSYLQELSKWNRYNRNYDLKDFPMPWETFRFDAEKAVDKILVSHKRISNDITIRYTKVEKNGKTHINKGVAARGQLHKETVFGKRNFNGEEAFHVRKAIDSLATEKQLEKVVDEAIKKLIYKRIHEIGGFVKGTIPANTFFIVDENGVKQPQIFLPNKNGAPVPILKIRMKENIGGAEKLKDNVNQWVNPRNNHHVLIYKDEKGNLKEEVVTFWTVVERKSKGFPAYQLPPEGKEIVTTLHINDMFLLGLNEDEINWENPDYDVLKEHLYRVQKLSSKFYEFRLNTEASIKQSFLPFYRRITGYGEGIGGWLTHNPLKVKISVSGKIEKL

SEQ ID NO: 16625 - protein, 1028 aa, unidentified
  REGION 1..1028: note = Cas Enzyme sequence
MTNKTVLGLDIGSNSIGWALVNIGSEGQPEGIMDMGVRIFDAGIQEDTPTGTAGPKNRERREARLRRRLYDRRRRRKRKLLNVLKRSNLFPETDEIAESIKKMDEQTYFRYKNEVEDARKLAHSIPYFLRARALDHKLDRFELGRAIYHLGQRRGFLSNRKAQAKEDEGVVKAAISTLRREIEESGSRTLGEYLSKLDPEEQRLRARYTHRQMFIDEFNEIWQAQRGFGHSELTDSLKKEMEKAIFFQRKLKSAKHLIGSCALEPEEKRCPWYRFEAQRFRVLQNVNNLRLIDQDGVERQLTESERTKLIELLEEKDKVTFTEAKKALGLKPRSCRFSIESGGEKQMRGNRTNAALKSVFGKRWDSLAGEQKEKILLDLHSFKKEWALAKRARKVWELNEEEAEKFSKIRLEEGYCNLSLKAIRKITPLLEAGKAYAEAAKEVYGSFKLDKPVVESLPPVDGEIDDLRNPVVHRCLTELRHCLNPILKRYGKPDSIHVELARDVKSSRQEKKRRTDKMRDNERARQAAAAKILQKTGISDPSRNDVLKVLLAEECNWTCPYTQKSIDWAGLFGSSPEYDIEHIVPFSVSLDDSFINKTLCFHQENVHVKKNRTPYEAYGNDKEKYEAIIQSVKRFRGSARGEKLRRFLLTDTSEFENFSARHLNDTRYASKETVNFLSLLYGGISDESGKLKIQTVKGQITALLRNYLGLNSIFGEGGKTRNDHRHHAIDALVVAITSPLAIKRLSTYAGRYGHLGRIPFGEESTLGEEVMQQVRDKIDGITPVHRYSKKVRGALHEETLYGLGADKGTANIRRPLENMKQSEVDKIADNTIQRLVRDKLAELGESDPQKAFKKPENRPVITTREGRERKINSARIKTKLATFPIGAGDKQRYVKGGSNHHIEIVALLDDSGNETEWEGHVVSLFEAYQRKKNKQPVVQRDFGAGKKFKFSLAWGELVEMEIEKGKREIFVLRSVYQQMAFARATDARMKKDIMAAGDWVTKYPNTLRAAKCRKVFLTPFGEVRYAND

SEQ ID NO: 16626 - protein, 1336 aa, unidentified
  REGION 1..1336: note = Cas Enzyme sequence
MKKFEDYYLGLDLGTSSIGWAVTNEKYDILRFNKKFMWGTHLFDMGNTAAERRIFRTSRRRLKRKKSRIELLQTLFSAEISKKDFGFFQRLKESQYFIEDKTVKNKNTLFMDKNYTDQDYHMEYPTIYHLRKALIDNEESAFEIRKLYLAISHILSHRGHFLFEGELSDNLDFDDIFNEFVKYLNEELNIDFKIKSSASLQAIKEILTDKTLNRTKKKEKLSELLEEEKNKIYQEIWKLLVGNEAKISTIFDDKEYEEAKIAFSKGNYDEKEEEYESILGEKILFVQKAKAIYDWMLLQNILKEDKYLSYSKVKLYDEHKNDLKILKEVLKRLDKKAYKEIFSENGLYENYVKKNGKEELYKKIKSYFNDENTDEIVKNILNKIELDSFLPKQKIKDNGVIPRQVHQKELEIILKNAEKYFTWLTEKDETGLSVSEKIMKIFKFKIPYYIGPLNSKSPFAWIERKEYGKILPWNFENMVDMSKTAEKFIKRMTNKCTYLPEKDVIPKNSLLYTKYMVLNELNNLKIRGEKIKVELKQKIYTELFQKNKKIGMKTLIEFLKSQNIVVTKAEITGIDGTFNTSLGSYIDMKKIFGEEKIVKDSYKKMIEDIILWITLYGEEKKLIKSKIEEKYPEKVTPEEMKLILKLKYKDWSRLSKEFLTEIETMDEETGELISIIEMLWRKNENIMELLSYKYEYLDRIKEYNGINEEEKNITYEDLVKDLQVSPSVKKMIWRALVIVKEIKKVTNKSPKKVFIEMARDTQTEKKRTEKRKDKLLELYKNIKNDDSIKELEKNLKDKTNDDLKSKKLYLYYLQLGRCMYSGEVIRLEDLMNDNLYDIDHIYPQSKIKDDSFDNTVLVKKQINADKTNEYPIDKSIQNKCKAFWTSLKERGLMSNTKYERLTRTEGFSDDELAGFISRQIVETRQATKVLADLLKVIFGSDTRVIYVKAGLTSDFRQKFGIYKFRELNDYHHAHDGYLNIVTGNIYNTLFTDNPYNFIKDRKKDNRTYNLNKVFERENDVWNPDVMLSKIERYIYKIRPLFTRASYERKGKFYNIQYVKKGKNLISKKNNLNTEKYGGYSGVENSYFVIYLYKQKNKDIKKIDTIPVYLREKINSDKDIMDYLKEKNKIEGDIKILENRIKIGSKIRFENEIYYLKGKPDENRLSVGYMKQLILSKSSYEVMRKIIKNIEKLNLENTEEKLSKILKNSKNSKELTTKEINIKINTVYGELYEKISEKEFGKIFSTITIPLKEYLAKSNLEILEDFNKLDIFSKIRVLEEIFKVITKLDNFSLKDIGGHKAITNARISINKILASEDFCIINQSPTGLFEKKVFLDK

SEQ ID NO: 16627 - protein, 1431 aa, unidentified
  REGION 1..1431: note = Cas Enzyme sequence
MQEESGMYNIGLDIGTGSVGWCLTDNNGHLLKINRKGNNGRSYRNSAWGVRLFESADTAADCRIKRSTRRRYNRRRTRIIELRKIMSDMIMPIDPNFYARLDEAFLWNEDKSDKAKAPFLLFNDKEYNDKKYYEDFKTIYHLRKYLINTTNKVDARLIYLALHHMMKYRGHFLYEGQTFESIDNVEDVFVELNNLVNAYIKECEDKDGNEYNDVYREIKKCLADNEIKNKDKKELIAAMFMRADYSKKYSKEVAVAILGYEFNVGIIVGENELTGEDNKPLKTKFSDANYEEQEENISSVLGEKYSIIEALKKIYSWKVLHGILGDNTYISSAMVAKYNIHKQQLSELKQLFHKYASLDEYSDFFHKEKDKSGNDIVNYANYIKGIKRLTNKDNKNYSAKQQLYISIRKILDDRALKDETYQKILKEMEEETFLEKINNVDNSAIPYQLNLMEMDKILTQQGVYYKELKDNKEQLLKMLTSKIPYYVGPLNNHNKGNRNFAWMTKRAGKENEKVYPWNIKDVVDIDVTAEDFITRMTNYCTYLPDEKVLPKESLLYQRYMLLEELSQIRIDGKKLSKEDRKAIIDDLFIGKGRVKVSDKDFKEYLNKVNYVKVNGKGYDVTGYQSDDGFACALSSYNKFRRILGHIDEQNEKMIEDIIYWITVFEDKDIVKRKINKQYTDRLSAEQLKKILKLKFKGWGRYSAKLLNGIKGDMGTTIIEMLEDADERFAYCDYCPNFMQIINKDEKIKQIIDDNRPRYDGTKDLLDVIQDMHTSPANRRGIWQTMKAIEEIIEYMGEKPQQIYIEFAREDDPKAKNKRADSRKRAIDKALKKLKEDVVDEYNENVYKELKQYEKRLDEEKVYLYFMQNGKDLYFPDKELNLDELEKLEIDHIIPYSLSDDDSLDNKALVLKGNNQNKGNKIVKEAFPQLFSNSGTVNYWKNLKKAGLISEKKYNNLQKNNVDDILTKGFINRQLVETRQIVKSVANLILDYYNEQIDVIEVKASLSTSVRKMLTYEKKDSNGFWEENKDNCMFYKNRDMNDYHHAHDAYLANIIGMYIQKNYPHLQKELNYSQYRRVWRKYYENTKNNNGVNWFATLGKFSSNNEEADWYGQDIIAYMRKIFCYRDVLISKKVEENTGAFYSETKYPREDKAGSKLVPLKQGDNMRGANNLKELDTRKYGGYKGGEKAYFVLVKYCIEKALKKSVKKEYHMEFVEIPVYIARGIKNKNINFYDYVCDTLNEANKNSVADVEILRNKVPKYQMIIGENGEEYYLVSATEVINSKQFVLGGSNQQYNRLLNYIKYGKNDKWQYIQTELLDEQLIGLYNLLIAKIKDEYKGFSKEAVRIQENNSFDKLDVKDKKEFIAEMIKLVQPDSDYPYLGKYATGLSNRMGRKTGEKVGKKITLVDKSVTGLYERRTTFELEDDSSTKSR

SEQ ID NO: 16628 - protein, 1424 aa, unidentified
  REGION 1..1424: note = Cas Enzyme sequence
MYNIGLDIGTGSVGWCLTDENGYLLKVNRKGNNGNTYRNSAWGVRLFESADTAADCRIKRSTRRRYNRRRTRIIELRKIMSDMIMPIDPNFYARLDEAFLWNEDKSDKAKAPFLLFNDKEYNDKKYYEDFKTIYHLRKYLINTTNKVDARLIYLALHHMMKYRGHFLYEGQTFESIDNVEDVFVELNNLVNAYIKECEDKDGNEYNDVYREIKKCLADNEIKNKDKKELIAAMFMRADYSKKYSKEVAVAILGYEFNVGIIVGENELTGEDNKPLKTKFSDANYEEQEENISSVLGEKYSIIEALKKIYSWKVLHGILGDNTYISSAMVAKYNIHKQQLSELKQLFHKYASQDEYSDFFHKEKDKSGNYIVNYANYIKGIKRLTNKDNKNYSAKQQLYISIRKILDDRALKDETYQKILKEMEEETFLEKINNVDNSAIPYQLNLMEMDKILTQQGVYYKELKDNKEQLLKMLTSKIPYYVGPLNNHNKGNRNFAWMTRKTGKESEKLYPWNVKGVVDIDVTAEDFITRMTNYCTYLPNEKVLPKESLLYQKYMLLEELSQIKIDDNKLSKEDRKAIINDLFIGERRAKVSDKNFKEYLNKINYVKINDKGYDVTGYQSDDGFACALSSYNKFRRVLGYVDERNEKMIEDIIYWLTVFEDKDIVKRKINKQYPDRLTDEQLKKILKLKFKGWGRFSRKFLAGIKGDMGATIIDMLEDADDRFLYCNYCPNLMQIINKDEKIKQIIDDNRPRYDGTEDLLDVIQDMHTSPANRRGIWQTMKAIEEIIEYMGEKPQQIYIEFAREDDPKAKNKRADSRKRAIDKALKKLKEDVVDEYNEKVYKELKQYEKRLDEEKVYLYFMQNGKSLYTGKELNLNEPENLEIDHIIPYSLSDDDSLDNKALVLKKENQNKGNKIVKEAFTQSFSDSEMMDYWKNLKKAGLISEKKYNNLQKNNVDDILTKGFINRQLVETRQIVKSVANLILDYYNEQIDVIEVKASLSTSVRKMLTYEKKDNNGFWIENKDNCMFYKNRDMNDYHHAHDAYLANIIGLYIQKNYPRLQKELNYSQYRRIWRKYYENTKNNNGVNWFATLGKFSSNNEEADWYGQDIIAYMRKIFCYRDVLISKKVEENTGAFYSETKYPREDKAGSKLVPLKQGNNMRGANNLKELDTRKYGGYKGGEKAYFVLVKYCIEKALKKSVKKEYHMEFVEIPVYIARGIKNNDINLYDYVCDILNEANKNSVADVEILRNKVPKYQMIIGENGEEYYLVSATEVINSKQFVLGGANQQYNRLLNYIKYGKNDKWQYIQTELLDEQLIGLYNLLIAKIKDEYKGFSKEAVRIQENNSFDKLDVKDKKEFIAEMIKLVQPDSDYPYLGKYATGLSNRMGRKTGEKVGKKITLVDKSVTGLYERRTTFELEDDSSTKSC

SEQ ID NO: 16629 - protein, 1100 aa, unidentified
  REGION 1..1100: note = Cas Enzyme sequence
MSEFHYALGLDIGIGSVGWAVLRNQPNGEPDRIQDLGVRIFDKAEQPKTGASLAAPRRDARSARRRLRRHRHRLERIRYLMEQRGMMSVSDIQAMYAAGGFQKSPYQLRAEALDRPLSKEEAVQVLIHLAQRRGYKSNSTAEAAKDEKETGKVKTAIEENRRCMAEHGYRTVGEMMYRDERFWQSNPDGTRYQQTRNMTDDYRFTVERSAIVDEAKQIFAAQRKLGADWSSEDLEAAYLSILEGQRSFDEGPGGESPFRGGIGDKVGFCTFEPDQQRAAKATYTFEYFKLLQDLNRMRLTGMGMPPEPLDDEQREVLKSAALRSASLSYGQIRKKLNLDDDVFFNDLYYGEKTKEEAEKRKWPQMQSYHKMRTALDKVGKDTIGTLTEEQLNAIATILTECKSDAKRIAALRMAGIPVQFDEALLPLSFSKYGSLSVQAMQKLIPLLEQGMRYDEACTQIYGDHRGLHSEQRKNRLSLTDMDEITNPVVRRAVSQTIKVINAIVRTYGPPDVVRIELAREMSRNFDERRKAEKRQDENRAANERAKEQIAEYKGDHATGLDIVKFKLYQEQDGVCLYSGKNLDPSRLFEPGYADVDHIVPYSRCFDDSYQNKVLVLASENRQKGNRLPYEYFGYDEVRWHEYEVRVENLIRNYRKRQKLLKRQLSEEESAGFIDRNLKDTQYITRSIYNLIRNNLVFAESNYKKRPVQTVNGAVTSMLRNRWGVQKIREDGDLHHCLDAAVIAATTPGLVQRLTEHSKRRETLEKAPAGYVDPATGELLELPQEARRDLFPKPWERFRQELEARLNPIDPRHQIDLLKLSTYESDEEIKPVFVSRMPNHKVTGAAHAETIRSSKGGDGFTVTKTPLTNLKLNKFGEIEGYYNPASDTLLYNALLSRLKDFGGDGAKAFAQPFYKPKKDGTPGPRVDKVKICEKATIGLPVRNGIAANGSMIRIDVFYVEDDGYYFVPIYVADTKKERLPNKAVVAYKAYSEWKEMKNENFIFSLYPGDLVRIQSRKGIKLTLTKGGTGEPEIVRQQGMYYYQTANISSGAVTISTHDRRYSQSSLGIKTLQSIEKYQVDVLGNYYKVDLPEKRMTFSKEG

SEQ ID NO: 16630 - protein, 1408 aa, unidentified
  REGION 1..1408: note = Cas Enzyme sequence
MSEKYYLGLDCGTGSVGWAVTDEAYTIERKKGKALWGIRLFESANSAEDRRAYRAARRRTLRKHTRLDLLDELFEEEIKKTDANFFARLAESKYCLDDKNSKDKNTLFNDKKYSDIQFHKTYPTIYHLRKDLIDNKNPHDIRLVYLALHHILKHRGHFIFENQSLESTKNVIPQFLELQRLFNDVLEINLQYPQGIDEIKNTLVNHSMYDKQKTLISLFEISDSDNKLQKQVCTEIAKALLGHKTKLDKLFPDYDIEEKEIKDFEFKSSTYETIEDKLCSQVGEDFFQVILTLKRIYNWSLLDEMLHGQKYLSYAKVDAYEQHRKDLADLKQLMRKYHPDKYEEAFNATNIENNYLDYIGHGLVIEKNGKHIKPKFEKKKPTKSKCSMEAVNKYFKGIFFPKDYVSDNSDVLLNTVKNRLENNLMLPKAKDISNRTIPYQLNQAELQEILLNAATYLPFLNSTDDEGYSVNKKIIALMNFRIPYYVGPLVENDGSGKEYQKFSWMVRKDDGKSPIRPWKFKEQVDLPACGNAFIRKMTRKCTYLPAENVLPKNSLAYSEFSLLNELNNLRINGIALTIEAKEQLFNLFKKQKTVTQKGIRKFLIIRGYYRKDEELEITGIDQNIKTVLRGYIDFSPYLESNILSKDEVEEIIEWATIFSEGQDLLGKKLSEKYKDKLTTTQQKDILNKCKSYSGWGNLSKKFLTEMYDVDKATGECKSILTLMHETSANLMKLLSNKYTITKSVEEERRKTEQDYTWSYESLVEPLLVSPSVKRAIWQTLLVSKEIRQTMGVDPEKIFIEMAREDEKKGKRTVSRKEDIRTKLKNLTDNPDATELLTSIESQSDDNLRKTKLYLYYTQLGRCMYTNEKIDLQQLLSGSKRFDIDHIYPQSKVKDDSLDNRVLVLSNENGKKSDSYPLDSTIQQHCQVFWKLLLDNKLISKEKYTRLTRTTQFSDDEFENFIARQIVETRQSTKEIGRLLNKMCPNSVIVYSKARNVTDFRNTFELHKSRIVNDLHHAKDAYLNIVVGNTYYTKFTNDPRYIFSKRNKTDAVSLHENSYNLGKLFFYDIERNNQVAWLRDTNRDARIKAKNNLQAYPETGTIRTIRKFMERNDILFTRQCFQKKGAISDQTIVRHGTNNDVLPIKSSDKRLCKIEKYGGYNKTGKAYFFLVEHTAKGKRIKTFSDVPIWLVSQIDSGKMSLQQYCTETLGLKDPVIILPKILINTKIRYKGFIYEISGASGNKIALKTAVPLILDSNSYEYSYYLEKYLTYIKPIETKKDKMTPENKKLLELKAYQYRLSPERNIELYHTLLSKCTNAIYKNKVTVSNKLFLEKNLSEFVSSNIVTQANLLEQLLLLFSCRQGTIDLSLIGGLKAIESSKINRNLQDSITFIYQSATGIYEKRTEIKVP

SEQ ID NO: 16631 - protein, 1313 aa, unidentified
  REGION 1..1313: note = Cas Enzyme sequence
MSPALSKNVQAIRKEFLESFRLGVDFGDKAHGIAIVKDRDVILGATLQDASESDLSKRNQLRRARRTRASRRQRLMRFRQWCLRNRLPDPDPYFNKQLAEILWPPDREGKPQSAFAGLTLEQRTACRKALLAEPIWQQFLALPPEVMKQCAIVNPFIARRLAREGQATPLVFVRAIWHLFEHRGFDWYNRIREQDDDWRADKGALLRHLKTLVIDTDQKLEELKADIAKRDEEAAKETSRAKPWLPDLKVQEELRKARERGKRFPICRRLNPPRDYVEKELRACLVSLPLDCFAKEFGRKNGQPPLTDEQKRAAVFQALKKLLNWNRREPRFDNRQLRGCTWCAARGIQRNTPRNKNVLEWHIKAAIRDVKVAVGATTSATKPAISSAAVWLDENEFKQLWELVTNLSLSRDEQKEKLDEFFKRYARLPKQVFVKEGARISKQTKPTDPYKWHREELLNLAEGWRRQKTGDKRYRQAKGRARLCVHCLQLKASTPPDQLHPPVGEAEVILSQRALRTRCERLINWLKKNAPPAKFPVQFIRIEAVLPRPEEKMRLKAEAGEAEPDQSPKAKLKFRLMAELGAYCDGCDKPYREQERRGPKSKRDDRFCQCPKPDLHGPCAYCGEEFGARDLQIEHIYPKNPVNIEGGIGPDAQINKTVACDKCNQGDKKDRLPFDYFHRIGGIAAWEQWKTRVRSFAWPAIKKKIALLEEYKLPEEVGDISLARTRLVHRYLRQKLAEVYFPEQIAVLKDPKADPQAKQQAKSFLDWHMSTPAGWMTSRCRLDWEHEKRNGDILPLVPRKSPLRPPEQRQKALERRLAEEPAWKHASIRRGFQERAPIEDALLAIQRREGTAVCDRTNLNHHWIDAAVLASLPPQANQPVELGGLWYRNNGEVRADIAFAPRAAEYLKKYGDGSVIADLQNRSPRFTAQQQETSLYGEFRPIDRPKQNGERSPKKIPKKLHAEAAKLPQEVFEFAEGKLRLRDDFSLDYEQRNKILDAISNVELQKKVRKAFQDAFELTECHVIYKPIENLKVQDKDLIVSQHWRTIFSRLCEAEYDFPKKRAETSEADEDDQSGKPQKERRKPKEDESLPEEAWKTWANDETTRLRKEGKLSAKEFVTPRHLKIYFNLGPNEKVVASSAAKRVMSKRGVAKPERICRMTSIGSHAVFDREAGTLHVLPNPWKAHVEKTNQSTHAGQKIFKGDCIWLPHGKSPRGKKEAVTGPGWYQVTEMSPAKTKLDGDIGDAKLKVVPAWLDLNQLVQLARSKEPDETKRKKIKRDFWETDIHAANLNELSKAGNLRIKRRCNVAFDLQP

SEQ ID NO: 16632 - protein, 1105 aa, unidentified
  REGION 1..1105: note = Cas Enzyme sequence
MPLNLRLEQNLQHFIPSLRLGIDIGQWAGGIALVQDRRILHAETYVDYHATTLEDRRTLRRGRRTRHSKKMRVARLRSWVMRQPDPSKRQEIAAWRREHPKERLPHQLRLPDPYRLMSRHCFQCQPTEYRQTVATQKPSLGTWVEAAVKGALPDGTPLTSEGFVVALTQLFQKRGFVWGGSDLSEMSDKELSQELDHIRLTPEVALQIEREVQRRRENPQSEREGKIPDFEKRVADALCRQKQNRVAEHRSIVESDLREVVKKFTSAHSDGKNKLCDAWIRELLKLLNKPLRLARFENRVISGCSWCSKNTPRKYKVREDAYKAAVRNIRIRIPGAASGVPLNEQQRQEFLSRFYDPEFRNKTEKVRQATFERMLSRIRAQEALARQLAELTGNNKPTGRTNLCQQHLRLASEGSFQCYRHRAICKLSGGSEHETLERIERLGPAVRTTRNPCREAHDKRLIQRIEQIIFDGDKLRFGDVPSLVTIEFPKPNTAQTLTCPFCKEKLAADTQLRYRIRKLKLEPAHKADDAKNFSCPNESCSSSASGQQLRLVAERRIFNRGKVDWKLFSVPNNEAVLRKAAGGMKQKKKQQYLAEINAKCIYCGSSIGIENSQIEHIFPESRGGPFLDYNLTLACSRCNPAQDSKTNGWQGKDNRTPFEWIERDKGGPVTWQRFEERVQSLPMPQRKKEILLSKEESYPDNPTALARAGGRCRQFIEELKAMLQEHGISQDQIADNYATGKLVIQTIEGWTTSKLRASWQNHLDGRPNFPRKNDRDLHNHAQDAVVIAACPPHTWRETLFTETRIVDGKLVPGLAPFELAPDWSAFSAGLSAPLVRLLGRYRLNWKQPAVDTKFYEVSSRFNEPIRFVPLTELKANQVHRVIDQEISKELIRLCAAHAVTGKKVLSTAVIQDLRAVVKRSLNAPLRRVRVRFEGIGSPKKLVCISPKDGPVRRTRPTIPSEGALVWLREGVHLGSAKPRDVNISLLRPEPLQRLGLSAYEPPVPREARVLNENGWRRYDFIFLQDGWFRFKEFSDAKITVLPERSIPDSLAERMALDVVDGFPERYLGKSELLEYFRRLQSKIPEPNKRAQPDNAPASAQAAAGD

SEQ ID NO: 16633 - protein, 1341 aa, unidentified
  REGION 1..1341: note = Cas Enzyme sequence
MKQSYSIGLDIGTGSVGWAVINEDFSLRRHKHQNMWGANLFNEAQKAELRRSFRSSRRRLARRKRRITLLQQIFNNEICNVDPNFYLRLTESMLYIDDKSSSLDLDANILFSDHTFTDKTYREKYPTIYHLRSELFHNPEKQDIRLIYLALHHIIKYRGNFLIEGGVDGVISSFDSQNLQKFMEFIGAGDKEAKQIKSILLNQSQTRSARKSNIIQLLQPSADNKSIISEAVGAAIGLKWNAEKLFDDKSLEIKGEFSDKNYEDQRDDIAAAIGDDRYELIETLESVYQWTIFSQFIRKDSCLSDIMIEKYDAYRQDLSDLKGLFRDFLSEKEYKSFFHGDASKFDLYNKHKIDTDDLYKSIKKHLGESAKDDVRYQRFEKRAELGEFLSRQRIRDNGAIPHQIHQYELEKIIDNQAAHYSFLAQNRDKIISIFTFKLPYYIGPLKTGGDFAWSIKKKDGVIYPWNFNEIIDDEASAEKFIERMRNKCTYLPDKDVLPKNSLLYQEYECRNELKNVTVNGKRLSPDIQNRIIDELFTKEYSINYKKLAKYLYDNQIYDTSSLVISGTADDKSFMSSRKSYIDFTNKIGIEITPENKAAIEEVIKWITLFEDKKILSKKLQKYSDIFSKDQIDSILKLKYTGWGRLSGELLDGITAHTRYGKMTVIEVMRQCSDNFMQIIQSDRYEFKKIIEDALLEDATPEITYDDIKNLAASPGIKRALWRSIRIIDEIVDTIGYGPKLISIEMARSEEDKVRTKNRYSQLEKMYKELYGREYNKSDIKPQLENYKDCLDKKKYYLYFLQNGKSAYSGKKLDIENGLKDCEIDHILPRSLTKDDSLDNTVLVLREENQLKLDDYPISPDVQKKMLPIWMSLKNTKFMSQLKFQRLTSQKQLSDDQIYGFINRQLVETRQITKHLARMLTEKYKDSSTEVFTIRAGMSSEYRRIHDLPKCREVNDLHHAKDAYLAATLAQYVKVRYPKLDKEFIYGEYKKFKSDKKKNNREYGSFILSSMKYDFTNTSTGEIVWQGKSSCEIIDKTMKYNDCLITKKTEIGDNQFYDQTVYSKNSGKKMIARKAHLPVNRYGGYSGKKAAYFAVINYLKPSGKKESPVTEIVSIPAQIYTLEKTHPGSIDKYIQDNYKDAVVLLPKVPINQKIEHDGNEQFIVGSSEVTNAKQLKLPYDIEYAIAIALKRGVPRVTISEEQADEDDKLRDKRNRQIEKRNKVINGINRFWKVYSDKLANQYQQFGEAGNNARNAAPEYDKLSIDDKIEVVKLVLVATSAGSGRVDMKGSEKNPKFPELGLPNSFGRMSGKTINPLNITFVYESITGLHRRKLNGKSLGHKR

SEQ ID NO: 16634 - protein, 1106 aa, unidentified
  REGION 1..1106: note = Cas Enzyme sequence
MEDKMNWRLALDLGTNSIGWAVLQLQKDNDKTTVSDVIDMGVRIFSDSRRAKDGKPLNEERRLNRQMRRQKERRIRRKRAMLNYCIAHGLLPEKTEERKDIAQWDPYKIRKEALERPLKPYELGRILMQLAGRRGFKSSRKETLDNNNNTEISGMKAGIEHLEKELGTKTLGQWLYEQEEHNKPVRFKPKIEGTKIVYDFYPSREMYEKEFSAIQKSQMANFPNLNWERIHWLIFFQRPLKRPERGKCQFYTDEDRGYKALPSAHRFRIAQEVQNLFYYDTHNRPCEISIELKKQLITMLNEQKSVSFDKIRTLLGIEGRITFNLESERRQKLLGNETTVDFRKPNYFGHIWDTLSYKEQDEIVETLILEEDTNILHDFLSKYNLSETAINTILGHQFPTGTTMLSARFMRECAEVMIKENIPYHMAVQKLGLHHSKEEQPPLHNRLPYYAKILTNFVQNAHGEIPHSRTFSNKFAEEEYKYGKIANPTVHVALNQIRKLINALIDRFGHPTEIIMEIGRELKLPQSVKREIEKEQTINQRNNERAKKELEKLSLLVPSKEDIKKYLLWEELAPEGIARCCPYCGKTISATQLLSNEIEIEHILPYSKTLLNTRDNLTVAHRHCNNIKGQKTPYEAFSSSPEGYNWEAIVARIQHLPYKKRIKFSPNALQAFIDENQFLQKQLTDNAYISRATKQYLAAICNKNNIWVSPGRLTAMLRGEWGLNTLLNSTHDTWFKNRNDHRHHALDALTIGLCDRSMINAITHLNGQGKYARIIIPKFPLNRNKILELLSNMVISIKPDHGKEGKLFNETALGTIKKIRKIMPDELQEDQIQSIIPPAIQNKVKTLINNRSFRSVKKEIQAKFTHFYLAEEKWVSTSAITAISESDITENRIVDPTIHKKILNAYIAYKEKHNIDGKLTNAQLVELLKGFAQQTNIRAVRYYPKDQKPVRIPSASYKAYMPADYYRVDIWEIPQKNRGPKYEGQFISRAEACLNTSSVKPHPAAKFVMSLYKGDVIILLGKEDNKSFKEYARIAGYATTQNKLDIQPLFAAGTIHDWLTNTNKNLVSLFWPDNNNIQNFNSINVIFSKYNVKKVTITVDGRCFIR

SEQ ID NO: 16635 - protein, 936 aa, unidentified
  REGION 1..936: note = Cas Enzyme sequence
MSLNKEYILKLLFDNSHDLDMNFDQIEGNDTGNVLFSAYSKMIEKYGYEPLDFGKPTDKIIEQLQVIFADLGWNTDLLFVDLNKEGKYLEKQPYFKLWHLLYSFEGDNTPTGNGKLVEKLMELCHVGKECALELVNISFQNDYGSLSAKAIKKILPYLKEGNRYDVACGYAGYRHSKSSLTKEEIENKVLKDKLDILPKNSLRNPVVEKILNQMVNVINAIIDTYGKPDEIRVELVRELKKSAKEREELTKAIAKSTREHEEIRKVLQEEFGMINVSRNDIIRYKLYEELRDNGYKTLYSNQYIPKEKVFSKEIDIEHIIPQARLFDDSLSNKTLEYKAINIEKGNKTAYDFVKEKYGEKGLQQYLNRCESLFKGQRTKLRKLKMEQENIPEGFIDRDLRNTQYIAKKALAMLNEICRRVVATTGSITDRLREDWQLVDVLKELNLPKYETLGLVEVYEDKDGRKIKRIKDWTKRNDHRHHAMDALTVAFTRDVFIQYFNNKNAAWQADCKEHSDIIGIKTRYFENGRALPPMPLVRFRAEAKSHLETLLVSIKAKNKVVTNNVNCTKRKGGENKKLQQSPRGQLHLETIYGSHRQYVTKEEKVNASFDSSKIATVCKQAYRNALLERLAAFGNDPKKAFTGKNSLEKNPVYLDREQTARVPERVRTVELETVYTIRKPVDPNLSVDKVVDAKVRSILEQRLREYDGEAKRAFVNLDENPIWLNEEKGIAIKRVTIRGINKVQSLHGKKDKNGNLILDETGKKIPVDFVNTGNNHHVAIYRKPVLNKTGQEMLDNEGNPVYELDEVVVSFFEAVTRVNLGLPVIDKNYNKSEGWQFMFTMKQNEYFVFPNEKTRFDPKEVDLLNPENYAVISPNLFRVQKITEKDYMFRHHLETKVVDDKFLKEITWKRILTPNKLEGIVKVRVNHIGQIVSVGEY

SEQ ID NO: 16636 - protein, 1362 aa, unidentified
  REGION 1..1362: note = Cas Enzyme sequence
MEKEYYLGLDIGTDSVGYAATDTSYKLLKYKGEPMWGVHLFDEAQLCEERRSFRNSRRRLDRRQQRVKFVQELFAKEISKKDENFFIRIAESALWREDASGNIGVFCDKDYTDKDYHRNYPTIHHLLKDLMENKKPHDVRLVYIACAWLVAHRGHFLNEVSKENIEEILDFSNTYNDFMSFFRNNDSITENIWECTDIAYLGIILKKRIGVTAKKKELQEFLYGSTKVSKATSEEFPYSREGIIKLLAGGQCSPKDLFGKEEYKDVKSISLGQNDEELEEIFDAIGDDSQLILKLKSVYDWSVLCDILKGKDSISSAKIEVYEEHKKDLQALKKFIKKYVPDKYNEVFRITDNKISNYVSYSGNIKSDRKNKNNLKCCKISEFNKYIYDIVKNIIPDKQDEAFFGYMLSKLEISAFLPKQVDSDNRVIPYQLYWTELNRILNNASEYLPFLNEKDKDGYVTKDKILSVFEFRVPYYVGPLNNSGNKFAWIERKAGRITPWNFNEMVDHDISEQRFINRMTNTCTYIPSESVLPKNSLIYEKFNVLNTINKICINNVGITVECKKALFNGLFMKRKNVTVKAIRDFLTLEGYCTKEEAETISGIDTVTNIKASLYSHIAFEKLILSGDLKEDDCERIIFHSVCSESRNRFSKWLEKEYSLLSRENKRYIASLKFKDFGRLSRKFLCEILGTDKASGEAFTVLEALWNTNFNLMELLSDRFTFNAELERIRSEYYSEKTKKIADRLDEMYISNAVKRPIIRTLDIVSDVVKVNGSKPKKIFIEMARCANEEQKGKRTKSRYEQIRELYSKCDEDTRELSARLEAMGDMRDNKLQSDKLFLYYMQLGKCMYSGKEISLDLLFNDKIYDIEHIYPQSKVKDDSIINNKVLVFSEINGEKSDSYPISENIRTDMRSWWDMLLKHNFISAEKHKRLTRHTPFTADEEWGFINRQLVETRQSTKVVATLLKEKYGDVDIVYVKAGLVSELRHEFDMLKCRSVNDLHHAKDAYLNIVAGNVYNERFTRQWYLDNQRKYSVKIKTLFSHIVEINGCTVWNPEIHFDTVRRTMAKNSVHMTKYAFCRKGGFFDQMPLKASEGLVPLKKGMPTEKYGGYNKTSATFFMAVKYDIGKKSDVMIMPVERLYSDKVLNNNVFALEYARKTISTILGKDVDNVSFPLGMRILKINTMFDFDGFRATLSGKSNGGRQLLISTFTALTCGKEMENYIKKLEVFTEKKKDNPKMSYSPDFDKVYSAKNVELYDILTQKLTDGIFTKRTCNPVSTLVDGREKFLSLDIFDQAKCLMQIVSVFSRISSGCDLSYINGTVHSAVTRINGNLSNWKKQYANVRIIDTSSSGLFEKASENLLDLL

SEQ ID NO: 16637 - protein, 1080 aa, unidentified
  REGION 1..1080: note = Cas Enzyme sequence
LADILKGKISISEAKKEAYEQHKKDIKYLKSFIKKYIPQKYNDIFRSESVKNNYVSYVAQNKINGKSSGIKKNTSQEDFCKYIMSVVKSIKPKKCDQKEYDKMIARLAVYDFMPKQVDGDNRVIPYQLYWYELNKILEKAKSYIPFLSEADEDGITGAEKILSVFEFRVPYYVGPLKESSDSSKKLNHWMVRKAKGNIYPWNFNDVVDLDQSEDAFIKRMTNTCTYLPGEDVLPKNSLVYSAFEVLNEINNIRIDDKELPVSVKQSVFNNVFMNRDKVTVKQIKDHLESIGYVEKGKYILSGLNESVKSSLRPFRVFSNLVNSGLLTYSDVEAIIHRATCSEDKNRFKDWLLREYSHLPESEINYIASKKFKEFGRLSRKLLCGIEGAVNKDTGEYMSVIRTMWETQFNFMQIITSDKFEFSEKIAEHVKEYYGEGEKKKSITERLDDMYVSNTVKRQIIRTLDILKDIRKVQKKDPKMIFIEMARGATEDQKGKQTKTRLDQIRAFYEKVKTEDVRELSKKLDEWGDTAHNKLQSDKIFLYFMQFGKCLYTGDPIDLGSILAGDGKYNIEHIYPRSFVKDDSVINNKILVDSQANGDKGDKYPILPDIQKKMSGYWKYLNSITVEKSKLLSDEKLKRLMRTTPFTEDEKYEFINRQLVETRQSTKVVASLFKEFYPNTEIVYVKAHLVSDFRRNFNQRRPGDKNYQEFDLPKSRVVNDLHHAKDAYLNIVVGNVWHHKFKKYYKKNDDNNVKAEVLFTHKLERNGKVIWNGAEDKKRVVKIARKNTARVTKYAFCRKGGFFDQMPVASAEGLVPRKKNMPTEIYGGYNKTTASFFVLVKYAIDKKQDVMIMPVELLYSKKFLNDQAFAEEYAKRTISTILNKEIISVEFPLKRILKVNTVLSLDGFRVCITGKSGGGKQLGVSVMEFFKTSVENEAYIKKLESFEKKKEKNSNIVWSEQYDGISADKNIALYDCYIEKLQKSPYKQRPANPVDALIKGKEKFKKLSPPDQAKVLLQIQGLFGRAIKADLSAVGGVPSAGVATLSSSISNWKKNYTDVRIIDQSASGLYEKISDFNLLDL

SEQ ID NO: 16638 - protein, 1114 aa, unidentified
  REGION 1..1114: note = Cas Enzyme sequence
MRILSLDIGSTSCGFAVLTEQGKHQYILHDFGVVMRDNPYEGGTQRERSGYKQMRQLIRKRKDRVSLVKQMFGEYGYDVEERGFTDLWKLRTVDAFERKLASDELFAILRFLAKHRGYKSLKIEDLIAEIEAQEKIDDCEIGKVEAPDVEHFSETLAYLDALKCHHKDKTAAQIIFDIEKEKKVPAFRNHDNYRYMIRREDVAKEIDMIINAQETFGFFGGKEETVKFTEAIKAIIIPQDPVVLNPDLINNCILYKEEKSAPVYSYSFDLFSFYQMVNDLKIDGKSATQEQKEKLIDEYTAKIKALKNIASIRVIDVKKLLGITNERIKVNNTAEYKTVKGKKEANTLRKFYFISKLSKFDHEIMQSIMQREEQLFDAMATIIHRNIDPNALLEGFYDLFKQVGLRFEKERIKTFALRLHKEKSGGTSAYSFKAFEALTALMKEGMNESSAKEILGIGKAEDYSTFPKGVKYLKPIDRQGTFQYEHDENRISNHVVKSLVAWVNRVVVDLHDKYGPFDVIKLESTRELSQPEEVKNKIKSANTKNQKEWEELAERYSKHLEVKKIPERDRNRSLLKLKLWEQQEQMGIYSLKPISIDDILSEKTEIEHIVPRACGGSSAEYNKAIDYKDVNMRKGNRLPLDYLEGDAEDAFIVFIDGLKEAYKINWKKWKNLKAETLDQTFKEASDEVSMHATSYTEKLLGEMLKRYYPFTEKLKENQRVLHVSGRATSYLRRILSMDNKSRDTNFHHAEDAILIGLMSRTYLQNISTNFEENYEQTELNAKENFKKIVPLIDGAVPNEVFAHLRESYMENIEENPFYIGLDGSLRAPAFWVSKKPIGTKAHNETIQSKKNMAYRIGVDALLDKVRPVHKMSAEAFTKAYDKEVYGKVQVAKDNPNDFTARAFVEKRGKIVAMLNEAAFLTSKEEKADMDKRLRDTMREPIVDVNGNTVRKVKRVGEKVRYEVRGGLAAISDSMIAMRCHYTGEKYLQLDRIDIKDVSILKKNTANTLDIYSNDLIEVYVLEKKSVVLKKVGSLRSFVVKANGSKEIKLKNPKFPSVEEYQPPSYTSYFAIKKTCGLKKYKIDASGVVQGYYYLGKVIENGEELFAKVLTYKKV

SEQ ID NO: 16639 - protein, 1017 aa, unidentified
  REGION 1..1017: note = Cas Enzyme sequence
MALLRRYRLALDVGSTSIGWAVLRLASDTNTPTAIMKAGVRIFPDGRNPKDGTSLAVTRRQARSARRRRDRLLKRKNRMLGQLIELGFFPATAEARKELEKLNPYELRARGLDEALTPAEFARALFHINQRRGFKSNRKTDKNENENGALKTAIKKVKEKIENSEARTIGEYLYKRMLNGETVRARLRQTRMAQDNGRDKIEKNYDLYIDRSMIEDEFEQLWQAQVHWNPVLFNESNKALLKNTLLFQRNLKPVKPGRCTFLPELERAPLALPSVQLFRIYQEVNNLRYLDEKFNLIPLNRQQRDSIVEELNKNQKRSFDQIRKKLGFSGAVRFNIEDDKRQDLNGNKTASILAKKSFFGNNWFTFPVTKQDEIVQKLLVEEDEAKLIEWLINNTDIDEVTAESLSSVALPDGYGSLSYEAIGRILPYLQEEVITYDKAVLAAGFDHHSMLDESRDGEVHEELPYYGLPLERHVGFGSGKPEDSLEKRYGKIANPTVHIGLNQIRIVVNALIKKYGHPTEVVVEVARDLKQSKEQKDKERKQQAENQRNNARRREQIAGILGISEERVSRSDIQKMILWEELAYDPMDRKCPYSGVQISASMLFSPEVEIEHILPYSRTLDDGMNNKTLCMRLANRYKANKTPYEAFGTQEIAGFNYDEMVQRSKGMKKEKSYRFLPDGYELWLKNDKDFLARALNDTRYLSKLTREYIKLICPNTWVIPGQMTARLRSQFGLNDVLGLHGEKNRNDHRHHAVDACVIGITDRSLLQQFSRANQQAREKRLERLVENLTPPWKTYREHVERAVNNIWVSHKPDHSHEGRMHNDTAYSLLEDGYVGYHKNNNGQKEFIREKLAVIKMTSNKARERHGVLPDGSLRPYKGYKGDSNYCLEIVKNEKGKWDGEIVSTFEAYQVVRKHGDAVLRNREQSISGKPLVMRLIRGDILRCMHDDIIMTLRVAVIKSSGQMLLASHQESNVDARNRDKDDPFRYISKTASSLQKSQGRKITISPIGQVNDPGFKD

SEQ ID NO: 16640 - protein, 1333 aa, unidentified
  REGION 1..1333: note = Cas Enzyme sequence
MSQNIVDYCIGLDLGTGSVGWAVVDMNHRLMKRNGKHLWGSRLFSNAETAANRRASRSIRRRYNKRRERIRLLRAILQDMVLENDPTFFIRLEHTSFLDEEDKANYLGADYKDNYNLFIDEDFNDYTYYHKYPTIYHLRKALCESTEKADPRLIYLALHHIVKYRGNFLYEGQKFNMDASNIEDRLSDVFTQFADFNNIPYEDDEKKNLEILEILKKPLSKKAKVDEVMALIAPEKDFKSAYKELVTGIAGNKMNVTKMILCEPIKQGDSEIKLKFSDSNYDDQFSEVENDLGEYVEFIDSLHNIYSWVELQTIMGATHTDNASISEAMVSRYNKHHEDLQLLKKCIKDNVPKKYFDMFRNDNEKLKGYYNYINHPSKAPVDEFYKYVKKCIEKVDTPEAKQILHDIELENFLLKQNSRTNGSVPYQMQLDEMIKIIDNQAKYYPVLKEKREQLLSILTFRIPYYFGPLNENSEFSWIKRLEGKENQRILPWNYQDIVDVDATAEEFIKRMTNYCTYFPDEQVLPKNSLIVSKYEVYNELNKIRVDDKLLEVDVKNDIYNELFMKNKTVTEKKLKNWLVNNQCCSKDAEIKGFQKENQFSTSLTPWIDFTNIFGKIDQSNFNLIENIIYDLTVFEDKKIMKRRLKKKYALPDDKIKQILKLKYKDWSRLSKKLLDGIVADNKFGSSVTVLDVLEMSRLNLMEIINDRDLGYAQMIEAAASCPEDGKFTYDEVERLAGSPALKRGIWQSLQIVEEITKVMKCRPKYIYIEFERSEEAKERTESKIKKLENVYKDLDEQTKVEYKTVLEELKGFDNTKKISSDSLFLYFTQLGKCMYSGKKLDIDSLDKYQIDHIVPQSLVKDDSFDNRVLVIPEENQRKLDDLVVPSDVRVKMIGFWKLLFDHELISPKKFYSLIKTEYTERDEERFINRQLVETRQITKNVTQIIEDHYSTTKVAAIRANLSHEFRVKNHIYKNRDINDYHHAHDAYIVALIGGFMRDRYPDMHDSKAVYSEYMKMFRKNKNDKKRWKDGFVINSMNYPYEVDGELIWNPDIINEIKKCFYYKDCYCTTKLDQKSGQMFNLTVLPNDAHSPKGTTEAVIPVNKNRKDVNKYGGFSGLQYVIVAIEGKKKRGKKTKLVKKISGVPLHLKAASLDEKIKYIEEKENLTDVKIIKDSIPVNQMIEMDGGEYLLTSPIEFVNGRQLVLNEKQCALIADIYNAIYKQACDNLDDVLMIQLYIELINKMKALYPAYQSIAEKFESMTEDYVAVSKEEKADIIKQMLIIMHRGPRNGKIQYADFNVGDRIGRKNKMSLDLERVTFVSQSPTGIYTKKYKL

SEQ ID NO: 16641 - protein, 966 aa, unidentified
  REGION 1..966: note = Cas Enzyme sequence
RRAGKSPEDLEKEEQKKDRGYLAALNRWSEFKTQVAPQFSFPCYYDAWRMGLWNPAEPERLRPRTTYRAESTRNVRFDRQDVEAEITRLAKNAAKSLPALAAAFARIESGGWEQTDAESGRKKRFPVRAQTFGDFLCHGPAGVAYASFSAKSRKEIGLHTGSADDWMGSLGQKIPRFDNRILDDCVLIPRFHVCKAEIRKSTVTGLPLPNTLLSAQVTFLMKLKNTVVADGPNQRKLRVDEVQKIFKTAFADARKVKPNAEDWPRKAADCFALTRADWFRTKGIKELALRPLPGHEVIKPPKDSGRSGFSRPALRLLRTLILLGKDPCAFHAEQLAKLNGNTNPLKGLVPHDLKFLLDMGGSWMDIHIRAQKLDSLAARHTEDGKLDAAAATADLLGSVNDPVVRHRLNVFAGRLRELRGRFGRPDEVVLEFIREDFMGPKRKAELLQFQRDREKARKEAREKAKEAGAEEKSAALKYELCKAQGCLCLYCGQPFAASRLEEYEIEHIVPHSQGGPDAMVNYVLAHRHCNEAKGELTPFQWKHGQEGWDGYKRLVESHAVTLRNKKVQLLLREDATDLVNRYTALAETAWISKLAQTIVSLYFGWKNGNDAEGRKRVTIVSGGLTDRVRRKYHLNSVLNPCPKDEDPFLWEEACEKNRSDDRHHALDAMVISFIPGWMRDARKEHFFRFPKPVHKNGKAFFAKEISGVMPRAVAYERAALAETIYGARPTDKGLVIVQRVALHGLAMKPIAPGKARFDTTYLRKQINAVRDAGIAATITDFLETAPDEAAWDRFCQEFRLHCQDGSPGQRVVRVSVNVGEPDEYREMSKDGTGAWRKGLGSHKGQIIFWDERGELSVRPVFAHGSVGRERRAVESLGGKAKFYAFFQSDCAVRTTKTIPAEAYRLVVKNEAKQKRRISAEKPLPACELTLRTIVTKGRIAELTLADNTRVVAPLDVWVEAGLSRTR

SEQ ID NO: 16642 - protein, 967 aa, unidentified
  REGION 1..967: note = Cas Enzyme sequence
ARRAGKSPEDLEKEEQKKDRGYLAALNRWSEFKTQVAPQFSFPCYYDAWRMGLWNPAEPERLRPRTTYRAESTRNVRFDRQDVEAEITRLAKNAAKSLPALAAAFARIESGGWEQTDAESGRKKRFPVRAQTFGDFLCHGPAGVAYASFSAKSRKEIGLHTGSADDWMGSLGQKIPRFDNRILDDCVLIPRFHVCKAEIRKSTVTGLPLPNTLLSAQVTFLMKLKNTVVADGPNQRKLRVDEVQKIFKTAFADARKVKPNAEDWPRKAADCFALTRADWFRTKGIKELALRPLPGHEVIKPPKDSGRSGFSRPALRLLRTLILLGKDPCAFHAEQLAKLNGNTNPLKGLVPHDLKFLLDMGGSWMDIHIRAQKLDSLAARHTEDGKLDAAAATADLLGSVNDPVVRHRLNVFAGRLRELRGRFGRPDEVVLEFIREDFMGPKRKAELLQFQRDREKARKEAREKAKEAGAEEKSAALKYELCKAQGCLCLYCGQPFAASRLEEYEIEHIVPHSQGGPDAMVNYVLAHRHCNEAKGELTPFQWKHGQEGWDGYKRLVESHAVTLRNKKVQLLLREDATDLVNRYTALAETAWISKLAQTIVSLYFGWKNGNDAEGRKRVTIVSGGLTDRVRRKYHLNSVLNPCPKDEDPFLWEEACEKNRSDDRHHALDAMVISFIPGWMRDARKEHFFRFPKPVHKNGKAFFAKEISGVMPRAVAYERAALAETIYGARPTDKGLVIVQRVALHGLAMKPIAPGKARFDTTYLRKQINAVRDAGIAATITDFLETAPDEAAWDRFCQEFRLHCQDGSPGQRVVRVSVNVGEPDEYREMSKDGTGAWRKGLGSHKGQIIFWDERGELSVRPVFAHGSVGRERRAVESLGGKAKFYAFFQSDCAVRTTKTIPAEAYRLVVKNEAKQKRRISAEKPLPACELTLRTIVTKGRIAELTLADNTRVVAPLDVWVEAGLSRTR

SEQ ID NO: 16643 - protein, 1105 aa, unidentified
  REGION 1..1105: note = Cas Enzyme sequence
MKYILALDIGIASVGWAVLDKESETVIEAGSNIFPEASAADNQLRRDMRGAKRNNRRLKTRINDFVKLWEKNNLSIPQFKSTEIVGLKVRAITEEITLDELYLILYSYLKHRGISYLEDALDDTVSGSSAYDNGLKLNAKELETHYPCEIQQERLNTIGKYRGQSQIINENGEVLDLSNVFTIGAYRKEIQRVFEIQKKYHSELTDEFCDGYMLIFNRKRKYYEGPGNEKSRTDYGIFTTQLDANGDYIKKANIFEKLIGKCSVYPDELRAAAASYTAQEYNLLNDLNNLTINGRKLEENEKHKIVERIKNSNTINMRKIISDCMGENIDDFNGARIDESIFHKFEVYNKMRKALLKIGIDITDYSREELDKIGYIMTINTDKEALMEAFQESSIGLPEEVKQCLINMRKTNGALFNKWQSFSLKIMNKLIPEMYAQPKEQMTLLTEMGVTKGTREEFAGLKYIPVDVVSEDIFNPVVRRSVRISFKIFNAVLKKYKALDTIVIEMPRDRNLEEQKKRIKDSQKLNEKEMEYIEKKLAVTYGIKLSTSDFSSQKQLSLKLKLWNEQDGICLYSGKTIDPNDIINNHQLFEIDHIIPRSISFDDARSNKVLVYRSENQKKGNQTPYYYLNHSHGEWSFEQYKATVMNLSKKKEYAISRKKIQNLLYSDDITKMDVLKGFINRNINDTSYASRLVLNTIQNFFIANKADTKVKVIKGSYTHQMRCNLKLDKNRDESYSHHAVDAMLIGYSELGYEAYHKLQGEFIDFETGEILRKDMWDENMSDEVYADYLYGKKWANIRNEVVKAEKNVKYWHYVMRKSNRGLCNQTIRGTREYDGKQYKINKLDIRTKEGINVFSKLAFSKKDSDRERLLVYLNDRRTFDDLCKIYEDYSDAANPFVQYEKDTGDIVRKYSKKHNGPRIDKLKYKDGEVGACIDISHKYGFEKGSKKVILESLVPYRMDVYYKEENHSYYLVGVKQSDIKFEKGRNVIDEEAYARILVNEKMIQPGQSRADLENLGFKFKLSFYKNDIIEYEKDGKIYIERLVSRTKPKQRNCIETKPIDRDKHENSKDGRKTIGLSKTKLVKKIRTDILGNKYSCSEEKFTGFC

SEQ ID NO: 16644 - protein, 1105 aa, unidentified
  REGION 1..1105: note = Cas Enzyme sequence
MKYILALDIGIASVGWAVLDKESETVIEAGSNIFPEASAADNQLRRDMRGAKRNNRRLKTRINDFIKLWENNNLSIPQFKSTEIVGLKVRAITEEITLDELYLILYSYLKHRGISYLEDALDDTVSGSSAYANGLKLNAKELETHYPCEIQQERLNTIGKYRGQSQIINENGEVLDLSNVFTIGAYRKEIQRVFEIQKKYHPELTDEFCDGYMLIFNRKRKYYEGPGNEKSRTDYGIFTTQLDANGDYIKKANIFEKLIGKCSVYPDELRAAAASYTAQEYNLLNDLNNLTINGRKLEENEKHEIVERIKNSNTINMRKIISDCMGENIDDFNGARIDESIFHKFEVYNKMRKALLKIGIDITDYSREELDKIGYIMTINTDKEALMEAFQESSIGLPEEVKQCLINMRKTNGALFNKWQSFSLKIMNKLIPEMYAQPKEQMTLLTEMGVTKGTREEFAGLKYIPVDVVSEDIFNPVVRRSVRISFKIFNAVLKKYKALDTIVIEMPRDRNLEEQKKRINDSQKLNEKEMEYIEKKLAVTYGIKLSPADFSSQKQLSLKLKLWNEQDGICLYSGKTIDPNDIINNPQLFEIDHIIPRSISFDDARSNKVLVYRSENQKKGNQTPYYYLNHSHGEWSFEQYKATVMNLSKKKEYAISRRKIQNLLYSDDITKMDVLKGFINRNINDTSYASRLVLNTIQNFFMANDADTKVKVIKGSYTHQMRCNLKLDKNRDESYSHHAVDAMLIGYSELGYEAYHKLQGEFIDFETGEILRKDMWDENMSDEVYADYLYGKKWANIRNEVVKAEKNVKYWHYVMRKSNRGLCNQTIRGTREYDGKQYKINKLDIRTKDGIKVFAKLAFSKKDSDRERLLVYLNDRRTFDDLCKIYEDYSDAANPFVQYEKDTGDIVRKYSKKHNGPRIDKLKYKDGEVGACIDISHKYGFEKGSKKVILESLVPYRMDVYYKEENHSYYLVGVKQSDIKFEKGRNVIDEEAYARILVNEKMIQPGQSRADLENLGFKFKLSFYKNDIIEYEKDGKIYIERLVSRTKPKQRNCIETKPIDRDKHENSKDGRKTIGLSKTKLVKKIRTDILGNKYSCSEEKFTGFC

SEQ ID NO: 16645 - protein, 1104 aa, unidentified
  REGION 1..1104: note = Cas Enzyme sequence
MQYIVALDIGVASVGFAVIDKKTETVIEAGSNIFPEASATDNQMRRGMRQARRLTRRKRTRLDDFTKLWEEYEFAIPQVQENDIVGLKVKALRESISLDELYLILYNYLKHRGISYLEDAEDVSVSGTSAYANGLKLNAKELETNYPCEIQKQRLEQVGKYRGQIQIEDAQGEKLDLSNVFTIGAYTKEIQQVLCTQKNYHSEISDEFCEDYLEIFTRKRKYYEGPGNEKSRTDYGRFTTRLDENGDYITEKNIFEKLIGKCSVYKEELRAASASYTAQEFNLLNDLNNLTINGRKLEEHEKRIIIDKVKTSNTINMRKIIADVMGEKIEEFYGARIDKSEKEIFHKMEVYNKMRKTLAEIHVNIEEFSRENLDEIGYILTINTDKEAMMEAFEHANVKLSEEIKDCLISLRKTNGALFSKWHSFSLKIMKELIPEMYQQPKEQMTLLTEMGVMRGQTDKFEKNKYIPVDAADEDIFNPVVRRAVRISFKILNALMKKYGTLEEVVIEMPRDRNSEEQKKWEKERQKKNEKELAYIEKKLAAEYNILLSPTDFSNQKQLGLKLKLWNEQDGKCLYSGKTIEPEDLIKHSELFQIDHIIPRSISFDDSRNNKVLVYGEENQKKGNQTPYYYLIHANNQWSFEQYKALVMKLSKKKEYGISKKKVQNLLYSEDITKAEVLRGFINRNINDTGYAARVVLNTVQGYFRAKEINTKVKVIRGSYTYQMRVNMKLDKNREESYAHHAVDAMLIAFSQLGYEAYRKLQGEFIDFETGEILNAEKWNAQMSDEIYEQYLYGKKWSNIRTQITKAEKQVKYWYHVDHKSNRGLCNQTIRGTRTYEGKTYKINKLDIRTKEGAALFKKLAFSEKESDREKLLVYKNDKKTYENLIQIAQEYSDSNNPFVQYEKETGDCVRKYAKNHNGPRIDKLKYTDGEVGSCIDISHKYGYEKGSQKVVLESLVPYRMDVYYKKEEQTYYLVGIKQSDVKCDNGEYVIDEDAYAINLVREKMIQLGQKRGDLEALGFEFQLSFYKNDIIEYEKDGEIVRERFLSRTMPKVKNYIETKPIDRAKYEKQKLVGLSKTKMIRKYRMDILGNYYMCSRENFSKYC

SEQ ID NO: 16646 - protein, 1019 aa, unidentified
  REGION 1..1019: note = Cas Enzyme sequence
MLPKMRYRLALDMGTNSIGWCLIRLDALENPIAIIKMGARIFSDGRNPKDGSSLAVTRRNARQMRRRRDRLLKRKERMLQALIRLNFFPSDAAERKQLIQLDPYALRKKGLHEPLTGPEFARALFHINQRRGFLSNRKTDKTDSESGALKKAIKSLQVKLTEENCQTLGEWLAKRHEARLSVRARLRGKTIKDKAYDFYVDRAMIEHEFDTLWAKQASLNSYLFNDAARDELKDTLFYQRPLKPVKPGRCTLIPEEERAPLALPSTQRFRIYQEANNLRWFDYDLLEHPLTIEQRDKVVNLLERQGEAKFTKILKELGLPGTTKFNLEDVKRDRLKGNHTSFTLAKDNHFGDRWYEFPPAIQDEIVEKLLNEASESVLVGWLQENAGVDEPTAERIASVSLPEGYGSLSRTGLRRILPELQNDVVVYSEAVTRAGFDSHSALSHTQQTGEIFDALPYYGEVLQRHVGFGSGNPKDPPEMRYGRIANPTVHIGLNELRKVVNALIKRYGRPTEVIVEITRDLKLSRERKLEIQKEQKARQDLNDKQVTEASAILGLTPEHLDRNKRRELSQKMQLWVELDPKNVIERRCPYTGEQISVERLLSDEVEIEHILPFSMTLDDSLNNKTVSLRRANRDKGNRTPFSAFGESPMPGYDYESILQRALLMPREKSKRFAPDGYQRWLREDKDFLARALNDTAYLSRIAKEYLSLVCHPNKVRAIPGRMTAMLRGKFGLNQLLSGSEIKNRNDHRHHALDAAVIGITDQGLLQRFAKASANAREIQLDRLVENMPLPWPTYRWHVERALNSIVISHKPDHGYQGAMHEETAWGLRGDGVVSRRIRPEDGGPRQRDEQNKNVIQITSTRDPLRHGVGDDGQALPYKGYVGGSNYCMEIWRDENGKWNGNVVSTFDAYQLIRSFGEHEGFRRLNTPIRALNGKPLVMRLMIDDMVRLEVNGAIRTMRVAKISGNGQIFMCDHNEANVDARNRDKSDPFAYLSKMAGSLQKAHGRRVTVSKIGELHDPG

SEQ ID NO: 16647 - protein, 927 aa, unidentified
  REGION 1..927: note = Cas Enzyme sequence
MLASVLLAHGIMPKEAMSEFLAIEPYNVRARGLDEQLTLHEFGRALVHMNQRRGFKSNRKSDKKKDDGVVAQKTGELQKLIEDKECRTLGEYLAQLDPAEERIRGRYILRSMVEHEFDLLWAEQAKHHEELTDDLKKKIRDGIIFFQRPLKSVAHLIGPCSLEPDKRRAKKESLEFQHYRILEQVNRISLIDEDGVFTPFSRLSVEDFEPDVIEMRDKLIKELFTREDLKFDRMRKVLNLPETTRINLEMDGDSKLKGNTTTTKLARIFGKAWHKLPDEEKEKYLQTLSIAEDHDWLVQHAMDKWGLSEEKAEKLSAVSLEPGYAHYSIKAIRKLIPHLEQGLSLAEAKAAAGYEPSQGDLDFTTFMENLRNPIVKQTLHELSGLMHALVEVYGAPESIRVELARDLKASAKRRDEMLWENRERKKANDDVRQRLEEMRIRPTGDAVLRYKLWDECKGVCPYTGTQISIKDLFSDSPTYQVEHIIPYPRSLDDSFMNKTLCHIRENQRKGNQTPYELYGGTEQYEEVKARAKRLPFGKYKRFLQKELDDNFISRQLNDTAYISRMARQLLEGMGYQVGVSKGQATATLRRLWGLNSLLGDPTTAEVKSRDDHRHHAIDAAVVAATTQGTLQALSTYNKYGRDPRKERFPEPWEGFRHALAPHVSGLLVSHRVSKRARGQLHNESLYGVTGLKDKSGKPLYAIRKPIETLTAPMVGRIADPVVQDVVKGHLRALGVEPEGKFTLPKDAFKGVELRMPSGVAIKKVRLHESSSNMYVLPSSGKTGVEPGGNHHMVIFSYTNANGQRMQGGTVCALIEAAGRKSKGQPIIQRDLGDNREFMFSLAINELVVVYNEKPEEIDWNDKAALGERLYRVQMISANQLVFRHHTVSIVKDEDGNKGIGRLIRNPSTLKAFKVRIDRIGRIFVAND

SEQ ID NO: 16648 - protein, 1600 aa, unidentified
  REGION 1..1600: note = Cas Enzyme sequence
MNTNESTAALKKTADEMVWAFDLGKGSIGEAVRRGNEFLHKASLLIPAELGQRGPAAMSGTPASRYRMLQTRRAHKRREDWLDAVWEAAGLKPLVSRTVELVDFKTRKVKKTIHGKTRWKNKKVGGHWVLKNKADLLLEKEFGAHDDSTCYTSCLLRIKLLAGEKLETWQLYKALFSAIQKRGYAKVPWEKDQKGDDNKDAQEEAENAVAGKRWTDFSQHPDVVKLGDDFKRACYFDAWHMKLWNPTDPKRVELHSMERPESTQKVVFPGRIIAEEVLCLAENAAKQEARLNEAFGKVMADWRAKVSKRITRVNEHRARLGKSPLPEPDFSIGAKNFAELLVYGPGGSPKTVREGFRHIPSHDPDIRRAMGLRPGGIDDAMGALNQEVARFDNRLRAPCALIPRLSVCRNLAPDEILKIKENNHEKLLPAQVTFLMELKKLSVESVEKGESARKQRGLTAEELGEVFGKLNPQRKYHLTKREWRTWCRHFAVLAVTDPEEKNAAPKTDADAESGEKKKPDDLAVNRPRAAGRARFSRPALRLLKELLLRGSSPAAFHTKLVERNEELLNKLNLDVLDKEPVITKKDSRGNDYINYEKRTRPWLLVSDLDFLLRMAKDGKPADSWDNLFIPSQQLDRLAQESDASVAKRKEAIRNLIGEQNHPIVRHRLETFWKRLEKLEAKFGEPRSIVLEFVRDDSETSWLGAEASKEITAAQKKQRDRREMAKRMLAEMGKPNGDVLKYMLWEAQGGQCLYGKPAGNPQCPYTETALSFTDLHKYRIDHIVPRAKGGPDSFSNFILTTDEANAAKGDRTPWHWFRQDRSLADWDAYKERVLRRFHALGGKKVRLLLGADAENLVERYTPLAETAWIARLAQTIASLHFGWANGNDSEGKKRVITVSGGLTGRTRRKYFLNSLLGRDRELDKNISEKLAELAALRSSALPREEQKAKARILRAELDGLNADSEKARDDDRHHALDAMVLSFLEGWVNDPKREDEFRFALLGDNPTYPSSLEREIGQLKHKIIALGAVAEKATSGEERARINQQIIACRDALAGMRMERNALKVREAFRAEINGNEEKGIKPILPLWLHYPKPELAAALHRGVWLRVESASRAAHATIDDFDKAFEQERVSLVDLPYLENRITEELEFSVAHGLRRISEIVAHKDYDFKAVQAGVEGFLTTNPPETQWKEWCASSAAPAGIKPKKGQPDERQFNFYKIEEARTKRPQETPSARASLYSIGIGSNEVPEFDRTHFEIQVARLVCRPAKGTDKLAIPLQPDTELQNKLRALLPRIEEFYRQYPPDPGDRPRKESARAAWQAQKEAAAKAWDEFIKETGLDRNKRVYLSADSAVVTDRRYEPAGISSVLLHRVKRFDCAKAEKQAQSISDVWTRFQLREFLKQRPTPLQWKEFCATFVQVARPTFKEFLASQPQTADAFVDFYKKQADDTKLQSRTLIKAVHQVIGGADDYVDISKDGSGIYAKGGNSGYLMWKLIAAGGEVSYGAKAVRSFLRLADVKRQLLKQKGVELLDARPWQTDMLLHLPKDTQSGKKLVPTGYYYFGSISNGAYATLKPLAGGDVYDGISVASLLEHGLHRVEIETI

SEQ ID NO: 16649 - protein, 942 aa, unidentified
  REGION 1..942: note = Cas Enzyme sequence
KLMRGEKLEPWQVFKAFHSAIQRRGYDKDIPWKNREARKAKDADDDDAGTEQRMHKFEQDLENMAPGKTHFHFPAYFDAYQIGLWNPAKPDELKLRSDCHAKTTRNQIVPRKLVEAEIRQMVDGATKHFPALAGKADYLLYGIAQQSYASTKQELRKKFKLREGGATDWQGVVGQKIPRFENRIIAKCALIPRLNVCKLREGEKGQPHEKSLAAVEVAFLMKLKNLRVQRSGGNGWLSAEEIREIYEDPKRKNWKFTKESWRKHCVTIGVVPLPGHEIVDAPRLSGRSRFCRPALEILKRLILSGKKPSEFLQEEIARLNGNKDPLKGLVEADLKFISDMAAKNDSWEGIYIPNQQLDALVELSNNSDDAIKRLIGQQNDPIVRHRLSVFYKRLQELEQTTKSRPDQVVLEFVREDFMGKKAKIEYFSFIKRRAEERIKAREEAASVGATEKSAGLKLELLRAQDGCCLYTNEGLVPSKLDEYQIDHIVPRSKGGPDAVVNYVLTTQKANEAKADRTPYDWFHQEMPDKWDAYVNRVRARATHLRNKKVQLLIALNAAELADKYTALAETAWIAKLAQSIVGLHFGWRNGVDENGNKRVTVISGGLTGRIRRKYALNQVLNPNAKSEEEAEKKNRDDDRHHALDAMVISFIPSWVRDAMKEKFFRFPEPIHQNAKGFFEKEIASVVPRNLCFEKAALAETIYGARTDHGKKVIVQRTKLVLLGMKPTTPGKSVYDLKYAVKQSQSIRDSIIQERVLEFLATNPDEAAWRKFCAEFHLKGKNGSSGSHVLFVTVNVGEPTEYKDMSKDGTGAYRKALKGHKGQIVYWDAAGELCVAPIYPHDSLFQKREKINSLGGKSKFYGFFQSDCPVRTKKEIPMENYKLVIRNEAKQKRRIVAEKPLPPCELTLRTIITKDMIAELTLADNTRVVASLDVWVAAGLERI

SEQ ID NO: 16650 - protein, 1574 aa, unidentified
  REGION 1..1574: note = Cas Enzyme sequence
MKDYVLNKQPEPASNETVWAFDLGRASIGEAVRRGNEFLHKASLLIPAEFAETKTAAGRRRMMRTRDAHKEREIWLEKIWDAAPGLAEFRPKKRRWVKKRKCFDPVDTDYRLKREFAPAEFRRDSKTGERKKVEYPNGRANIDGAPAATREDFETCYTSCLLRIKLLRGDSGLKEWQIYKALHAAIQKRGYERVPWATKEAARQGLTPKEVEEKEHEELLKKELKYQETVTAWGKFLHEVLDTHSLNHEQFAFPCYYDAYRMGLWKPEQPLEILQLGHKHGAESTRNIRFDRKDLEREITLLVENADKLLKGKLEQGRLLLLKNFKQEKFDRVEILNSRVDGKNKTLPVEKQKQHLEPPKLENLASSASEFFLYGPAGKPPDETKNDFAKYLAFRRQAGLRPGTNDDWMGALGQKIPRFDNRIVEQCALIPRLNVCKATAKPGKDKSAPDPESLLHSEVTFLMKLKNVRVMPNVRPLTARQIALLLEEKRAEAAKLALDPANSSHAKKIAKCYSFSAAQWKKLGKQAAFNFEPHAEHTKIEPSLPLPNTLEGFADAFEKQLHKVRVLRAESVEALTAQQIEKILAAKRKELRSMCLDPADPKYAEIVAKVYSYETERAWAEVGERPEFAFWPAPNHEIIEAPKSGGRSRFSRPALRLLRALVLSGEKPSRFRQLLIDRDPVTLAKLEFPSDKPFALFPNCTDPKLSEQQREAQDAENGRKGLLESDLNFLLKMKKADATDDSWNDLFIPNEKLDGLVQEIQSGTDEPSLSQLRIQAAKDGCSIEAKSHCRLCASEKAIRDLIGEQNDPVVRQRLKYFWERLQTLEKEHKEPERIVLEFAREDFLGKKAKESWKKFNDRKRESNKKAAEYGGSEREQLKFKLWQDQGGECVYGIPAGAGGGETAAVRRGLPLPGSDAFRDKLEIDHIVPQAQGGPDAYVNWVLTYGEIANGVKRDMTPYEWFMRDRLKEWDGYVEFVRNKKETNEKPGLSRKKIALLTRPDAKDLVQKYTALAETAWISRLAQTIIRLHFGWPLDHQKGVERVLTLTGGQTADFRRRFRLNTLLGPNAKLDESASDISKADEEKAANEIQDNLMSERSKNRVDPRHHALDAMVLTLIPEWRHHQAKKFERWRAWKSRQELRPEILERPTPFFDFHSTLDKGKLNNDTVRNSLRDALGETHAEVVAFERPKLEQTHYARKRIESETCYVKREELRLMAYDVKGKPDVEFKIEFVLDDAKLIDTERPGMAQLKSEIENRIASNPTEDEKSFTAWLVEKCQQLPGKKIQMQPLASLHEEPDSKRRRAWKSAEDFGRRKQPMKFKCDRVVKRYRKICDKLIRDLIAKNFEIQGEGKKAKCRPFARDEWEEFCANLHKPTKFGGQGPRVLKVTIRAGGAEEEESEDEESSNAEETNASSGVESANQSSPVLARDEYKESTKSPKAFLKGESHKGYYLYLDDKGKARRWPVYAHESFKEGHERYEEVKRQMKAEPESKFQEIGFLKTGCKVELESATDSKVYLGKGKKMQKNVSLPKGLYRMNTLGDNLRMKLTTQNGNVAGAQVDVFIKAGLRVVKIQKE

SEQ ID NO: 16651 - protein, 1317 aa, unidentified
  REGION 1..1317: note = Cas Enzyme sequence
MKDYVLKDKPEPAANETVWAFDLGKGSIGEAVRRGNEFKHGESLLIPPELARRGPAKDSGTPANRYRALKTREAHHEREHWLETVWTAIKLPVLRPREVWQNPETKKWELKHPADYQLEREFAPAEFKCDSKTGEQTKIVYLNGRAKNDGAPAATSEDFNICYTSALLRIQLLNGNSALKDWQIYKALRAAIQCRGYGTVPWATKEARKQGKTSKELQYEEDKKLQQADPRYRDAVGRWPDFKRDLHKQNLPLFVGMQPSAAAKKNLRLPDDYYFVPPCYYDAWKMGLWNPAEPDKVQARSSHLANSTRNVRFERVDVRAELVRLGDQAAALLPQIREAFAGWQRSGWKVRHPVTGAEKTYTVHAKTFGEFLCDGPAGQPDESSFEAFLQQREQAGLHRGSYEEWMAALGQKTPSFDNRILNDCTLIPRYHVCKVDVRLEAGKNGSITGKLIPESLLATEVTLLLKLKNLLVADPVAGQRKITVEELKDVFDYAHRQLKALNLVTPDGELIKEWPTKVAARFGLNKSDWKDIAAESEFLRKIKLFTVGSGGASRAPTDEESVWLLRAVADSKGKTALELPENLQALFKAAKAEWKKAKTAVDQNILRPMPGHEEVKAPRPSGRSGYSRVALRIIKELILSGQAPSVFHARLVQHEAELLGDLVSSPGKPLCLFNDSVAADKKQREQEDTENRKRGLLISELNFLLQMRRDNATEDSWKNIFIPSQTLDALQQRHTKGDKLDADAAIRELLGTINDPIVRHRLGVFDKRLQKLQDGDEKENIPSFGVPDAIVLEFVREDFMGEKAKRELQSFQKGREDDRKKAKEEAAKLGLESRSSGLRYELFKAQGCICLYTGKPLSETQLDTYEIDHIVPRSLGGPDAVVNYALTFHDINHTKEKGKLTPFALLHGKDGWDAYVKRVEARSTALRNKKVQLLTREDAPDLVERYTALAETAWVSKLAQTIVNLRFGWTNGYDQNRKKRVIVVSGGLTARVRRKYGLDKLLYKKDTDIEAFAKKLKNRADKRHHALDAMVLTFIPQWARDPGKEGFFRFSAEFRDANGREDYEKIRKLFDDSIAKVNPRYLAFEQPGLADTAYGQRDNGTMMVQRSLLRDLAYKSEQQKPVFNLTYAATQIKDVRDERIKLELLKFIATSPDKFAWDAFCYKFEKGELDSMRGIKVSKVLQNRKEAPSEFKDMSKDGSGAFRTRKEGHLGQFVYLDAKGKPRVEVVRVFDSIAKVKAEIEARGEGIRVIGFYQSLCLVKLDKPVVHGAVTLEPGTYQLNTIKKDGQGRAQVTSAGGEKSPEISLGKFLAAGFTRAD

SEQ ID NO: 16652 - protein, 1043 aa, unidentified
  REGION 1..1043: note = Cas Enzyme sequence
LHYSFDFNQGAAMSKSDRGLVFGIDLGKASCGLAIIDYEAKEVKLLSSRIIKAPENRSGKSLAAVRREKRSIRRQIDRRAARKKNVLKVLKQFGITPQDCDCKWFETKKNGNDGIDLPVIVLRSQGLDRQLSNREWARILYWFCSQRGYINRGEETLINGEVSTEVSSESEEAGKVLSAISENKKALKESGYRTFGEYLYKESYVSTRSYRNKAGDYKHCVSHLMVVDEIKELFEQQKKFGNTHTSEEFRDAYLEQLNWLKDTKAFDKLTYQKVGYCVYFDQYSDEPQKRAANADLISEVVKAYEKLGNIRLKFDDKPEQSLTREVRDAVINEMFSVHQGAKVKSVTYKTLRKLIDDDNLVGFKGVKSDLEKNPVFVPKAWNTFCRVLSGSESGIQLLNRMRCDFKFSNAIAESLTYASSLDSLERRISMYQEKESLIISEDELALIESLPYNTQIFKGYGSRSIHALEMLHDQFLDGEAFTLDEAEKQSGLQGFRLREKGIRQSLLLPYSDYDVQCTNPVVLRVLAQARRMINSAIKQYGTPNIIRIELGNDIAKSAKEKNKIAKGQNENRKENERIKDKIAELLHIDQSEVTGKQITKMKLYEEQGGKDIYTGEGLGDIAFAGGRRFLIDDNYCEIDHVLPYSRSADDLKSNKVLVLAKSNQEKGNRTPYEWMNSTDGSHPNWEQFRLRVSSNIRLSDGKKSKLLEENFAEKETSFIKRNMVDTQYMARAISAWLSDSLNFSSEFDQKQHVYAVNGRMTAKLRRKWGLNFGEDDTKDRSDNRHHAIDAAVIAACSASMVKEFAISCSRLREVRNSVIAEPWEGFADQVREAREWVIPTMYRPNKKNGLLFEESRYRYVEKKKKHILTSKEGKEKSSGNIRFFDDEKDGKHVKIVGNIAYIRLWLDESARKGKGEWLIEPVYFADMHSIKNGSYVPRYISASHVTSDEWKPIPEDVLSKIPPVVIHIQDVIQVDASYFRVDGVDINSKSLNLLPVFDDFEKSNPMLMKIGKWNKSTKVTRISEDALGLVWFIFLKNQNSSES

SEQ ID NO: 16653 - protein, 1039 aa, unidentified
  REGION 1..1039: note = Cas Enzyme sequence
LHYSFDFNQGAAMSKSDRGLVFGIDLGKASCGLAIIDYEAKEVKLLSSRIIKAPENRSGKSLAAVRREKRSIRRQIDRRAARKKNVLKVLKQFGITPQDCDCKWFETKKNGNDGIDLPVIVLRSQGLDRQLSNREWARILYWFCSQRGYINRGEETLINGEVSTEVSSESEEAGKVLSAISENKKALKESGYRTFGEYLYKESYVSTRSYRNKAGDYKHCVSHPIVVDEIKELFEQQKKFGNTHTSEEFRDAYLEQLNWLKDTKAFDKLTYQKVGYCVYFDQYSDEPQKRAANADLISEVVKAYEKLGNIRLKFDDKPEQSLTREVRDAVINEMFSVHQGAKVKSVTYKTLRKLIDDDNLVGFKGVKSDLEKNPVFVPKAWNTFCRVLSASESGIQLLNRMKNDFKLANAIAESLTYASSLDSLERRISMYQEKESLEISEDELALIESLPYNIKIFKGYGSRSIQALEMLHDQFLGGKAFTLDEAEKQSGLQGFRLREKGIRQSLLLPYSDYDVQCTNPVVLRVLAQARRMINSAIKQYGMPNIIRIELGNDIAKSAKEKSKIAKGQNENRKENERIKDKIAKLLHIDQSEVTGKQITKMKLYEEQGGKDIYTGESLGDIAFAGGRRFLIDDNYCEIDHVLPYSRSADDLKSNKVLVLAKSNQEKGNRTPYEWMNSNDGNHPNWEQFCLRVTSNVRLSDSKKSKLLEENFAEKETSFIKRNMVDTQYMARAISAWLSDSLNFSSEFDQKQHVYAVNGRMTAKLRRKWGLNFGEDDTKDRSDNRHHAIDAAVIAACSASMVKEFAISYSRLREVRDSVIAEPWEGFADQVREAREWIIPTMYRPNKKNGLIYEETKYKYLGKEVGDKKIVHILKGKKQGVGTVDLFRDPTGGQFARILGDRAYIRLWLDEEGKSGRGEWLIEPVYFADLDKIKRGSYVPRYIPRQKVTTQEWESIPSRITENSIPIVLRNDDIVRIDGIYGRLSGLDINSKRLKFDRILSKDVKTIGSWTKDTSVEVIHEDCLGLMWFNLLKDQNSKES

SEQ ID NO: 16654 - protein, 1039 aa, unidentified
  REGION 1..1039: note = Cas Enzyme sequence
LHYSFDFNQGAAMSKSDRGLVFGIDLGKASCGLAIIDYEAKEVKLLSSRIIKAPENRSGKSLAAVRREKRSIRRQIDRRAARKKNVLKVLKQFGITPQDCDCKWFETKKNGNDGIDLPVIVLRSQGLDRQLSNREWARILYWFCSQRGYINRGEETLINGEVSTEVSSESEEAGKVLSAISENKKALKESGYRTFGEYLYKESYVSTRSYRNKAGDYKHCVSHPIVVDEIKELFEQQKKFGNTHTSEEFRDAYLEQLNWLKDTKAFDKLTYQKVGYCVYFDQYSDEPQKRAANADLISEVVKAYEKLGNIRLKFDDKPEQSLTREVRDAVINEMFSVHQGAKVKSVTFKTLRKLIDDDNLVGFKGVKSDLEKNPVFVPKAWNTFCRVLSASESGIQLLNRMKNDFKLANAIAESLTYASSLDSLERRISMYQEKENLVISEDELALIESLPYNTKIFKGYGSRSVQALEMLHDQFSDGEAFTLDEAEKQSGLQGFRLREKGIRQSLLPPYSDYDVQCTNPVVLRVLAQARRMINSAIKQYGMPNIIRIELGNDIAKSAKEKSKIAKGQNENRKENERIKDKVAKLLHIDQSEVTGKQITKMKLYEEQGGKDIYTGESLGDIAFAGGRRFLIDDNYCEIDHVLPYSRSADDLKSNKVLVLAKSNQEKGNRTPYEWMNSNDGSYPNWEQFCLRVLSNVRLSDGKKSKLLEENFAEKETSFIKRNMVDTQYMARAISAWLSDSLNFSSEFDQKQHVYAVNGRMTAKLRRKWGLNFGEDDTKDRSDNRHHAIDAAVIAACSASMVKEFAISYSRLREVRDSVIAEPWEGFADQVREAREWVIPTMYRPNKKNGLIYEETKYKYLGKEVGDKRIVHILKGKKQGVGTVDLFRDPTGGQFARILGDRAYIRLWLDEEGKSRRGEWLIEPVYFADLDKIKRGSYVPRYIPRQKVTTQEWEPIPSRITENSIPIVLRNDDIVRIDGIYGRLSGLDINSKRLKFDRILSKDVKTIGSWTKDTSVEVIHEDCLGLMWFNLLKDQNSKES

SEQ ID NO: 16655 - protein, 1043 aa, unidentified
  REGION 1..1043: note = Cas Enzyme sequence
LHYSFDFNQGAAMSKSDRGHVFGVDLGKSGNGLASIDYENKDINFLSSRPFKAPENRAGKSLAKVRREARSIRRQLDRKSTRKKQIIKVLKQFSVIAQECDSRWFETKKNGNGGIDLPIIILRSQGLDRKLTNREWARVLYWFCSQRGYINRGEEALSNEEASVEDSSESDEVGKVLSAISDNRKALKKSGYRTFGEYLFKESYEITRSYRNKNGEYRHCVSHPMVVDEINELFKHQQKLGNTYTSEEFREAYLRQLNWLKDTMAFDKLTYQKVGYCVYFDQYSDEPQKRAANADLISEVVKAYEKLGNIRLKFDDKSEQNLTKEVRDAVINEMFSIHQGSRVKSITYKTLRKLIDNENLIEFKGIKSDLEKSSVFAPKAWNFYCRALSISESGLQLLNRMKSDFKFANVISESLTYATSLESLESRILMYQDKESIEISEEELTLIESLPYNSKIFKGYGSRSIEALEMLYDQFTEGEAFTLDEAEKQSGLQSFRLRDKGIKQRLLPPYSDYDPQCTNPVVLRSLSQARKMINSGIKQFGMPDIIRVELAKELTKSPKQREKIAKEQNKNRKENERIRKEIAKYLEIDSSCVTKKQILKKKLYEEQKGLDVYTGESLEPSLHADDLTYLKDDSYCQIDHILPYSRSADDSIANKVLVLAKSNQDKGNRTPYEWMTSGHEHHLSWEEFAIRVSTNLSISDSKKWRLLEEDFNKKEVQFMNRNLSDTQYMSKAIVAWLSDSLDFPSRYGQKQHVYATNGRMTSKLRKEWGLNFGENGIKDRNDKRHHAVDAAVIAACSASMVKEFATSYSRSHETKNSTIAEPWEGFADQVREAREWVIPTMYRPNKKNGLLFEDRRYRYAGKTNKHILIGKEGKEKTSGNIRFFDNEKDGKHVKIVGDVAYIRLWLDVNAREGKGEWLIEPVYFADLQSIKKGTYIPKYIATYNATNDEWKPVPDDVLSKNKPLIVHRQDVIKVDSSFFRVNSVDIAKKTLKLIPVFYDSKNSNPELMITRKWDKSTKIELVYEDVLGMIWFNYLKNQNSSES

SEQ ID NO: 16656 - protein, 1327 aa, unidentified
  REGION 1..1327: note = Cas Enzyme sequence
MKNFNDDYYVGFDIGTDSVGYAVADTDYNLCKFKGNAMWDVDLFEESNSAAERRTLRSARRRGLRKRNRIEWLQMLFDEEISKVDNAFFQRLKESCLYLDDKSSNVPYAVFADGNYTDKEFHTDYPTIYHLRKELIKSSQPHDIRLVYLALHHIIKHRGHFLFDNMGSDFESESSFETLFDDLKLYLKEEYEIEFECNDSLRFSEILKDKTLKKTAKSSESYKLFGYSKRNNPYETALIDLMCGRKVKFSDMFGDKSFDSEEVNGITFESGYDDNENTYRDLLQEKFELIEKAKAVYDWAILADILNGEKYISFAKVKTYEEHNSDLKMLKDFVKERCKSLYGEIFRITKDKLDNYTAYCGKYKENGRNGVIQYRTNQADFCKYLKKKFEKLDKTGYEEMFDKIENGTFMPKIVVKDNGVIPMQVNRSELKAILKNASTYLEFLNKKDENGISVSDKIVKIFEFRIPYYVGPLNNHSLKSWLVRSDEKIYPWNFDSVVDIEQSAENFINNLTSKCTYLPTKDVIPKNSILYSAFTVLNELNNLRLDGKKPDVSLKQAIFNDLFMTHKKVRRKDLLNYLKSEKGVAFDITGIDGDFKSSMRSAIEMSQFNLTDSEKEDAIKAITVFGDDKKLLRKRLKRQLGSKLSDEDIMRISKLKYKDWGRLSKEFLTEVYNVDKNTGELQFNIIHALWQTNDNLMELLGSKYGFEQSKQNYLDGIQTGQSLEKMVENLYISPAVKRPVYQSLKIMHEINKIQGHAPKKIFVEMTRKDGVKGDKGRKESRKTKLVDLYKKCGEDSGELWESLEKTPDDEFKRDRLYFYYTQFGKCMYTGEPINLSELYNQNIYDVDHIFPRSKVKDDSLDNRVLVKKQVNAHKDNTYPLDSSIREKMKGFWHLLMDKGLISKKKHERLTRATTLSDSELSDFIARQIVETSQSTKAVASLFKELYPDTEIVYVKASTVSEFRHEYDFLKCREVNDFHHAKDAYLNIVVGNVYNERCTHNKSIFIEGLKNKAYSLNKMFSFNTPNAWSIDDNKSIKIVRKTMNKNNIRFTRYALTRNGGLFKMNPLKKGSGQVSLKQNSPLSDISKYGGYDKPTSSYFSFVKYEGKKGKEMRQLVAIDSYIKAQYEANPEKYLSETLGLKNPVVLIPVVKYNACIEIDGFRMHISSKSNGGKTVVCKPAMQLTVSYDTEKYIRNIVKLNSKPENYNITELDKVSAEENLKLFDILTSKMTDTILKVKFGSMGVKIASHRDAFEKLDVRKQCFVLAEILKIIHSNVVTGDLSFIGESKKSGVVSTNSVLSEIKGVKSIYLVHQSVTGLFEKKIDLLHM

SEQ ID NO: 16657 - protein, 1333 aa, unidentified
  REGION 1..1333: note = Cas Enzyme sequence
MGKEYYLGLDIGTDSVGWAVCDTNYKIPKFKGNAMWGIRLFEKSNSAEERRGFRSSRRRTQRKRERLKLLEMLFDEEISKIDPAFFIKLRESNLYLEDKSTKIPYCVFSDENYTDKDFHRDYPTIYHLRNELIKSNKPHDVRLVYLALHHIIKNRGHFLFDYSYKNDKSGDFMPIYNDLKNYFYDNYEIELDCSDVDEFANTLKDKSKGKTKKNAEIAELFGVSKKYDKVLYSALSLLSGSSVKLFDIFDDEALKDVEKKSVSFSSGFDDNANDFQSYLGERFELLEKLKAVYDWAVLADILDGKEYISEAKVAIYEKHKRDLKTLKKYIKIYMPEKKAEIFNISSKDNNYVAYSKHIKTSNGTGVLISTCTQEEFCAYLKKTLGICKDASYEEMFKEIENSTFMPKQVTKDNGVVPMQVNEKELVAILDNAKEYLPFLLNKDNDGKTVYDKIKALFEYRIPYYIGPLNTHSTKSWLVRSNEKIYPWNIEDVVDFDKSAEKFIENLTSKCTYLPQYDVIPKHSLLYNKFCVLNELNNLKIDGEKISVQLKQDIYNDLFKKYYKVTNKKLCDYLKSRNIAFDEISGIDNDFKSSLKSYKDLVAYNLTDEQKEEIVKAITIFGDDKKLLKKRLKNEFGGCLSDDEIKKICKLKYTGWSKLSREFLTDVTAVYKETGELINIICALWETNYNLTSLLYSDEFCCDDKENKTFNDKINELNSFGNDKTLNQIVEELYVSPLVKRPIYQSLLITKELEKIMKCPPKKIFVEVARGAEEKKRTVSRRNKLLDLYKSCKNDYPLLFDELQNNTTDDELKSDKLYLYFTQFGKCMYTGENIELGDLFNKNLYDIDHIYPQSKIKDDSLDNRVLVKKTTNAKKDNEYPLSSQIREKMTPHWKALLDKGLINKKKYERLVRNYPLSDEELSQFISRQLVETRQSTKAVANILEQLYPRPDTEIVYVKAALASEFRHQYDMLKCREVNDLHHAKDAYLNIVVGNAYNGKFTHNKANFIKGLQNNDKAYTVKLDSMLKHNIDGAWIADNNESLNIVKSTMNKNNIRYTRYAFEKKGGLFKVTILKKGNGQASIKKNDKRNSIEKYGGYNQVSSTYFSCVEHGKDNNRMISMFSVNLYDKNKYEENPIAYLIENYGLINPIIKVKKVKIQSCISFDNMLCHLGGKDSGGSQISYRPGVQLVLGYDNERYIRNVIRCAGGDLHLQTSKNEKDIVTAEKNIELFNLLIEKMKNNIYGVLYSNLGDKLYCSKEKFEKLDIVEQCNVIKNVLTILKNNASKGDLKSIGIKANGAIRLNNNISEIKKVKSIKLINQSVTGLFEQEIELLNL

SEQ ID NO: 16658 - protein, 1180 aa, unidentified
  REGION 1..1180: note = Cas Enzyme sequence
MNSKNYFYRLGLDLGTNSIGWSAIELNQENQPQKILKLGTRIFSDGRDPQKKEPLAVARRIARGMRRRRDRMLSRKNNLLKYLIKINLMPSEEIERKKLELLNPYQLRYQAINQELNPSELARAIFHLVQRRGFKSNRKEISNQDTKKTEDENSKPIEKKPNSKLSDQDKRDKLTLAIQENNCQTLGEFLYKNRLLNGQNVRGLADNTDFYPTREMYLEEFKKIKNFQQKFHKISEENWQKIEEIIFFQRKLKEQDLGFCRFINIYKLQQNKLPDWAIELLNNRNQKQYQFGLPRAYLALPSYCKFRILSEVNNLKLKNKITREIIELTIEQKEKIIEKLNSQKSNVKFQSIRKLISNKQISYAGNDFEFNLESDRRPELQANPTNVLLSDEKYFGKNWQNISLEKQDKIVEFLITEDEENTIKLKALNEWNLSEEQAINLSKLTINNFSKTGVGNICKELLQKLCHELENKNCNYYEACKFLGIDHSDETIKQNYDKLPYYGQAIPASVVAVKMKTASKDEQDFGKIANPTVHCALNQLRKVVNSIIDEFGKPDEIHVELARDLKQTKDEKRQTKKNQDANEKLNKEAKEKIAELGYAITTENITKYKLWKELNPNDCNDRKCVYTGKTISASTLFSHEFEIEHILPFSKTLDDSIANKTLAHKSANAKKGNRSPFEAFGSNHDGYDYQEILRRSKNLPKNKRWRFEEKAMEKFNDQNEFLSRQLNDTRYISKIARQYLECLLPREKIAIGNGKLTSILRHNWGLNSILNPQDSELNQSENIEQDNLIDQYFTQEIIDPETGEVSQIKVENKLKDNSNKSKNKIKKNRDDHRHHAIDAVCIAMTDRKLLQQISRDNARGFDISSLGKLPNHWNSFREDVVEAVDKIIVSHKTDHGKNTKLHDETNYGKLKNNVLVKNNKKNPANCNLVIKAKIISLKRADCYYVRDEKIRNLLLIEASKASSDKEFQEKILPEFSKKTGIKKIRLYDNNNSILEISHPQNNPKFTKIVKTNGNNHIALWQLPNGEYFTDIVSNIRVNCPYKIETKSDGVQFINKKKKYLKNEQYEKLKPHPSAKLIIKLFKEDLIKLEENGMEKVVVLKVIGSTSQCYYMPHNIGNVEKESKESEDKTTKNEEQNLPKEKIKGSFNLNKKTLLQKKLRKIFITPSGKIYDSGPILKKIN

SEQ ID NO: 16659 - protein, 1409 aa, unidentified
  REGION 1..1409: note = Cas Enzyme sequence
MSIINFQRRGLMETQASNQLISSHLKGYPIKDYFVGLDIGTSSVGWAVTNKAYELLKFRSHKMWGSRLFDEGESAVARRGFRSMRRRLERRKLRLKLLEELFADAMAQVDPTFFMRLRESKYHYEDKTTGHSSKHILFIDKNYNDQDYFKEYPTVYHLRSELMKSGTDDIRKLFLAVHHILKYRGNFLYEGATFDSNASTLDDVIKQALENITFNCFDCNSAISSIGQILMEAGKTKSDKAKAIEHLVDTYIATDTVDTSSKTQKDQVKEDKKRLKAFANLVLGLNASLIDLFGSVEELEEDLKKLQITGDTYDDKRDELAKAWSDEIYIIDDCKSVYDAIILLSIKEPGLTISESKVKAFNKHKDDLAILKSLLKADRSIYNEMFKADEKGLHNYVHYIKQGRTEETSCNREDFYKYTKKIVEGLSDSKDKEYILSQIELQTLLPLQRIKDNGVIPYQLHLEELKAILAKCGHKFPFLNEVADGFSVAEKLIKMLEFRIPYYVGPLNTHHNVDNGGFAWAVRKASGRVTPWNFDDKIDREKSAAAFIKNLTNKCTYLLGEDVLPKSSLLYSEFMLLNELNNVRIDGKPLEKAVKEHLIEAVFKQDHKKMTKNRIEQFLKDNNYIPEKHKPEITGLDGEIKNDLASYRDMVRILGDGFDKSMAEEIITDITIFGESKKMLRETLRNKFSSRLDDEAIKKLSKLRYRDWGRLSKKLLNGIDGCDKAGDGTSVTIIEEMRDFSYNLMELLGDRFSFMERIQEINDKLTEGQIVNPHDIIDDLALSPAVKRAVWQALRIVDEIVHIKKALPARIFVEVTRSNKAEKKKKDSRQKRLSDLYAAIKKDDALLSGLTNEEFGGLKSGLAKYDDAALRSKKLYLYYTQMGRCAYTGEVIDLSQLNTDNYDIDHIYPRSLTKDDSFDNLVLCKRTANAQKSDTYPISKDIQKAQKPFWTFLKQQGLISERKYERLTRITPLTADDLSGFIARQLVETNQSVKAATTLLRRLYPGVDVVFVKAENVTDFRHDNDFIKVRSLNHHHHAKDAYLNIVVGNVYHEKFTRNFRAFFKKNGANRTYNLAKMFNYDVNCTNAKDGKAWDVKTSMDTVKKMMDSNDVRVTKRLLEQTGALADATIYKATVAGKAKDGAYIGMKTKSSVFADVSKYGGMTKIKNAYSIIVQYTGKKGEVIKEIVPLPIYLTNRNTTDQDLINYVASIIPQAKDISIIYGKLCINQLVKVNGFYYYLGGKTNSKFCIDNAIQVIVSNEWIPYLKVLEKFNNMRKDNKDLKANVVSTRALDNKHTIEVRIVEEKNIEFFDYLVSKLKMPIYQKMKGNKAAELSEKGYGLFKKMSLEEQSIHLIELLNLLTNQKTTFEVKPLGITASRSTVGSKISNQDEFKVINESITGLYSNEVTIV

SEQ ID NO: 16660 - protein, 1398 aa, unidentified
  REGION 1..1398: note = Cas Enzyme sequence
MEMQTSKQLISSHLKEYPIKDYFVGLDIGTSSVGWAVTNKLYELLKFRSHKMWGSRLFDEGESAVGRRSFRSIRRRLERRKLRLKLLEELFADAMAQVDPTFFMRLRESKYHYEDKTTGHSSKHILFIDKDYTDQDYFKEYPTIYHLRAELMKSGTDDIRKLFLAVHHILKYRGNFLYEGATFDSNASTLDDVLKQALENITFNCFDCNSAISSIGQILMDAGKTKSDKAKAIERLVDTYIATDTEDISSKTQKEQVKEDKKRLKAFANLVLGLSASLTDLFGSVEELDDDLKKLQITGDTYDDKRDELAKAWGDEVHIIDDCKSVYDAIILMSIKEPGLTISESKVKAFNKHKEDLVILKSLLKTDRSIYNAMFKADEKGLHNYVHYIKQGRKEETSCNREDFYKYTKKVVEGLPDSKDKEYILSEIELQTLLPLQRIKDNGVIPYQLHLAELKAILKTCGPKFPFLNEVADGYSVAEKLIKMLEFRIPYYVGPLNTYHNVDKGGFAWAVRKASGRVTPWNFDDKIDREKSAAAFIKNLTNKCTYLLGEDVLPKSSLLYSEFMLLNELNNIRIDGKPLETAVKEHLIEAVFKQDHKKMTKNRIEQFLKDNNYIPKKHKPDITGLDGEIKNDLTSYRDMVRILGTNFDRSMAEDIIMDITIFGESKKMLRETLRNKFASHLDDEAIKKLSKLRYRDWGRLSKKLLNGIEGCDKAGNGTPETIIELMRNFSYNLMELLGDKFSFMERIQEINDKLTEGQVVDPHDIIDELALSPAVKRAVWQALRIVDEIVHIKKGLPSRIFVEVTRSNKTEKKKKDSRQKRLSDLYAAIKKDDALLSGLSNEEFGGLKSGLVNYDDAALRSKKLYLYYTQMGRCAYTGEVIELSQLNTDNYDIDHIYPRSLTKDDSFDNLVLCKRTANAQKSDTYPIAEEIQKAQKPFWTFLKQQGLISERKYERLTRITPLTADDLSGFIARQLVETNQSVKAATTLLRRLYPEIDVVFVKAENVTDFRHDNNFIKVRSLNHHHHAKDAYLNIVVGNVYHEKFTRNFRAFFKKNGANRTYNLAKMFNYDVTCTNAKDGKAWDVKTSMNIVKKMMDSNDVRVTKRIYEQKGQLADINLTKASNVKADIYLPIKGNDLIMSQNTKYGGYSDIKNAYYTIIEYRDKKNNSIKSFLPIPIFIATKNLTNQALLEYIKTILPKANNLRIIYKKVYNDQLLKIDGFNYYLGGRSNDRFCIDNAIQLIVPLEMQFYIKLVEKFIAIISENKNIALKASSVKSRNPLNNQVENITLEYTQKLFDYLVSKFNEPIYLKMRGNKLTDIDNTGRKEFIKLSLDERCKALAELLNIFTNMNKKLSLSTINVSASRKVVNFKISSLDEFKIINESITGLYSNEITIVSNE

SEQ ID NO: 16661 - protein, 1171 aa, unidentified
  REGION 1..1171: note = Cas Enzyme sequence
VISLKLYCKYISLKRQNQIIMKKILGLDLGVASIGWAYLEENNEKSRIVRAGVRIVPVADQEDDFRAGRSVSINADRTRYRGMRRNNQRWKGRRDKIVTLLESIDMYDEALINLHKTDLYALRARAVDEKITLSELGRVILHLTQKRGYKSNRKTDASPDETTEYLDKIKENSETLETKRQTIGQHFHEKFKTEPHTKVRQQIFYRHNYQDEFEQIWTRQHKEYPDILTDELKHEIGTRTLFYQRPLKSQKGLVSRCRFEQNMRVAPKSSPYFQAFRIWQNINNLEITDDETRKFDLTLKDKQKLFAFLNKKDGSKKSGILKELGYSSKKFDLNFDEVQGNRTKSRLLKIFKDNDIQDTSILDFDPFTENPENQAAYRLWHLLYSIEEPEHLYKALVEKFGFTREQAIAVSKCKLEKDYGNLSAKAIKKILPHLMNGDTYDKACGHAKYEHSDSITTEENENRKLDEYLKLINRGDLRNPVVEKILNQLVHLVNEIIADEELGKPDEIRVELARELKMNAKKRQQVNKSYGERKKANDKIKALLQAPPFNFKNVSRNALDRYKLWEETGGISVYTGEPIKLAHLYDKSLYDIEHIIPKARLFDDSFLNKTICESSINKDKDASTAHDYMEKKGEKAYQSYVQRVKQIKSKPKRERLMMAEKDIPEGFIERQKKDSQYIARTVMKMLETVCRKVHSTTGSVTDVLRHQWGLTDMMKELNFEKYKKQERIIWRERPSGERYFVIEDWSKRDDHRHHAMDAIVVACTKQGYIQQLNNLNKTFVNDKTQRVLRTSSRKFALPWTNFRQDARKALSDALISFKSKQRVATKNKNKIKHRDKNREPQAVLTPRGFLHKETVYGKMKRYAENRVALNGRFSLETIENIAHPIEKQAVIQRLAAFDNDPKKAFKGLDKNPIIVEGKRKPLTQVVVWETIYTIKKTLNMLNKKQIEKDILDVRISRLVNERLAEHGGDLKKMVASLEEQPIWVNEAQKICVKSVKLKTDLKDLKPLHENEQGKPIDFVNLRNNHHFAVYEDEKGKFQFEKVSFWEAFERKKNGFSVIKTQHEKGWRFVVSLAINEMIVFPKGNEEIDENFILNPDNYAVVSEHLYRVQKLSSTAKGAPNLSFRHHLATTLKDDNQLIHVQSLGRLYNIYKVSINRLGMITDVQKIAPAKK

SEQ ID NO: 16662 - protein, 1056 aa, unidentified
  REGION 1..1056: note = Cas Enzyme sequence
MPKQKSTRYRLALDLGSTSLGWAVLRLNEQHEPNAIIRAGVRIFSNGRNPKDGSSLAVTRRAARAMRRRRDRLLKRKARMMNKLVEYGFFPADVAERKKLERINPYELRAKGLDAPLTPGEFARALFHINQRRGFKSNRKTDKKENDSGALKAAISHLRQQLHERKARTVGEWLWQRLQAGLGTRARYRESRVAQANGKTRIEKSYDLYVDRQMIAEEFDALWAAQAAFNPQQFSEQARGELRDVLLFQRDLRPVRPGRCTLLPDEERAPLALPSVQRFRILQEANHLRLLHPDLREEPLSLAQRDAVVDALEHNSKRTFEQLRKLLKLNGTVKFNLEDEKRKELKGNATSATLSKDGLFGENWWNLDEALQDAIVWQLVSEQSEEKLQNWLQANTGVNATQAETIANAGLPEGYGSLSYKALARIIPALRGTEVANGIDVPRTYDQAVQAAGFAHHSDLDSGFDFEHSHDEVERIGERVIASTGEVKPVFAFKQLPYYGKALRRHVAFAKEHPRNEEERYGKIANPTVHIGLNQLRVVVNALIRRYGRPTEVVVELARDLKQSREQRQEEQKRQADYQKRNEHIRREIASMHGCAEERVSHADVQKWILWEELSFDVADRRCPYSGVQISAQMLLSNQVEIEHILPFSQTLDNSLNNRTVAMRQANRIKGNRTPWQAREDFERQGWSYDSILQRAERMPKAKRYRFSRDGYERWLKEDKDFLARALNDTRYLSRVAKTYMELVCPLGTRVIPGQMTALLRAKFGLNDVLGLNGEKNRDDHRHHAVDACVIGVTDQGLLQRFAQASADARGNGLEKLVENMPVPWATYRDHVKRAIQCIWVSHKPDHGYEGPMMEETAYGIRKDGSIRQKTKADGSTGREITHLIRITEPTQNLRHGVDAQGQPLAYKGYVGGSNDCIEITQNEQGKWEGNVITTFQAYDIVRRLGSKQGPRRLRHPTLAQTLDVYGKPKKLVMRLMIDDCVRLELDGNKKTLRVVKITGNGQVFMAPVHEANVDKRNSDKTDPFAYVSKYAGSFQKAKARRITISPIGELHDPGF

SEQ ID NO: 16663 - protein, 1066 aa, unidentified
  REGION 1..1066: note = Cas Enzyme sequence
LKQIAPKGKRMPKQKSTRYRLALDLGSTSLGWAVLRLNEQHEPNAIIRAGVRIFSNGRNPKDGSSLAVTRRAARAMRRRRDRLLKRKARMMNKLVEYGFFPADVAERKKLERINPYELRAKGLDAPLTPGEFARALFHINQRRGFKSNRKTDKKENDSGALKAAISHLRQQLHERKARTVGEWLWQRLQAGLGTRARYRESRVAQANGKTRIEKSYDLYVDRQMIAEEFDALWAAQAAFNPQQFSEQARGELRDVLLFQRDLRPVRPGRCTLLPDEERAPLALPSTQRFRILQEANHLRLLHPDLHEEPLSLAQRDAVVDVLERNSKRTFEQLRKLLKLNGTVKFNLEDEKRKELKGNATSATLSKDGLFGENWWKLDEALQDAIVWQLVSEQSEEKLQNWLQANTGVNATQAETIANAGLPEGYGSLSYKALARIIPALRGTEVANGIDVPRTYDQAVQAAGFAHHSDLDSGFDFEHSHDEVERIGERVIASTGEVKPVFAFKQLPYYGKALRRHVAFAKEHPRNEEERYGKIANPTVHIGLNQLRVVVNALIRRYGRPTEVVVELARDLKQSREQRQEEQKRQADYQKRNERIRREIASMHGCAEERVSHADVQKWILWEELSFDVADRRCPYSGVQISAQMLLSNQVEIEHILPFSQTLDNSLNNRTVAMRQANRIKGNRTPWQAREDFERQGWSYDSILQRAERMPKAKRYRFSRDGYERWLKEDKDFLARALNDTRYLSRVAKTYMELVCPLGTRVIPGQMTALLRAKFGLNDVLGLNGEKNRDDHRHHAVDACVIGVTDQGLLQRFAQASADARGNGLEKLVENMPVPWATYRDHVKRAIQCIWVSHKPDHGYEGPMMEETAYGIRKDGSIRQKTKADGSTGRAITNLIRIIEPTQKLRHGVDAQGQPLAYKGYVGGSNDCIEITQNAQGKWEGNVITTFQAYDIVRRLGSKQGPRRLRHPTLAQALDAYGKPKKLVMRLMIDDCVRLELDGNEKTLRVVKITGNGQVFMAPVHEANVDKRNSDKTDPFAYVSKYAGSFQKAKARRITISPIGELHDPGF

SEQ ID NO: 16664 - protein, 1056 aa, unidentified
  REGION 1..1056: note = Cas Enzyme sequence
MSKQKSIRYRLALDLGSTSLGWAVLRLNEQHEPNAIIRAGVRIFSDGRNPKDGSSLAVTRRAARAMRRRRDRLLKRKARMMNKLVEYGFFPADVAERKKLERINPYELRAKGLDAPLTPGEFARALFHINQRRGFKSNRKTDKKENDSGALKAAISHLRQQLHERKARTVGEWLWLRLQAGLGTRARYRESRVAQANGKTRIEKSYDLYVDRQMIAEEFDALWAAQAAFNPQQFSEQARGELRDVLLFQRDLRPVRPGRCTLLPDEERAPLALPSVQRFRILQEANHLRLLHPDLREEPLSLAQRDAVVDALEHNSKRTFEQLRKLLKLNGTVKFNLEDEKRKELKGNATNAALSKDGLFGENWWQFDEALQNEIVWQLVSEQSEEKLQNWLQANTGVNATQAEAIANAGLPDGYGSLSRKALARIVPALREAEVVNGIDVPRTYDQAVQAAGFAHHSDLDSGFGFEHGHDEVERIGERVIASTGEVKPVFAFKQLPYYGKALQRHVAFAKEHPRNEEERYGKIANPTVHIGLNQLRVVVNALIRRYGRPTEVVVELARDLKQSREQKQEEQKRQADYQKRNERIRREIASMRGCAEERVSHADVQKWILWEELSFDVADRRCPYSGVQISAQMLLSNQVEIEHILPFSQTLDNSLNNRTVAMRQANRIKGNRTPWQAREDFERQGWSYDSILQRAERMPKAKRYRFSRDGYERWLKEDKNFLARALNDTRYLSRVAKTYMELVCPLGTRVIPGQMTALLRAKFGLNDVLGLNGEKNRDDHRHHAVDACVIGVTDQGLLQRFAQASADARGNGLEKLVENMPVPWATYRDHVKRAIQCIWVSHKPDHGYEGPMMEETAYGIRKDGSIRQKTKADGSTGRAITNLIRIIEPTQKLRHGVDAQGQPLAYKGYVGGNNDCIEITQNEQGKWEGNVITTFQAYDIVRRLGSKQGPRRLRHPTLAQALDAYGKPKKLVMRLMIDDCVRLELDGNKKTLRVVQITGNGQVFMAPVHEANVDKRNRDKTDPFAYVSKYAGSFQKAKARRITISPIGELHDPGF

SEQ ID NO: 16665 - protein, 998 aa, unidentified
  REGION 1..998: note = Cas Enzyme sequence
ARRAAGAWPRRRDRLLKRKARMMNKLVEYGFFPADVAERKKLERINPYELRAKGLDAPLTPGEFARALFHINQRRGFKSNRKTDKKENDSGALKAAISHLRQQLHERKARTVGEWLWQRLQAGLGTRARYRESRVAQANGKTRIEKSYDLYVDRQMIAEEFDALWAAQAAFNPQQFSEQARGELRDVLLFQRDLRPVRPGRCTLLPDEERAPLALPSVQRFRILQEANHLRLLHPDLHEEALSLAQRDAVVDALERNSKRTFEQLRKLLKLNGTVKFNLEDEKRKELKGNATSATLSKDGLFGENWWKLDEALQDAIVWQLVSEQSEEKLQNWLQANTGVNATQAETIANAGLPEGYGSLSYKALARIVPALRGAEVVNGIDVPRTYDQAVQAAGFAHHSDLDFGFDFEHSHDEVERIGERVIASTGEVKPVFAFKQLPYYGKALRRHVAFAKEHPRNEEERYGKIANPTVHIGLNQLRVVVNALIRRYGRPTEVVVELARDLKQSREQKQEEQKRQADYQKRNERIRREIASMHGCAEERVSHADVQKWILWEELSFDVADRRCPYSGVQISAQMLLSNQVEIEHILPFSQTLDNSLNNRTVAMRQANRIKGNRTPWQAREDFERQGWSYDSILQRAERMPKAKRYRFSRDGYERWLKEDKDFLARALNDTRYLSRVAKTYMELVCPLGTRVIPGQMTALLRAKFGLNDVLGLNGEKNRDDHRHHAVDACVIGVTDQGLLQRFAQASADARGNGLEKLVENMPVPWATYRDHVKRAIQCIWVSHKPDHGYEGPMMEETAYGIRKDGSIRQKTKADGSTGRAITNLIRIIEPTQKLRHGVDAQGQPLAYKGYVGGSNDCIEITQNAQGKWEGNVITTFQAYDIVRRLGSKQGPRRLRHPTLAQALDAYGKPKKLVMRLMIDDCVRLELDGNEKTLRVVKITGNGQVFMAPVHEANVDKRNSDKTDPFAYVSKYAGSFQKAKARRITISPIGELHDPGF

SEQ ID NO: 16666 - protein, 991 aa, unidentified
  REGION 1..991: note = Cas Enzyme sequence
MRRRRDRLLKRKARMMNKLVEYGFFPADVAERKKLERINPYELRAKGLDAPLTPGEFARALFHINQRRGFKSNRKTDKKENDSGALKAAISHLRQQLHERKARTVGEWLWLRLQAGLGTRARYRESRVAQANGKTRIEKSYDLYVDRQMIAEEFDALWAAQAAFNPQQFSEQARGELRDVLLFQRDLRPVRPGRCTLLPDEERAPLALPSTQRFRILQEANHLRLLHPDLHEEPLSLAQRDAVVDVLERNSKRTFEQLRKLLKLNSTVKFNLEDEKRKELKGNATSATLSKDGLFGENWWKLDEALQDAIVWQLVSEQSEEKLQNWLQANTGVNATQAETIANAGLPEGYGSLSYKALARIIPALRGTEVVNGIDVPRTYDQAVQAAGFAHHSDLDSGFDFEHSHDEVEWIGERVIASTGEVKPVFAFKQLPYYGKALRRHVAFAKEHPRNEEERYGKIANPTVHIGLNQLRVVVNALIRRYGRPTEVVVELARDLKQSREQRQEEQKRQADYQKRNERIRREIASMHGCAEERVSHADVQKWILWEELSFDVADRRCPYSGVQISAQMLLSNQVEVEHILPFSQTLDNSLNNRTVAMRQANRIKGNRTPWQAREDFERQGWSYDSILQRAERMPKAKRYRFSRDGYERWLKEDKDFLARALNDTRYLSRVAKTYMELVCPFGTRVIPGQMTALLRAKFGLNDVLGLNGEKNRNDHRHHAVDACVIGVTDQGLLQRFAQASADARGNGLEKLVENMPVPWATYRDHVKRAIQCIWVSHKPDHGYEGPMMEETAYGIRKDGSIRQKTKADGSTGRAITNLIRIIEPTQKLRHGVDAQGQPLAYKGYVGGSNHCIEITQNAQGKWEGNVITTFQAYDIVRRLGSKQGPRRLRHPTLAQALDAYGKPKKLVMRLMIDDCVRLELDGNKKTLRVVNITGNGQVFMAPVHEANVDKRNSDKTDPFAYVSKYAGSFQKAKARRITISPIGDLHDPGF

SEQ ID NO: 16667 - protein, 1039 aa, unidentified
  REGION 1..1039: note = Cas Enzyme sequence
LEPNAIIRAGVRIFSDGRNPKDGSSLAVTRRAARAMRRRRDRLLRRKARMVNKLVEYGFFPADPAERKALELQNPYELRAKGLHEALTPREFGRAVFHLNQRRGFKSNRKTDKGESDAGALKSAIVHLREDIQAQGLQTVGELLWQRMQAGKGTRARYREARVPKDDGKTRIEKSYDLYIDRQMIADEFDALWRKQASLNPTHYTDAARDDLRDTLLYQRKLRPVTPGRCTLLPELARAPLALPSTQRFRILQEVNHLRLLDERLQERPLTEEQRDRIVAALEQAHKVTFKGIRKLLKLGGVVQFNLEDEKRPELKGNATSATLSRDEHFGARWFELDTALQDDIVLQLLNEESEDKLVDWLAQHTGVDDARARKIANAGLPEGYGSLSREALARILPALRACEVVDGVARPRTYDKAVLAAGFAHHSVLAVEAEPHEYDLREVVDSATGEIKQQQVFKALPYYGKALQRHVAFGSGNPEDTEEKRFGKIANPTVHIGLNQVRLVVNALIRRYGHPTEVVVELARDLKQSREQKQETQKKQAENQRRNERIRREIATIRGIEPFNVKIADIQKWILWEELSFDVADRRCPYSGVQISASMVLKDEVEIEHILPFSQTLDDSLNNRTVAMRSANRVKGNRTPWDAREDFEHQDWSYDGILLRAERMPKGKRYRFAADGYEQWLRDDKGFLARALNDTRYLSRIAKEYLTLICPGSGVRVIPGQMTAMLRRRFGLNDVLGMDGEKNRDDHRHHAVDACVIGVTDQGLLQRFAQASADARNKGLDRLVEQMPLPWPTYRDHVARAVRHIWVSHRPDHGHEGAMHNDTAYGLLGAGKVTVHKRIEGKRERTEENLKVIAFANEKAPHGTNRPWFGSAHHKPAKPYKGYKGDSNYCIEIVRNEKGKWEGEVISTFEAYQLERKLRAAYRNQHGKSERAPSFLELLGNTESISKKPLVMRLMRDDMVRLVHGGVLMTLRIATIKTNGQILFAPHQESNVDARNRDKDDPFSYVSKTPGSLFASQGRRVTVSPIGDLRDPGWKSAE

SEQ ID NO: 16668 - protein, 1124 aa, unidentified
  REGION 1..1124: note = Cas Enzyme sequence
MRQEYKLSLDLGTNSIGWCVFDLKKDPDDSTKNLIPCAIRKMGVRLFSEPRNHKTTLAAARRAKRLARRNLQRFKQRKNKLINLLVKHRLMPDNETDRLKLKEKNPYLLRHKAIREQLSLFEIGRAIYNLNIRRGFKSNRKELLKEDSEKSKLKQHIKHLESLLKENNYDTIGDFLYARQDAGLKIKCWSPNDEKKASTSDKEALKDEFFISRELVKKELELIWETQRKYHPEILTDNAFSEISDCILSQRPLKSCKELIGTCSYERNLESAQLKRAPRALVSHELLSLFQRLGNLKYLDKNDSSLSQKALTIDQIFKVYNYAWSNPSSKLEFSKIREICNFDSSISFNYEKAELKKQNNSKKTKTKTEASSLEFVANLAAIKELGIFSNLIKVKDFKTLDEIIYKLVSEADDEEVFNHIESKVDKELSEKEKESLMDEGLAKCAEKLKSDYASMCEIAINKFLGEYLSLLIVGCFDSLPKFNDLENKLYPDRAKQDGFRDELPFYGDLPLDCLTPIPSFKNNVRNLESRISNPTVHVALNQLRLIVNSLIKKYGKPAQISLELARDLKNSKKEKERIATSQEHNKDIKDEFKEFASQYRGNINSHDDLVKFKLWKEMKVTGDRLCVYSDKKISCTNLFSNEIQIEHIKPFSKSLDDSLSNKVLAHWSANQDKKNKTPYQAFSNSEKYSWEEIKDRSYDLFYAVNRKKYFNLISEEEPKVEDFLARQLTDTQYISRVARKYLSCLIEEKNIFVNNGRVTKIIRDDALGLSSLLNPDSNTKDRRDHRHHALDAFVVGIIDSAMVNRIHRASARNENIKSLVSSLKAIEGDNSRLLEDLETHLMKIQISVKPDHSIDGEIHKESIYGLKPLIDFEKKYKTNPFKEPLDSESYFFGVERVKLDDLKDFTHVVNPYLREQLKKCFEEKANASEAINYFKESVSSKTKKIKVFTELNPAKYIVRKNESGEVFQGFKSGNNAFAIIYKNLKNKYEISIVSTFDAYQARKDDPREYLNVLVNKNRPNIDSEFQYVLFQGDIIQIDNPDKTSKFKKVNLLVKKLTSRSDGRFAVIVSGELNPLSIQKDYYGWKEKKNKKGEIIGLEALVKELSPKFFQDHQPIKLKLSPIGA

SEQ ID NO: 16669 - protein, 1146 aa, unidentified
  REGION 1..1146: note = Cas Enzyme sequence
MALRYILGIDLGISSIGTALIKIAPEAKDLNDINSYEKILDAGVRICSCPEGAEKRRILRSQRKSKKHRKARKKQLIQLLQEYNLLPKERSGLELGLRSAPYALRAKAMQEPLNSAHELGFCIMHTAKLRGAGFIEETDEKEKSEKSLNRYQLLEQALNKEKTTLSEYLYKHLQENGCIRQRKEFIADKVPFSVPRHLVKRDYRDLMSRQAPHFNISDEQIKKVYDCIFMDFPRAPYANAPCSLLPETGGRLPKMHRLAEQLRIYQQCNNIRYKTENSTQKLTREMRDKLAAMLMQGESLNKTLIKKTLQTYTDEKILSINVYAEDEEIKAIKPFAHIKAFADIPAFWQLSEEEQDGLMEFIADPVNPKANPAKPVLYDEEDFLHICMEKLNLSGIEDERKLYACLNSLPKDRTMLGKEASRQILKKLIEGYEENGIWQAPTYYEAVKACGFTRENQEQKRYDELPYYGEILHDEILPIHPWHLDRTAKEEKIGRIANPVVHSILNQLRKVINEIIRLYGKPEMIKLEVARDFGMSKKKRDKLEKQRLANEKYNKIIDEELLKNGYAVTDKNRKKYKLLKEQGYKDIYTQANLRISDLNAYEIDHIIPQTAGGTNSFCNLVLTTVNNVKSDTFAYDFIRQNFADREEAIKKHLETLPENKAWRFTAEAKDRFILLGDEKDEDYADRRLQDSRYMAKAALRYLHAVCPDILAIRGGMTAQLRRLWGFDGMEFELMGLDIPRYLTNNETGEVYCDENGKLSNNSDWEKKPRIDHRHHAIDAMVLCAVTRSLALKMYKARKQGKEIDESIINMPFRLSPKNPDHKSFRELVLETLKEIRISHKAEHDTNTQLHNETAIRILDYDEKKGLHTATYMRSLGNIDSFGKLEKIAVAENLGTSPDVQKIRKRCAEIIKAVNAQKFAAEQSLMEKNAENRLQGLKETAMTEQNLVQEAIRLAHVGKKYPVGKKFTLVNIREKQQCGYEPDSNHHVDFYVHTEGKQKGKIGWECIKSIDAANPNFKPGWRQENAKLIWSVCKDDILELRFTEQQLQEYNVPKAFVSKISKNGQQEYTMLAKILKFSPGVLVFVSIYDARTGTKNALKEHPENFLLWTSGNLGLNSYCELQARKVSLSSFGKINGKHKKLWNGKKI

SEQ ID NO: 16670 - protein, 1109 aa, unidentified
  REGION 1..1109: note = Cas Enzyme sequence
MDQSTDNLTRLGLDIGTNSIGWWLYATDGKRITGVINGGVRIFSDGRDPKSGASLAVDRRAARAMRRRRDRYLRRRAALMRKLSEAGLMPSDPDAAKTLELLDPYELRAKGLDAALPLTHLGRSLFHLNQRRGFKSNRKTDDRGDNLSGKIRGATARLDQAMMIKGARTFGEFLHMRRSDKPEKPGDEQKPNKDGTRLDDRRTKPVRTRLSVARRDNAEKEEAGYDFYPDRRHLEEEFNKLWDAQVAYHPDVLTNDLKNTLFETIFHQRPLKEPEIGLCLFSGQHDVPSDERRLPKAHPLTQRRILYETVNNLRVTADGREKRPLTLEQRDQIIHALDNRKATKSPKSMALKLDALGKVIKLAPHERFTLETVARDAIACDPVRASLSHPDRFGPKWSELDLDAQWEVIRRIRAVQSDADHADLVTWLSETHELDNDHASDTATAPLPEGYGRLGETASRKILGALKADVITYSQAVETCGWHHSDHRTGEVLNQLPYYGAILERQVIPGSGRPEDDDITRFGRITNPTVHIGLNQLRRLVNKIITVYGKPDQIVVELARELKQSDKQKKDTQNRIKANTEAARKRSERLAELGQPDTGANRMLLRLYEELGPAIGPRCCPYTGKPISVTMLFDGSCDVDHILPYSRTLDDSFANRTLCMREANREKTNKTPWEVWGGTSQWDKIAANLKNLPDNKRWRFTPDAMERFEGENDFLDRALVDTQYLSRIARTYLDALYAEGGHVWVVPGRLTEMLRRHWGLNSLLPDHNKGTAKAKNRTDHRHHAIDAAVIAATDRSLIKQISDAAKRGEGDDLSAEDVARTTPEPWEGFRTDIGIQLGKILVSHRADHGRIDPAAKKQGQDSTTGRLHNDTAYGILDEQRVVSRTPLLSLKAGDIAVTSKGKNIRDPYLQRLLSEVIADKETPKDIEAALAEFAASERLSNGKHNPYRGIRHVRLIESLQSSARVEIKNGVDKPYKAYKGDSNYCYEIWRMPDGKPKAQVITTFEAHDKVTHRPHPAAKRLLRIFKRDMVAIERDGKTLICYVQKFDPSNGIFLAPHTESNADARNRGRKDDFRLIQMSTNSILKARLRRVFVDEMGHLRDPRLTRLMG

SEQ ID NO: 16671 - protein, 1109 aa, unidentified; identical to SEQ ID NO: 16670
  REGION 1..1109: note = Cas Enzyme sequence

SEQ ID NO: 16672 - protein, 1044 aa, unidentified
  REGION 1..1044: note = Cas Enzyme sequence
MTRYRLGLDLGTNSIGWCAVKLTGDKKPEGVLDAGVLMLTVSQEAGRDPQSKQSFAADRRAARSARRRRDRFLRRKARLMTLLVRWGLMPEDEAARKALERLDPYELRAACLDGPQPLHHIGRALFHINQRRGFQSNRIADGGDDEKSVVKSGIRALEERLKEDGSRTVGEWLAKRHAERRTVRARPGTEGYDFYPSRALTKSEIDLIWRTQSAHHPELTDERLDELLYVVIGQRKLKKPPVGRCTFRPDEERAHRAMPSFQRYRIMTDAANLEIERPGRKARKLSKSEWHSVVGLLLSKGGSLVKFEDIAKALKLPEDATFNLARGGRSGLQPDLTAVKLSHKSAYGKAWRSFPLAKQNEIVSKLLSVEDEGALIDWLCEETGLSAEAADFVANARLPQGTAHLGLSMLRDMIDVLSTEEGEAADPETGEVYPCALTYDQAIERLGLHHSDMRPGERHARLPYYGDLFPANVIAKPDAPEGSQERRGRLPNPTVHIGLNQLRRLINALVKEYGPPEQIVVELARELKLPQKRKDEIQRENRDNEKKNIARSAKLAELDQADTPGNRLRLRLYEELPADARVCVYSGTPINCKTLFTDKIEIDHILPFSTTLDDGFANKVLCTREANRQKGNRAPFDAFGQEAEDRARTLFGADTTKARRFAPDAMDRLAKDGDWIARQLTDTQHLAKLAGRYLGHICDPNQVWVTPGRLTAMMRGLWGLNRLLPDHNIQGAGAKNRLDHRHHAVDAFVVACTERRLLNKMAQASGRGEDMDAGRLFGPDGLPEPFEGFRDALRTRLETMIVAHKADHGKGGRLHEETAYGMVEEEIGGKRFNLVVRKAIHALTRKEIDQVRDPLWRTRLQRVAEQAEAGGTKLADALTEFGKKEGIRHIRVLKTEAQTVEVCHGPQRQFSKAYVPGDNHRVDIYEGADGKWFAAGLSTYDANARPNEQDPPDAECLMRLHKGDLIEADFDGTRKVYRVYRLELGNDRLRLAPHNEAGELDKRHNNPDDPFRWSIKSWSSLKSAGARQVRVDKLGRIHPMRPAP

SEQ ID NO: 16673 - protein, 1443 aa, unidentified
  REGION 1..1443: note = Cas Enzyme sequence
VEVKLMNFNRKCSENYCLGLDVGTASVGYCVIDENGKLFKINRKGDNGNNKRNSLWGVRTFKSGEPAKGCRINRSTRRRYSRTHTRILELRKIMSDMVCKVDENFFARLDESFLWKEDKSDKAKSDYILFADKDCTDKDYYEKYQTIYHLRKHLLGTTEKADARFIYLALHHMLKYRGNFLYEGQKFTELDDFKIIYEQFLTSLKEYLEIECNYDQISCEEIEKKLKEKKSKKEKYNEVSEILKKLGLDKKYAEAVANAIIGYKFNVATIMNDKNLCDENGKEMSVSFASADYEEEEQKLSDELGEKFSVIENLKRLYSWYVIKQIMQGSDKNRVNYLSEAMVAKYEKHHAELKELKELFRDYKTQKEYSEFFHKELKAEQKDGKMSPAFLKSFGKIKKGEYVPNYANYIKGMKRCGDTQSKARENLYKCIKALLGDVAKDDERYIRICAEMENDSYLEKINDVSNSVIPYQLNEMEMEKILDIQGEFYPELKKNKELILKMLTSKIPYFVGPLNPGSRFAWMSKKAGMENKSVYPWNVEEVVDVDKTAEKFITRMTNYCTYLPCEKVLPKHSIIYQWYEVLTELSQISIDKIKFGKEIRDDIIQNLFLKKVSVSGNNLKEHLKKSGTYNDIDNRVIKGYQGGDNFASSMSSYITFKKIFGEINMSNIDMIEQIIYWLTIFDDKKIIKRKIEQNYKDKINDSQLKRILKIKYTGWGQLSKKFLTGIKGDTGHTIIEMLEEGDLRWKEIPNLIQIINRDEKIKTVIEENRLRYNGEDDLPDIIDKLHTSPANKRGIKQCMKVIEEIIEYMGRKPEQIFIEFAREEGEKVETKKVKDKLDKAIGKLKQEFKDYYNDDIKQELKDNEKRLDEEKVRLYFSQNGKSLYSAPSASNQLSLDNLNQYDVDHIIPYSISQDDSMDNKVLVEKIENQNKGNRIVSDAFGNKADYKKMQNYWEMLYKAGLISEKKYNNLNKSLDEVFSKGFINRQLVETRQIVKNVANLISDYYDDKIEVIEVKAQLSSYIRNKFTQEKKDDDGFWIENTENAMFFKNRGLNDYHHAHDAYLACIIGLYIQKVYPGWKNELNFKKYRREFEKYYEEQKKYNTKSKKEIYISMLNRFTKNYEKAGWNGEEIIEYMRKIFCYRDVMISKKTEENTGSFYNQTRYPKEKLDGNKKETKLIPLKSGNNLRGKEGLKELSVEKYGGYQGGECAYFVLVKYYTVKNKKKTEEKQWKMEFVGIPTYISYEINKGNINLKQYICDKLKNNTVEILRNKICKYQELMDEEGNRYFLVGPTEVANAKQFVLGSRYQKFNRLYSYINSENWHYIRTDELEKEIDEFFKLLQNKIHNEFKGYIKDIDKVIGANTSKLDIDKKIDYFNEIYKIVQANSSRPAVSKFNIAGISDGLGRKRSLPFKDKIIIVDKSVTGIYERRTCFELENGGNTKSC

SEQ ID NO: 16674 - protein, 1443 aa, unidentified
  REGION 1..1443: note = Cas Enzyme sequence
VEVKLMDFNRKCSENYCLGLDVGTASVGYCVIDENGKLFKINRKCDNGNNKRNSLWGVRTFKSGEPAKGCRINRSARRRYSRTHTRILELRKIMSDMVCKVDENFFARLDESFLWKEDKSDKAKSDYILFADKDCTDKDYYEKYQTIYHLRKHLLGTTEKADARFIYLALHHMLKYRGNFLYEGQKFTELDDFKIIYEQFVTSLKEYLEIECNYDEISCEEIEEKLKEKKSKKEKNNEVSEILKKLGLDKKYAEAVANAIIGYKFNVATIMNDKNLCDENGKEMSVSFASADYEEEEQKLSDELGEKFSVIENLKRLYSWYVIKQIMQGSDKNRVNYLSQAMVAKYEKHHAELKELKELFRDYKTQKEYSEFFHKELKAEQKDSKMSPAFLKSFGKIKKGEYVPNYANYIKGMKRCGDTQSKARENLYKCIKALLGDVAKDDERYIRICAEMENDSYLEKINDVSNSVIPYQLNEMEMGKILDIQGEFYPELKKNKELILKMLTSKIPYFVGPLNPGSRFAWMSKKAGMENKSVYPWNVEEVVDVDKTAEKFITRMTNYCTYLPCEKVLPKHSIIYQWYEVLTELSQISIDKIKLGKEIRDDIIQNLFLKKVSVSGENLKEHLKKSGTYNDIDNRVIRGYQGGDNFASSMSSYITFKKIFGEINMSNIDMIEQIIYWLTIFDDKKIIKRKIEQNYKDKINDSQLKRILKIKYTGWGQLSKKFLTGIKGDTGHTIIEMLEEGDPRWKELPNLIQIINRDEKIKTVIEENRLRYNGEDDLPDIIDKLHTSPANKRGIKQCMKVIEEIIEYMGRKPEQIFIEFAREEGEKVETKKVKDKLDKAIGKLKQEFKDYYNDDIKQELKDNEKRLDEEKVRLYFSQNGKSLYSAPSASNQLSLDNLNQYDVDHIIPYSISQDDSMDNKVLVKKIENQNKGNRIVSDAFGNKADYKEMQNYWEMLYKAGLISEKKYNNLNKSLDEVFSKGFINRQLVETRQIVKNVANLISDYYDDKIEVIEVKAQLSSYIRNKFTQEKKDDDGFWIENTENAMFFKNRGLNDYHHAHDAYLACIIGLYIQKVYPGWKNELNFKKYRREFEKYYEEQKKYNTKSKKEIYISMLNRFTKNYEKAGWNGEEIIEYMRKIFCYRDVMISKKTEENTGSFYNQTRYPKEKLDGNKKETKLIPLKSGNNLRGKEGLKELSVEKYGGYQGGECAYFVLVKYYTVKNKKKTEEKQWKMEFVGIPTYISYEINKGNINLKQYICDKLKNNTVEILRNKICKYQELMDEEGNRYFLVGPTEVANAKQFVLGSRYQKFNRLYSYINSENWHYIRTDELEKEIDEFFKLLQNKIHNEFKGYIKDIDKVIGANTSKLDIDKKIDYFNEIYKIVQANSSRPAVSKFNIAGISDGLGRKRSLPFKDKIIIVDKSVTGIYERRTCFELENGGNTKSC

SEQ ID NO: 16675 - protein, 1438 aa, unidentified
  REGION 1..1438: note = Cas Enzyme sequence
MNFNRKCSENYCLGLDVGTASVGYCVIDENGKLFKINRKGDNGNNKRNSLWGVRTFKSGEPAKGCRINRSTRRRYSRTHTRILELRKIMSDMVCKVDENFFARLDESFLWKEDKSDKAKSDYILFADKDCTDKDYYEKYQTIYHLRKHLLGTTEKADARFIYLALHHMLKYRGNFLYEGQKFMELDDFKIIYEQFLTSLKEYLEIECNYDQISCEEIEEKLKEKKSKKEKNNEVSEILKKLGLDKKYAEAVANAIIGYKFNVATIMNDKNLCDENGKEMSVSFASADYEEEEQKLSDELGEKFSVIENLKRLYSWYVIKQIMQGSDKNRVNYLSQAMVAKYEKHHAELKELKELFRDYKTQKEYSEFFHKELKAEQKDGKMSPAFLKSFGKIKKGEYVPNYANYIKGMKRCGDTQSKARENLYKCIKALLGDVAKDDERYIRICAEMENDSYLEKINDVSNSVIPYQLNEMEMEKILDIQGEFYPELKKNKELILKMLTSKIPYFVGPLNPGSRFAWMSKKAGMENKSVYPWNVEEVVDVDKTAEKFITRMTNYCTYLPCEKVLPKHSIIYQWYEVLTELSQISIDKIKFGKEIRDDIIQNLFLKKVSVSGNNLKEHLKKSGTYNDIDNRVIKGYQGGDNFASSMSSYITFKKIFGEINMSNIDMIEQIIYWLTIFDDKKIIKRKIEQNYKDKINDSQLKRILKIKYTGWGQLSKKFLTGIKGDTGHTIIEMLEEGDLRWKEIPNLIQIINRDENIKTVIEENRLRYNGEDDLPDIIDKLHTSPANKRGIKQCMKVIEEIIEYMGRKPEQIFIEFAREEGEKVETKKVKDKLDKAIGKLKQEFKDYYNDDIKQELKDNEKRLDEEKVRLYFSQNGKSLYSAPSASNQLSLDNLNQYDVDHIIPYSISQDDSMDNKVLVKKIENQNKGNRIVSDAFGNKADYKEMQNYWEMLYKAGLISEKKYNNLNKSLDEVFSKGFINRQLVETRQIVKNVANLISDYYDDKIEVIEVKAQLSSYIRNKFTQEKKDDDGFWIENTENAMFFKNRGLNDYHHAHDAYLACIIGLYIQKVYPGWKNELNFKKYRREFEKYYEEQKKYNTKSKKEIYISMLNRFTKNYEKAGWNGEEIIEYMRKIFCYRDVMISKKTEENTGSFYNQTRYPKEKLDGNKKETKLIPLKSGNNLRGKEGLKELSVEKYGGYQGGECAYFVLVKYYTVKNKKKTEEKQWKMEFVGIPTYISYEINKGNINLKQYICDKLKNNTVEILRNKICKYQELMDEEGNRYFLVGPTEVANAKQFVLGSRYQKFNRLYSYINSENWHYIRTDELEKEIDEFFKLLQNKIHNEFKGYIKDIDKVIGANTSKLDIDKKIDYFNEIYKIVQANSSRPAVSKFNIAGISDGLGRKRSLPFKDKIIIVDKSVTGIYERRTCFELENGGNTKSC

SEQ ID NO: 16676 - protein, 1438 aa, unidentified
  REGION 1..1438: note = Cas Enzyme sequence
MNFNRKCSENYCLGLDVGTASVGYCVIDENGKLFKINRKGDNGNNKRNSLWGVRTFKSGEPAKGCRINRSTRRRYSRTHTRILELRKIMSDMVCKVDENFFARLDESFLWKEDKSDKAKSDYILFADRDCTDKDYYEKYQTIYHLRKHLLGTTEKADARFIYLALHHMLKYRGNFLYEGQKFTELDDFKIIYEQFLTSLKEYLEIECNYDQISCEEIEKKLKEKKSKKEKYNEVSEILKKLGLNKKYAEAVANAIIGYKFNVATIMNDKNLCDENGKEMSVSFASADYEEEEQKLSDELGEKFSVIENLKRLYSWYVIKQIMQGSDKNRVNYLSQAMVAKYEKHHAELKELKELFRDYKTQKEYSEFFHKELKAEQKDGKMSPAFLKSFGKIKKGEYVPNYANYIKGMKRCGDTQSKARENLYKCIKALLGDVAKDDERYIRICAEMENDSYLEKINDVSNSVIPYQLNEMEMEKILDIQGEFYPELKKNKELILKMLTSKIPYFVGPLNPGSRFAWMSKKAGMENKSVYPWNVEEVVDVDKTAEKFITRMTNYCTYLPCEKVLPKHSIIYQWYEVLTELSQISIDKIKFGKEIRDDIIQNLFLKKVSVSGNNLKEHLKKSGTYNDIDNRVIKGYQGGDNFASSMSSYITFKKIFGEINMSNIDMIEQIIYWLTIFDDKKIIKRKIEQNYKDKINDSQLKRILKIKYTGWGQLSKKFLTGIKGDTGHTIIEMLEEGDLRWKEIPNLIQIINRDEKIKTVIEENRLRYNGEDDLPDIIDKLHTSPANKRGIKQCMKVIEEIIEYMGRKPEQIFIEFAREEGEKVETKKVKDKLDKAIGKLKQEFKDYYNDDIKRELKDNEKRLDEEKVRLYFSQNGKSLYSAPSAGNQLSLDNLNQYDVDHIIPYSISQDDSMDNKVLVKKIENQNKGNRIVSDAFGNKADYKEMQNYWEMLYKAGLISEKKYNNLNKSLDEVFSKGFINRQLVETRQIVKNVANLISDYYDDKIEVIEVKAQLSSYIRNKFTQEKKDDDGFWIENTENAMFFKNRGLNDYHHAHDAYLACIIGLYIQKVYPGWKNELNFKKYRREFEKYYEEQKKYNTKSKKEIYISMLSRFTKNYEKAGWNGEEIIEYMRKIFCYRDVMISKKTEENTGSFYNQTRYPKEKLDGNKKETKLIPLKSGNNLRGKEGLKELSVEKYGGYQGGECAYFVLVKYYTVKNKKKTEEKQWKMEFVGIPTYISYEINKGNINLKQYICDKLKNDTVEILRNKICKYQELMDEEGNRYFLVGPTEVANAKQFVLGSRYQKFNRLYSYINSENWHYIRTDELEKEIDEFFKLLQNKIHNEFKGYIKDIDKVIGANTSKLDMDKKIDYFNEIYKIVQANSSRPAVSKFNIAGISDGLGRKRSLPFKDKIIIVDKSVTGIYERRTCFELENGGNTKSC

SEQ ID NO: 16677 - protein, 1207 aa, unidentified
  REGION 1..1207: note = Cas Enzyme sequence
NEVSEILKKLGLDKKYAEAVANAIIGYKFNVATIMNDKNLCDENGKEMSVSFASADYEEEEQKLSDELGEKFSVIENLKTLYSWYVIKQIMQGSDKNRVNYLSEAMVAKYEKHHVELKELKELFRDYKTQKEYSEFFHKELKAEQKDGKMSPAFLKSFGKIKKGEYVPNYANYIKGMKRCGDTQSKARENLYKCIKALLGDVAKDDERYIRICAEMENDSYLEKINDVSNSVIPYQLNEMEMEKILDIQGEFYPELKKNKELILKMLTSKIPYFVGPLNPGSRFAWMRKKAGMENKSVYPWNVEEVVDVDKTAEKFITRMTNYCTYLPCEKVLPKHSIIYQWYEVLTELSQISIDKIKFGKEIRDDIIQNLFLKKVSVSGENLKEHLKKSGTYNDIDNRVIRGYQGGDNFASSMSSYITFKKIFGEINMSNIDMIEQIIYWLTIFDDKKIIKRKIEQNYKDKINDSQLKRILKIKYTGWGQLSKKFLTGIKGDTGHTIIEMLEEGDPRWKELPNLIQIINRDEKIKTVIEENRLRYNGEDDLPDIIDKLHTSPANKRGIKQCMKVIEEIIEYMGRKPEQIFIEFAREEGEKVETKKVKDKLDKAIGKLKQEFKDYYNDDIKQELKDNEKRLDEEKVRLYFSQNGKSLYSAPSAGNQLSLDNLNQYDVDHIIPYSISQDDSMDNKVLVKKIENQNKGNRIVSDAFGNKADYKEMQNYWEMLYKAGLISEKKYNNLNKSLDEVFSKGFINRQLVETRQIVKNVANLISDYYDDKIEVIEVKAQLSSYIRNKFTQEKKDDDGFWIENTENAMFFKNRGLNDYHHAHDAYLACIIGLYIQKVYPGWKNELNFKKYRREFEKYYEEQKKYNTKSKKEIYISMLSRFTKNYEKAGWNGEEIIEYMRKIFCYRDVMISKKTEENTGSFYNQTRYPKEKLDGNKKETKLIPLKSGNNLRGKEGLKELSVEKYGGYQGGECAYFVLVKYYTVKNKKKTEEKQWKMEFVGIPTYISYEINKGNINLKQYICDKLKNDTVEILRNKICKYQELMDGEGNRYFLVGPTEVANAKQFVLGSRYQKFNRLYSYINSENWRYIRTDELEKEIDEFFKLLQNKIHNEFKGYIKDIDKVIGANTSKLDIDKKIDYFNEIYKIVQANSSRPAVSKFNIAGISDGLGRKRSLPFKDKIIIVDKSVTGIYERRTCFELENGGNTKSC

SEQ ID NO: 16678 - protein, 1438 aa, unidentified
  REGION 1..1438: note = Cas Enzyme sequence
MNFNRKCSENYCLGLDVGTASVGYCVIDENGKLFKINRKGDNGNNKRNSLWGVRTFKSGEPAKGCRINRSTRRRYSRTHTRILELRKIMSDMVCKVDENFFARLDESFLWKEDKSDKAKSDYILFADKDCTDKDYYEKYQTIYHLRKHLLGTTEKADARFIYLALHHMLKYRGNFLYEGQKFTELDDFKIIYEQFVTSLKEYLEIECNYDQISCEEIEKKLKEKKSKKEKYNEVSEILKKLGLDKKYAEAVANAIIGYKFNVATIMNDKNLCDENGKEMSVSFASADYEEEEQKLSDELGEKFSVIENLKTLYSWYVIKQIMQGSDKNRVNYLSEAMVAKYEKHHVELKELKELFRDYKTQKEYSEFFHKELKAEQKDGKMSPAFLKSFGKIKKGEYVPNYANYIKGMKRCGDTQSKARENLYKCIKALLGDVAKDDERYIRICAEMENDSYLEKINDVSNSVIPYQLNEMEMEKILDIQGEFYPELKKNKELILKMLTSKIPYFVGPLNPGSRFAWMRKKAGMENKSVYPWNVEEVVDVDKTAEKFITRMTNYCTYLPCEKVLPKHSIIYQWYEVLTELSQISIDKIKFGKEIRDDIIQNLFLKKVSVSGENLKEHLKKSGTYNDIDNRVIRGYQGGDNFASSMSSYITFKKIFGEINMSNIDMIEQIIYWLTIFDDKKIIKRKIEQNYKDKINDSQLKRILKIKYTGWGQLSKKFLTGIKGDTGHTIIEMLEEGDPRWKELPNLIQIINRDEKIKTVIEENRLRYNGEDDLPDIIDKLHTSPANKRGIKQCMKVIEEIIEYMGRKPEQIFIEFAREEGEKVETKKVKDKLDKAIGKLKQEFKDYYNDDIKQELKDNEKRLDEEKVRLYFSQNGKSLYSAPSAGNQLSLDNLNQYDVDHIIPYSISQDDSMDNKVLVKKIENQNKGNRIVSDAFGNKADYKEMQNYWEMLYKAGLISEKKYNNLNKSLDEVFSKGFINRQLVETRQIVKNVANLISDYYDDKIEVIEVKAQLSSYIRNKFTQEKKDDDGFWIENTENAMFFKNRGLNDYHHAHDAYLACIIGLYIQKVYPGWKNELNFKKYRREFEKYYEEQKKYNTKSKKEIYISMLSRFTKNYEKAGWNGEEIIEYMRKIFCYRDVMISKKTEENTGSFYNQTRYPKEKLDGNKKETKLIPLKSGNNLRGKEGLKELSVEKYGGYQGGECAYFVLVKYYTVKNKKKTEEKQWKMEFVGIPTYISYEINKGNINLKQYICDKLKNDTVEILRNKICKYQELMDGEGNRYFLVGPTEVANAKQFVLGSRYQKFNRLYSYINSENWRYIRTDELEKEIDEFFKLLQNKIHNEFKGYIKDIDKVIGANTSKLDIDKKIDYFNEIYKIVQANSSRPAVSKFNIAGISDGLGRKRSLPFKDKIIIVDKSVTGIYERRTCFELENGGNTKSC

SEQ ID NO: 16679 - protein, 1438 aa, unidentified
  REGION 1..1438: note = Cas Enzyme sequence
MDFNRKCSENYCLGLDVGTASVGYCVIDENGKLFKINRKGDNGNNKRNSLWGVRTFKSGEPAKGCRINRSTRRRYSRTHTRILELRKIMSDMVCKVDENFFARLDESFLWKEDKSDKAKSDYILFADKDCTDKDYYEKYQTIYHLRKHLLGTTEKADARFIYLALHHMLKYRGNFLYEGQKFTELDDFKIIYEQFLTSLKEYLEIECNYDQISCEEIEKKLKEKKSKKEKYNEVSEILKKLGLNKKYAEAVANAIIGYKFNVATIMNDKNLCDENGKEMSVSFASADYEEEEQKLSDELGEKFSVIENLKRLYSWYVIKQIMQGSDKNRVNYLSEAMVVKYEKHHAELKELKELFRDYKTQKEYSEFFHKELKAEQKDGKMSPAFLKSFGKIKKGEYVPNYANYIKGMKRCGDTQSKARENLYKCIKALLGDVAKDDERYIRICAEMENDSYLEKINDVSNSVIPYQLNEMEMEKILDIQGEFYPELKKNKELILKMLTSKIPYFVGPLNPGSRFAWMSKKAGMENKSVYPWNVEEVVDVDKTAEKFITRMTNYCTYLPDEKVLPKHSIIYQWYEVLTELSQISIDKIKLGKEIRDDIIQNLFLKKVSVSGENLKEHLKKSGTYNDIDNRVIRGYQGGDNFASSMSSYITFKKIFGEINMSNIDMIEQIIYWLTIFDDKKIIKRKIEQNYKDKINDSQLKRILKIKYTCWGQLSKKFLTGIKGDTGHTIIEMLEEGDPRWKELPNLIQIINRDEKIKTVIEENRLRYNGEDDLPDIIDKLHTSPANKRGIKQCMKVIEEIIEYMGRKPEQIFIEFAREEGEKVETKKVKDKLDKAIGKLKQEFKDYYNDDIKQELKDNEKRLDEEKVRLYFSQNGKSLYSAPSAGNQLSLDNLNQYDVDHIIPYSISQDDSMDNKVLVKKIENQNKGNRIVSDAFGNKADYKEMQNYWEMLYKAGLISEKKYNNLNKSLDEVFSKGFINRQLVETRQIVKNVANLISDYYDDKIEVIEVKAQLSSYIRNKFTQEKKDDDGFWIENTENAMFFKNRGLNDYHHAHDAYLACIIGLYIQKVYPGWKNELNFKKYRREFEKYYEEQKKYNTKSKKEIYISMLSRFTKNYEKAGWNGEEIIEYMRKIFCYRDVMISKKTEENTGSFYNQTRYPKEKLDGNKKETKLIPLKSGNNLRGKEGLKELSVEKYGGYQGGECAYFVLVKYYTVKNKKKTEEKQWKMEFVGIPTYILYEINKGNINLKQYICDKLKNNTVEILRNKICKYQELMDEEGNRYFLVGPTEVANAKQFVLGSRYQKFNRLYSYINSENWHYIRTDELEKEIDEFFKLLQNKIHNEFKGYIKDIDKVIGANTSKLDIDKKIDYFNEIYKIVQANSSRPAVSKFNIAGISDGLGRKRSFPFKDKIIIVDKSVTGIYERRTCFELENGGNTKSC

SEQ ID NO: 16680 - protein, 1438 aa, unidentified
  REGION 1..1438: note = Cas Enzyme sequence
MDFNRKCSENYCLGLDVGTASVGYCVIDENGKLFKINRKGDNGNNKRNSLWGVRTFKSGEPAKGCRINRSTRRRYSRTHTRILELRKIMSDMVCKVDENFFARLDESFLWKEDKSDKAKSDYILFADKDCTDKDYYEKYQTIYHLRKHLLGTTEKADARFIYLALHHMLKYRGNFLYEGQKFTELDDFKIIYEQFLTSLKEYLEIECNYDQISCEEIEEKLKEKKSKKEKNNEVSEILKKLGLDKKYAEAVANAIIGYKFNVATIMNDKNLCDENGKEMSVSFASADYEEEEQKLSDELGEKFSVIENLKRLYSWYVIKQIMQGSDKNRVNYLSQAMVAKYEKHHAELKELKELFRDYKTQKEYSEFFHKELKAEQKDGKMSPAFLKSFGKIKKGEYVPNYANYIKGMKRCGDTQSKARENLYKCIKALLGDVAKDDERYIRICAEMENDSYLEKINDVSNSVIPYQLNEMEMEKILDIQGEFYPELKKNKELILKMLTSKIPYFVGPLNPGSRFAWMSKKAGMENKSVYPWNVEEVVDVDKTAEKFITRMTNYCTYLPCEKVLPKHSIIYQWYEVLTELSQISIDKIKFGKEIRDDIIQNLFLKKVSVSGNNLKEHLKKSGTYNDIDNRVIKGYQGGDNFASSMSSYITFKKIFGEINMSNIDMIEQIIYWLTIFDDKKIIKRKIEQNYKDKINDSQLKRILKIKYTGWGQLSKKFLTGIKGDTGHTIIEMLEEGDLRWKEIPNLIQIINRDEKIKTVIEENRLRYNGEDDLPDIIDKLHTSPANKRGIKQCMKVIEEIIEYMGRKPEQIFIEFAREEGEKVETKKVKDKLDKAIGKLKQEFKDYYNDDIKQELKDNEKRLDEEKVRLYFSQNGKSLYSAPSAGNQLSLDNLNQYDVDHIIPYSISQDDSMDNKVLVKKIENQNKGNRIVSDAFGNKADYKEMQNYWEMLYKAGLISEKKYNNLNKSLDEVFSKGFINRQLVETRQIVKNVANLISDYYDDKIEVIEVKAQLSSYIRNKFTQEKKDDDGFWIENTENAMFFKNRGLNDYHHAHDAYLACIIGLYIQKVYPGWKNELNFKKYRREFEKYYEEQKKYNTKSKKEIYISMLSRFTKNYEKAGWNGEEIIEYMRKIFCYRDVMISKKTEENTGSFYNQTRYPKEKLDGNKKETKLIPLKSGNNLRGKEGLKELSVEKYGGYQGGECAYFVLVKYYTVKNKKKAEEKQWKMEFVGIPTYISYEINKGNINLKQYICDKLKNDTVEILRNKICKYQELMDEEGNRYFLVGPTEVANAKQFVLGSRYQKFNRLYSYINSENWHYIRTDELEKEIDEFFKLLQNKIHNEFKGYIKDIDKVIGANTSKLDIDKKIDYFNEIYKIVQANSSRPAVSKFNIAGISDGLGRKRSLPFKDKIIIVDKSVTGIYERRTCFELENGGNTKSC

SEQ ID NO: 16681 - protein, 1438 aa, unidentified
  REGION 1..1438: note = Cas Enzyme sequence
MNFNRKCSENYCLGLDVGTASVGYCVIDENGKLFKINRKSDNGNNKRNSLWGVRTFKSGEPAKGCRINRSTRRRYSRTHTRILELRKIMSDMVCKVDENFFARLDESFLWKEDKSDKAKSDYILFADKDCTDKDYYEKYQTIYHLRKHLLGTTEKADARFIYLALHHMLKYRGNFLYEGQKFTELDDFKIIYEQFVTSLKEYLEIECNYDQISCEEIEKKLKEKKSKKEKYNEVSEILKKLGLNKKYAEAVANAIIGYKFNVATIMNDKNLCDENGKEMSVSFASADYEEEEQKLSDELGEKFSIIENLKRLYSWYVIKQIMQGSDKNRVNYLSEAMVAKYEKHHAELKELKELFRDYKTQKEYSEFFHKELKAEQKDGKMSPAFLKSFGKIKKGEYVPNYANYIKGMKRCGDTQSKARENLYKCIKALLGDVAKDDERYIRICAEMENDSYLEKINDVSNSVIPYQLNEMEMEKILDIQGEFYPELKKNKELILKMLTSKIPYFVGPLNPGSRFAWMSKKAGMENKSVYPWNVEEVVDVDKTAEKFITRMTNYCTYLPCEKVLPKHSIIYQWYEVLTELSQISIDKIKFGKEIRDDIIQNLFLKKVSVSGENLKEHLKKSGTYNDIDNRVIRGYQGGDNFASSMSSYITFKKIFGEINMSNIDMIEQIIYWLTIFDDKKIIKRKIEQNYKDKINDSQLKRILKIKYTGWGQLSKKFLTGIKGDTGHTIIEMLEEGDLRWKEIPNLIQIINRDEKIKTVIEENRLRYNGEDDLPDIIDKLHTSPANKRGIKQCMKVIEEIIEYMGRKPEQIFIEFAREEGEKVETKKVKDKLDKAIGKLKQEFKDYYNDDIKQELKDNEKRLDEEKVRLYFSQNGKSLYSAPSASNQLSLDNLNQYDVDHIIPYSISQDDSMDNKVLVKKIENQNKGNRIVSDAFGNKADYKEMQNYWEMLYKAGLISEKKYNNLNKSLDEVFSKGFINRQLVETRQIVKNVANLISDYYDDKIEVIEVKAQLSSYIRNKFTQEKKDDDGFWIENTENAMFFKNRGLNDYHHAHDAYLACIIGLYIQKVYPGWKNELNFKKYRREFEKYYEEQKKYNTKSKKEIYISMLNRFTKNYEKAGWNGEEIIEYMRKIFCYRDVMISKKTEENTGSFYNQTRYPKEKLDGNKKETKLIPLKSGNNLRGKEGLKELSVEKYGGYQGGECAYFVLVKYYTVKNKKKTEEKQWKMEFVGIPTYISYEINKGNINLKQYICDKLKNDTVEILRNKICKYQELMDEEGNRYFLVGPTEVANAKQFVLGSRYQKFNRLYSYINSENWHYIRTDELEKEIDEFFKLLQNKIHNEFKGYIKDIDKVIGANTSKLDIDKKIDYFNEIYKIVQANSSRPAVSKFNIAGISDGLGRKRSLPFKDKIIIVDKSVTGIYERRTCFELENGGNTKSC

SEQ ID NO: 16682 - protein, 1438 aa, unidentified
  REGION 1..1438: note = Cas Enzyme sequence
MDFNRKCSENYCLGLDVGTASVGYCVIDENGKLFKINRKGDNGNNKRNSLWGVRTFKSGEPAKGCRINRSTRRRYSRTHTRILELRKIMSDMVCKVDENFFARLDESFLWKEDKSDKAKSDYILFADKDCTDKDYYEKYQTIYHLRKHLLGTTEKADARFIYLALHHMLKYRGNFLYEGQKFTELDDFKIIYEQFLTSLKEYLEIECNYDQISCEEIEKKLKEKKSKKEKYNEVSEILKKLGLDKKYAEAVANAIIGYKFNVATIMNDKNLCDENGKEMSVSFASADYEEEEQKLSDELGEKFSVIENLKRLYSWYVIKQIMQGSDKNRVNYLSEAMAAKYEKHHAELKELKELFRDYKTQKEYSEFFHKELKAEQKDGKMSPAFLKSFGKIKKGEYVPNYANYIKGMKRCGDTQSKARENLYKCIKALLGDVAKDDERYIRICAEMENDSYLEKINDVSNSVIPYQLNEMEMEKILDIQGEFYPELKKNKELILKMLTSKIPYFVGPLNPGSRFAWMSKKAGMENKSVYPWNVEEVVDVDKTAEKFITRMTNYCTYLPCEKVLPKHSIIYQWYEVLTELSQISIDKIKLGKEMRDDIIQNLFLKKVSVSGENLKEHLKKSGTYNDIDNRVIRGYQGGDNFASSMSSYITFKKIFGEINMSNMDMIEQIIYWLTIFDDKKIIKRKIEQNYKDKINDSQLKRILKIKYTGWGQLSKKFLTGIKGDTGHTIIEMLEEGDPRWKELPNLIQIINRDEKIKTVIEENRLRYNGEDDLPDIIDKLHTSPANKRGIKQCMKVIEEIIEYMGRKPEQIFIEFAREEGEKVETKKVKDKLDKAIGKLKQEFKDYYNDDIKQELKDNEKRLDEEKVRLYFSQNGKSLYSAPSAGNQLSLDNLNQYDVDHIIPYSISQDDSMDNKVLVKKIENQNKGNRIVSDAFGNKADYKEMQNYWEMLYKAGLISEKKYNNLNKSLDEVFSKGFINRQLVETRQIVKNVANLISDYYDDKIEVIEVKAQLSSYIRNKFTQEKKDDDGFWIENTENAMFFKNRGLNDYHHAHDAYLACIIGLYIQKVYPGWKNELNFKKYRREFEKYYEEQKKYNTKSKKEIYISMLNRFTKNYEKAGWNGEEIIEYMRKIFCYRDVMISKKTEENTGSFYNQTRYPKEKLDGNKKETKLIPLKSGNNLRGKEGLKELSVEKYGGYQGGECAYFVLVKYYTVKNKKKTEEKQWKMEFVGIPTYISYEINKGNINLKQYICDKLKNNTVEILRNKICKYQELMDEEGNRYFLVGPTEVANAKQFVLGSRYQKFNRLYSYINSENWHYIRTDELEKEIDEFFKLLQNKIHNEFKGYIKDIDKVIGANTSKLDIDKKIDYFNEIYKIVQANSSRPAVSKFNIAGISDGLGRKRSLPFKDKIIIVDKSVTGIYERRTCFELENGGNTKSC

SEQ ID NO: 16683 - protein, 1438 aa, unidentified
  REGION 1..1438: note = Cas Enzyme sequence
MNFNRKCSENYCLGLDVGTASVGYCVIDENGKLFKINRKGDNGNNKRNSLWGVRTFKSGEPAKGCRINRSTRRRYSRTHTRILELRKIMSDMVCKVDENFFARLDESFLWKEDKSDKAKSDYILFADKDCTDKDYYEKYQTIYHLRKHLLGTTEKADARFIYLALHHMLKYRGNFLYEGQKFTELDDFKIIYEQFLTSLKEYLEIECNYDQISCEEIEKKLKEKKSKKEKYNEVSEILKKLGLDKKYAEAVANAIIGYKFNVATIMNDKNLCDENGKEMSVSFASADYEEEEQKLSDELGEKFSVIENLKRLYSWYVIKQIMQGSDKKRVNYLSEAMVAKYEKHHAELKELKELFRDYKTQKEYSEFFHKELKAEQKDGKMSPAFLKSFGKIKKGEYVPNYANYIKGMKRCGDTQSKARENLYKCIKALLGDVAKDDERYIRICAEMENDSYLEKINDVSNSVIPYQLNEMEMEKILDIQGEFYPELKKNKELILKMLTSKIPYFVGPLNPGSRFAWMSKKAGMENKSVYPWNVEEVVDVDKTAEKFITRMTNYCTYLPDEKVLPKHSIIYQWYEVLTELSQISIDKIKLGKEIRDDIIQNLFLKKVSVSGENLKEHLKKSGTYNDIDNRVIRGYQGGDNFASSMSSYITFKKIFGEINMSNIDMIEQIIYWLTIFDDKKIIKRKIEQNYKDKINDSQLKRILKIKYTGWGQLSKKFLTGIKGDTGHTIIEMLEEGDPRWKELPNLIQIINRDEKIKTVIEENRLRYNGEDDLPDIIDKLHTSPANKRGIKQCMKVIEEIIEYMGRKPEQIFIEFAREEGEKVETKKVKDKLDKAIGKLKQEFKDYYNDDIKQELKDNEKRLDEEKVRLYFSQNGKSLYSAPSAGNQLSLDNLNQYDVDHIIPYSISQDDSMDNKVLVKKIENQNKGNRIVSDAFGNKADYKEMQNYWEMLYKAGLISEKKYNNLNKSLDEVFSKGFINRQLVETRQIVKNVANLISDYYDDKIEVIEVKAQLSSYIRNKFTQEKKDDDGFWIENTENAMFFKNRGLNDYHHAHDAYLACIIGLYIQKVYPGWKNELNFKKYRREFEKYYEEQKKYNTKSKKEIYISMLNRFTKNYEKAGWNGEEIIEYMRKIFCYRDVMISKKTEENTGSFYNQTRYPKEKLDGNKKETKLIPLKSGNNLRGKEGLKELSVEKYGGYQGGECAYFVLVKYYTVKNKKKTEEKQWKMEFVGIPTYISYEINKGNINLKQYICDKLKNNTVEILRNKICKYQELMDEEGNRYFLVGPTEVANAKQFVLGSRYQKFNRLYSYINSENWHYIRTDELEKEIDEFFKLLQNKIHNEFKGYIKDIDKVIGANTSKLDIDKKIDYFNEIYKIVQANSSRPAVSKFNIAGISDGLGRKRSLPFKDKIIIVDKSVTGIYERRTCFELENGGNTKSC

SEQ ID NO: 16684 - protein, 1438 aa, unidentified
  REGION 1..1438: note = Cas Enzyme sequence
MNFNRKCSENYCLGLDVGTASVGYCVIDENGKLFKINRKGDNGNNKRNSLWGVRTFKSGEPAKGCRINRSTRRRYSRTHTRILELRKIMSDMVCKVDENFFARLDESFLWKEDKSDKAKSDYILFADKDCTDKDYYEKYQTIYHLRKHLLGTTEKADARFIYLALHHMLKYRGNFLYEGQKFTELDDFKIIYEQFVTSLKEYLEIECNYDQISCEEIEEKLKEKKSKKEKNDEVSEIIKKLGLDKKYAGAVANAIIGYKFNVATIMNDKNLCDENGKEMSVSFASADYEEEEQKLSDELGEKFSVIENLKRLYSWYVIKQIMQGSDKNRVNYLSEAMVVKYEKHHAELKELKELFRDYKTQKEYSEFFHKELKAEQKDGKMSPAFLKSFGKIKKGEYVPNYANYIKGMKRCGDTQSKARENLYKCIKALLGDVAKDDERYIRICAEMENDSYLEKINDVSNSVIPYQLNEMEMEKILDIQGEFYPELKKNKELILKMLTSKIPYFVGPLNPGSRFAWMSKKAGMENKSVYPWNVEEVVDVDKTAEKFITRMTNYCTYLPCEKVLPKHSIIYQWYEVLTELSQISIDKIKLGKEIRDDIIQNLFLKKVSVSGENLKEHLKKSGTYNDIDNRVIRGYQGGDNFASSMSSYITFKKIFGEINMSNIDMIEQIIYWLTIFDDKKIIKRKIEQNYKDKINDSQLKRILKIKYTGWGQLSKKFLTGIKGDTGHTIIEMLEEGDPRWKELPNLIQIINRDEKIKTVIEENRLRYNGEDDLPDIIDKLHTSPANKRGIKQCMKVIEEIIEYMGRKPEQIFIEFAREEGEKVETKKVKDKLDKAIGKLKQEFKDYYNDDIKQELKDNEKRLDEEKVRLYFSQNGKSLYSAPSAGNQLSLDNLNQYDVDHIIPYSISQDDSMDNKVLVKKIENQNKGNRIVSDAFGNKADYKEMQNYWEMLYKAGLISEKKYNNLNKSLDEVFSKGFINRQLVETRQIVKNVANLISDYYDDKIEVIEVKAQLSSYIRNKFTQEKKDDDGFWIENTENAMFFKNRGLNDYHHAHDAYLACIIGLYIQKVYPGWKNELNFKKYRREFEKYYEEQKKYNTKSKKEIYISMLNRFTKNYEKAGWNGEEIIEYMRKIFCYRDVMISKKTEENTGSFYNQTRYPKEKLDGNKKETKLIPLKSGNNLRGKEGLKELSVEKYGGYQGGECAYFVLVKYYTVKNKKKTEEKQWKMEFVGIPTYISYEINKGNINLKQYICDKLKNDTVEILRNKICKYQELMDEEGNRYFLVGPTEVANAKQFVLGSRYQKFNRLYSYINSENWHYIRTDELEKEIDEFFKLLQNKIHNEFKGYIKDIDKVIGANTSKLDIDKKIDYFNEIYKIVQANSSRPAVSKFNIAGISDGLGRKRSLPFKDKIIIVDKSVTGIYERRTCFELENGGNTKSC

SEQ ID NO: 16685 - protein, 1443 aa, unidentified
  REGION 1..1443: note = Cas Enzyme sequence
VEVKLMNFNRKCSENYCLGLDVGTASVGYCVIDENGKLFKINRKGDNGNNKRNSLWGVRTFKSGEPAKGCRINRSTRRRYSRTHTRILELRKIMSDMVCKVDENFFARLDESFLWKEDKSDKAKSDYILFADKDCTDKDYYEKYQTIYHLRKHLLGTTEKADARFIYLALHHMLKYRGNFLYEGQKFTELDDFKIIYEQFLTSLKEYLEIECNYDQISCEEIEEKLKEKKSKKEKNNEVSEILKKLGLDKKYAEAVANAIIGYKFNVATIMNDKNLCDENGKEMSVSFASADYEEEEQKLSDELGEKFSVIENLKRLYSWYVIKQIMQGSDKNRVNYLSEAMVAKYEKHHAELKELKELFRDYKTQKEYSEFFHKELKAEQKDGKMSPAFLKSFGKIKKGEYVPNYANYIKGMKRCGDTQSKARENLYKCIKALVGDVAKDDERYIRICAEMENDSYLEKINDVSNSVIPYQLNEMEMEKILDIQGEFYPELKKNKELILKMLTSKIPYFVGPLNPGSRFAWMSKKAGMENKSVYPWNVEEVVDVDKTAEKFITRMTNYCTYLPCEKVLPKHSIIYQWYEVLTELSQISIDKIKFGKEIRDDIIQNLFLKKVSVSGKNLKEHLKKSGTYNDIDNRVIKGYQGGDNFASSMSSYITFKKIFGEINMSNIDMIEQIIYWLTIFDDKKIIKRKIEQNYKDKINDSQLKRILKIKYTGWGQLSKKFLTGIKGDTGHTIIEMLEEGDLRWKEIPNLIQIINRDEKIKTVIEENRLRYNGEDDLPDIIDKLHTSPANKRGIKQCMKVIEEIIEYMGRKPEQIFIEFAREEGEKVETKKVKDKLDKAIGKLKQEFKDYYNDDIKQELKDNEKRLDEEKVRLYFSQNGKSLYSAPSASNQLSLDNLNQYDVDHIIPYSISQDDSMDNKVLVEKIENQNKGNRIVSDAFGNKADYKEMQNYWEMLYKAGLISEKKYNNLNKSLDEVFSKGFINRQLVETRQIVKNVANLISDYYDDKIEVIEVKAQLSSYIRNKFTQEKKDDDGFWIENTENAMFFKNRGLNDYHHAHDAYLACIIGLYIQKVYPGWKNELNFKKYRREFEKYYEEQKKYNTKSKKEIYISMLSRFTKNYEKAGWNGEEIIEYMRKIFCYRDVMISKKTEENTGSFYNQTRYPKEKLDGNKKETKLIPLKSGNNLRGKEGLKELSVEKYGGYQGGECAYFVLVKYYTVKKKKKTEEKQWKMEFVGIPTYISYEINKGNINLKQYICDKLKNDTVEILRNKICKYQELMDEEGNRYYLVGPTEVANAKQFVLGSRYQKFNRLYSYINSENWHYIRTDELEKEIDEFFKLLQNKIHNEFKGYIKDIDKVIGANTSKLDIDKKIDYFNEIYKIVQANSSRPAVSKFNIAGISDGLGRKRSLPFKDKIIIVDKSVTGIYERRTCFELENGGNTKSC

SEQ ID NO: 16686 - protein, 1438 aa, unidentified
  REGION 1..1438: note = Cas Enzyme sequence
MDFNRKCSENYCLGLDVGTASVGYCVIDENGKLFKINRKGDTGNNKRNSLWGVRTFKSGETAKGCRINRSARRRYSRTHTRILELRKIMSDMVCKVDENFFARLDESFLWKEDKSDKAKSDYILFADKDYTDKEYYKKYQTIYHLRKHLLETTEKADARFIYLALHHMLKYRGNFLYEGQKFTELDDFKIIYEQFVTSLKEYLEIECNYDEISCEEIEKKLKEKKSKKEKNDEVSEILKKLGLNKKYAGAVANAIIGYKFNVAAIMNDKNLCDENGKEMSVSFASADYEEEEQKLSDELGEKFSVIENLKRLYSWYVIKQIMQGSDKNRVNYLSEAMVAKYEKHHAELKELKELFRDYKTQKEYSEFFHKELKAEQKDGKMSPAFLKSFGKIKKGEYVPNYANYIKGMKRCGDTQSKARENLYKCIKALLGDVAKDDERYIRICAEMENDSYLEKINDVSNSVIPYQLNEMEMEKILDVQGRFYPELNDNKELILKMLTSKIPYFVGPLNSGSRFAWMSKKAGMENISVYPWNVEEVVDVDKTAEKFITRMTNYCTYLPCEKVLPKHSIIYQWYEVLTELSQISIDKIKLGKEMRDDIIQNLFLKKVSVSEKNLIEHLKKSGTYSDIDNRVIRGYQGGDNFASSMSSYITFKKIFGEINMSNIDMIEQIIYWLTIFDDKKIIKRKIEQNYRERINDSQLKRIVKIKYTGWGQLSKKFLTGIKGDTGHTIIEMLEEGDPRWKELPNLIQIINKDEKIKTVIEENRLRYNGEDDLPDIIDKLHTSPANKRGIKQCMKVIEEIIEYMGRKPEQIFIEFAREEGEKVETKKVKDKLDKAIGKLKQEFKDYYNDDIKQELKDNEKRLDEEKVRLYFSQNGKSLYSAPSASNQLSLDNLNQYDVDHIIPYSISQDDSMDNKVLVKKIENQNKGNRIVSDAFGNKADYKEMQNYWEMLYKAGLISEKKYNNLNKSLDEVFSKGFINRQLVETRQIVKNVANLISDYYDDKIEVIEVKAQLSSYIRNKFTQEKKDDDGFWIENTENAMFFKNRGLNDFHHAHDAYLACIIGLYIQKVYPGWKNELNFKKYRREFEKYYEEQKKYNTKSKKEIYISMLSRFTKNYEKAGWNGEEIIEYMRKIFCYRDVMISKKTEENTGSFYNQTRYPKEKLDGNKKETKLIPLKSGNNLRGKEGLKELSVEKYGGYQGGECAYFVLVKYYTVKKKKKTEEKQWKMEFVGIPTYISYEINKGNINLKQYVCDKLKNDTVEILRGKICKYQELMDEEGNRYFLVGPTEVANAKQFVLGSRYQKFNRLYSYINSENWHYIRTDELEKEIDEFFKLLQNKIHNEFKGYIKDIDKVIGANTSKLDIDKKIDYFNEIYKIVQANSSRPAVSKFNIAGISDGLGRKRSLPFKDKIIIVDKSVTGIYERRTCFELENGGNTKSC

SEQ ID NO: 16687 - protein, 1105 aa, unidentified
  REGION 1..1105: note = Cas Enzyme sequence
MKYILALDIGIASVGWAVLDKESETVIEAGSNIFPEASAADNQLRRDMRGAKRNNRRLKTRINDFIKLWENNNLSIPQFKSTEIVGLKVRAITEEITLDELYLILYSYLKHRGISYLEDALDDTVSGSSAYANGLKLNAKELETHYPCEIQQERLNTIGKYRGQSQIINENGEVLDLSNVFTIGAYRKEIQRVFEIQKKYHPELTDEFCDGYMLIFNRKRKYYEGPGNEKSRTDYGIFTTQLDANGDYIKKANIFEKLIGKCSVYPDELRAAAASYTAQEYNLLNDLNNLTINGRKLEENEKHEIVERIKNSNTINMRKIISDCMGENIDDFNGARIDESIFHKFEVYNKMRKALLKIGIDITDYSREELDKIGYIMTINTDKEALMEAFQESSIGLPEEVKQCLINMRKTNGALFNKWQSFSLKIMNKLIPEMYAQPKEQMTLLTEMGVTKGTREEFAGLKYIPVDVVSEDIFNPVVRRSVRISFKIFNAVLKKYKALDTIVIEMPRDRNLEEQKKRINDSQKLNEKEMEYIEKKLAVTYGIKLSPADFSSQKQLSLKLKLWNEQDGICLYSGKTIDPNDIINNPQLFEIDHIIPRSISFDDARSNKVLVYRSENQKKGNQTPYYYLNHSHGEWSFEQYKATVMNLSKKKEYAISRKKIQNLLYSDDITKMDVLKGFINRNINDTSYASRLVLNTIQNFFMANDADTKVKVIKGSYTHQMRCNLKLDKNRDESYSHHAVDAMLIGYSELGYEAYHKLQGEFIDFETGEILRKDMWDENMSDEVYADYLYGKKWANIRNEVVKAEKNVKYWHYVMRKSNRGLCNQTIRGTREYDGKQYKINKLDIRTKDGIKVFAKLAFSKKDSDRERLLVYLNDRRTFDDLCKIYEDYSDAANPFVQYEKDTGDIVRKYSKKHNGPRIDKLKYKDGEVGACIDISHKYGFEKGSKKVILESLVPYRMDVYYKEENHSYYLVGVKQSDIKFEKGRNVIDEEAYARILVNEKMIQPGQSRADLENLGFKFKLSFYKNDIIEYEKDGKIYIERLVSRTKPKQRNCIETKPIDRDKHENSKDGRKTIGLSKTKLVKKIRTDILGNKYSCSEEKFTGFC

SEQ ID NO: 16688 - protein, 1118 aa, unidentified
  REGION 1..1118: note = Cas Enzyme sequence
VNYTEKEKLFMKYILALDIGIASVGWAVLDKESETVIEAGSNIFPEASAADNQLRRDMRGAKRNNRRLKTRINDFIKLWEKNNLSIPQFKSTEIVGLKVRAITEEITLDELYLILYSYLKHRGISYLEDALDDTVSGSSAYANGLKLNAKELETHYPCEIQQERLNTIGKYRGQSQIINDNGEVLDLSNVFTIGAYRKEIQRVFEIQKKYHPELTDEFCDGYMLIFNRKRKYYEGPGNEKSRTDYGRFTTKLDANGNYITEDNIFEKLIGKCSVYPDELRAAAASYTAQEYNVLNDLNNLTINGRKLEENEKHEIVERIKSSNTINMRKIISDCMGENIDDFAGARIDKSGKEIFHKFEVYNKMRKALLEIGIDISNYSREELDEIGYIMTINTDKEAMMEAFQKSWIDLSDDVKQCLINMRKTNGALFNKWQSFSLKIMNELIPEMYAQPKEQMTLLTEMGVTKGTQEEFAGLKYIPVDVVSEDIFNPVVRRSVRISFKILNAVLKKYKALDTIVIEMPRDRNSEEQKKRINDSQKLNEKEMEFIEKKLAVTYGIKLSPSDFSSQKQLSLKLKLWNEQDGICLYSGKTIDPNDIINNPQLFEIDHIIPRSISFDDARSNKVLVYRSENQKKGNQTPYYYLTHSHSEWSFEQYKATVMNLSKKKEYAISRKKIQNLLYSEDITKMDVLKGFINRNINDTSYASRLVLNTIQNFFMANDAYTKVKVIKGSYTHQMRCNLKLDKNRDESYSHHAVDAMLIGYSELGYEAYHKLQGEFIDFETGEILRKDMWDENMSDEVYADYLYGKKWANIRNEVVKAEKNVKYWHYVMRKSNRGLCNQTIRGTREYDGKQYKINKLDIRTKEGIKVFAKLAFSKKDSDRERLLVYLNDRRTFDDLCKIYEDYSDAANPFVQYEKETGDIVRKYSKKHNGPRIDKLKYKDGEVGACIDISHKYGFEKGSKKVILESLVPYRMDVYYKEENHSYYLVGVKQSDIKFEKGRNVIDEEAYARILVNEKMIQPGQSRADLENLGFKFKLSFYKNDIIEYEKDGKIYTERLVSRTMPKQRNYIETKPINRDKHEDSKDGRKIIGLSKTKLVKKIRTDILGNKYSCSEEKFTSFC

SEQ ID NO: 16689 - protein, 1108 aa, unidentified
  REGION 1..1108: note = Cas Enzyme sequence
MKYILALDIGIASVGWAVLDKESETVIEAGSNIFPEASAADNQLRRDMRGAKRNNRRLKTRINDFIKLWEKNNLSIPQFKSTEIVGLKVRAITEEITLDELYLILYSYLKHRGISYLEDALDDTVSGSSAYANGLKLNAKELETHYPCEIQQERLNTIGKYRGQSQIINDNGEVLDLSNVFTIGAYRKEIQRVFEIQKKYHPELTDEFCDGYMLIFNRKRKYYEGPGNEKSRTDYGRFTTKLDANGNYITEDNIFEKLIGKCSVYPDELRAAAASYTAQEYNVLNDLNNLTINGRKLEENEKHEIVERIKSSNTINMRKIISDCMGENIDDFAGARIDKSGKEIFHKFEVYNKMRKALLEIGIDISNYSREELDEIGYIMTINTDKEAMMEAFQKSWIDLSDDVKQCLINMRKTNGALFNKWQSFSLKIMNELIPEMYAQPKEQMTLLTEMGVTKGTQEEFAGLKYIPVDVVSEDIFNPVVRRSVRISFKILNAVLKKYKALDTIVIEMPRDRNSEEQKKRINDSQKLNEKEMEFIEKKLAVTYGIKLSPSDFSSQKQLSLKLKLWNEQDGICLYSGKTIDPNDIINNPQLFEIDHIIPRSISFDDARSNKVLVYRSENQKKGNQTPYYYLTHSHSEWSFEQYKATVMNLSKKKEYAISRKKIQNLLYSEDITKMDVLKGFINRNINDTSYASRLVLNTIQNFFMANDAYTKVKVIKGSYTHQMRCNLKLDKNRDESYSHHAVDAMLIGYSELGYEAYHKLQGEFIDFETGEILRKDMWDENMSDEVYADYLYGKKWANIRNEVVKAEKNVKYWHYVMRKSNRGLCNQTIRGTREYDGKQYKINKLDIRTKEGIKVFAKLAFSKKDSDRERLLVYLNDRRTFDDLCKIYEDYSDAANPFVQYEKETGDIVRKYSKKHNGPRIDKLKYKDGEVGACIDISHKYGFEKGSKKVILESLVPYRMDVYYKEENHSYYLVGVKQSDIKFEKGRNVIDEEAYARILVNEKMIQPGQSRADLENLGFKFKLSFYKNDIIEYEKDGKIYTERLVSRTMPKQRNYIETKPINRDKHEDSKDGRKIIGLSKTKLVKKIRTDILGNKYSCSEEKFTSFC

SEQ ID NO: 16690 - protein, 1104 aa, unidentified
  REGION 1..1104: note = Cas Enzyme sequence
MKYILALDIGIASVGWAVLDKENETVIEAGSNIFPEASAAENQLRRDMRGSKRNNRRLKTRINDFIKLWEKNNLSIPQFKSTEIVGLKVRAITEEITLDELYLILYSYLKHRGISYLEDALDDTVSGSSSYANGLKLNAKELETHYPCEIQQERLNTIGKYRGQSQIINDNGEVLDLSNVFTIGAYRKEIQRVFEIQKKYHPELTDEFCDGYMLIFNRKRKYYEGPGNEKSRTDYGRFTTKLDADGNYITEDNIFEKLIGKCSVYPDELRAAAASYTAQEYNLLNDLNNLTINGRKLEENEKHEIVERIKSSNTINMRKIISDCMGENIDDFAGARIDKSGKEIFHKFEVYNKMRKALLEIGIDISNYSREELDEIGYIMTINTDKEAMMEAFQKSWIDLSDDVKQCLINMRKTNGALFNKWQSFSLKIMNELIPEMYAQPKEQMTLLTEMGVTKGTKEEFSGLKYIPVDVVSEDIFNPVVRRSVRISFKILNAVLKKYKALDTIVIEMPRDRNSEEQKKRINDSQKLNEKEMEYIEKKLAVTYGIKLSPSDFSSQKQLSLKLKLWNEQDGICLYSGKTIDPNDIINNPQLFEIDHIIPRSISFDDARSNKVLVYRSENQKKGNQTPYYYLTHSHSEWSFEQYKATVMNLSKKKEYAISRKKIQNLLYSEDITKMDVLKGFINRNINDTSYAARLVLNTIQNFFMANDADTKVKVIKGSYTHQMRCNLKLDKNRDESYSHHAVDAMLIGYSELGYEAYHKLQGEFIDFETGEILRKDMWDENMSDEVYADYLYGKKWANIRNEVVKAEKNVKYWHYVMRKSNRGLCNQTIRGTREYDGKQYKINKLDIRTKEGIKVFAKLAFSKKDSDRERLLVYLNDRRTFDDLCKIYEDYSDAANPFVQYEKETGDIVRKYSKKHNGPRIDKLKYKDGEVGACIDISHKYGFEKGSKKVILESLVPYRMDVYYKEENHLYYLVGVKQSDIKFEKGRNVIDEEAYARILVNEKMIQPGQSRADLENLGFKFKLSFYKNDIIEYEKDGKIYTERLVSRTMPKKRNYIETKPIDKAKFEKQNLVGLGKTKFIKKYRYDILGNKHSCSEEKFTSFC

SEQ ID NO: 16691 - protein, 1114 aa, unidentified
  REGION 1..1114: note = Cas Enzyme sequence
MNYTEKEKLFMKYILALDIGIASVGWAVLDKESETVIEAGSNIFPEASAADNQLRRDMRGAKRNNRRLKTRINDFIKLWEKNNLSIPQFKSTEIVGLKVRAITEEITLDELYLILYSYLKHRGISYLEDALDDTVSGSSAYDNGLKLNAKELETHYPCEIQQERLNTIGKYRGQSQIINENGEVLDLSNVFTIGAYRKEIQRVFEIQKKYHPELTDEFCDGYMLIFNRKRKYYEGPGNEKSRTDYGIFTTQLDANGDYIKKANIFEKLIGKCSVYPDELRAAAASYTAQEYNLLNDLNNLTINGRKLEENEKHKIVERIKNSNTINMRKIISDCMGENIDDFNGARIDESIFHKFEVYNKMRKALLKIGIDITDYSREELDKIGYIMTINTDKEALMEAFQESSIGLPEEVKQCLINMRKTNGALFNKWQSFSLKIMNKLIPEMYAQPKEQMTLLTEMGVTKGTREEFAGLKYIPVDVVSEDIFNPVVRRSVRISFKIFNAVLKKYKALDTIVIEMPRDRNLEEQKKRIKDSQKLNEKEMEYIEKKLAVTYGIKLSPSDFSSQKQLSLKLKLWNEQDGICLYSGKTIDPNDIINNHQLFEIDHIIPRSISFDDARSNKVLVYRSENQKKGNQTPYYYLNHSHGEWSFEQYKATVMNLSKKKEYAISRKKIQNLLYSDDITKMDVLKGFINRNINDTSYASRLVLNTIQNFFIANKADTKVKVIKGSYTHQMRCNLKLDKNRDESYSHHAVDAMLIGYSELGYEAYHKLQGEFIDFETGEILRKDMWDENMSDEVYADYLYGKKWANIRNEVVKAEKNVKYWHYVMRKSNRGLCNQTIRGTREYDGKQYKINKLDIRTKEGINVFSKLAFSKKDSDRERLLVYLNDRRTFDDLCKIYEDYSDAANPFVQYEKETGDIVRKYSKKHNGPRIDKLKYKDGQVGSCIDISHKYGFEKGSKKVILESLVPYRMDVYYKEENHSYYLVGVKQSDIKFEKGRNVIDEEAYARILVNEKMIQPGQSRTDLENLGFKFKLSFYKNDIIEYEKDGKIYTERLVSRTKNQRNYIETKPIDRDKHENSKDGRKIIGLSKTKLVKKVRIDILGNKYSCSEEKFTNFC

SEQ ID NO: 16692 - protein, 1108 aa, unidentified
  REGION 1..1108: note = Cas Enzyme sequence
MKYILALDIGIASVGWAILDKESETVIEAGSNIFPEASAADNQLRRDMRGAKRNNRRLKTRINDFIKLWENNNLSIPQFKSTEIVGLKVRAITEEITLDELYLILYSYLKHRGISYLEDALDDTVSGSSAYANGLKLNAKELETHYPCEIQQERLNTIGKYRGQSQIINENGEVLDLSNVFTIGAYRKEIQRVFEIQKKYHHELTDEFCDGYMLIFNRKRKYYEGPGNEKSRTDYGRFTTKLDANGNYITEDNIFEKLIGKCSVYPDELRAAAASYTAQEYNVLNDLNNLTINGRKLEENEKHEIVERIKSSNTINMRKIISDCMGENIDDFAGARIDKSGKEIFHKFEVYNKMRKALLEIGIDISNYSREELDEIGYIMTINTDKEAMMEAFQKSWIDLSDDVKQCLINMRKTNGALFNKWQSFSLKIMNELIPEMYAQPKEQMTLLTEMGVTKGTKEEFAGLKYIPVDVVSEDIFNPVVRRSVRISFKILNAVLKKYKALDTIVIEMPRDRNSEEQKKRINDSQKLNEKEMEYIEKKLAVTYGIKLSPSDFSSQKQLSLKLKLWNEQDGICLYSGKTIDPNDIINNPQLFEIDHIIPRSISFDDARSNKVLVYRSENQKKGNQTPYYYLTHSHSEWSFEQYKATVMNLSKKKEYAISRKKIQNLLYSEDITKMDVLKGFINRNINDTSYASRLVLNTIQNFFMANEADTKVKVIKGSYTHQMRCNLKLDKNRDESYSHHAVDAMLIGYSELGYEAYHKLQGEFIDFETGEILRKDMWDENMSDEVYADYLYGKKWANIRNEVVKAEKNVKYWHYVMRKSNRGLCNQTIRGTREYDGKQYKINKLDIRTKEGIKVFAKLAFSKKDSDRERLLVYLNDRRTFDDLCKIYEDYSDAANPFVQYEKETGDIVRKYSKKHNGPRIDKLKYKDGEVGACIDISHKYGFEKGSKKVILESLVPYRMDVYYKEENHSYYLVGVKQSDIKFEKGRNVIDEEAYARILVNEKMIQPGQSRADLENLGFKFKLSFYKNDIIEYEKDGKIYTERLVSRTMPKQRNYIETKPINRDKHEDSKDGRKIIGLSKTKLVKKIRTDILGNKYSCSEEKFTSFC

SEQ ID NO: 16693 - protein, 1104 aa, unidentified
  REGION 1..1104: note = Cas Enzyme sequence
MKYILALDIGIASVGWAILDKESETVIEAGSNIFPEASAADNQLRRDMRGAKRNNRRLKTRINDFIKLWENNNLSIPQFKSTEIVGLKVRAITEEITLDELYLILYSYLKHRGISYLEDALDDTVSGSSAYANGLKLNAKELETHYPCEIQQERLNTIGKYRGQSQIINENGEVLDLSNVFTIGAYRKEIQRVFEIQKKYHPELTDEFCDGYMLIFNRKRKYYEGPGNEKSRTDYGRFTTKLDANGNYITEDNIFEKLIGKCSVYPDELRAAAASYTAQEYNVLNDLNNLTINGRKLEENEKHEIVERIKSSNTINMRKIISDCMGENIDDFAGARIDKSGKEIFHKFEVYNKMRKALLEIGIDISNYSREELDEIGYIMTINTDKEAMMEAFQKSWIDLSDDVKQCLINMRKTNGALFNKWQSFSLKIMNELIPEMYAQPKEQMTLLTEMGVTKGTKEEFAGLKYIPVDVVSEDIFNPVVRRSVRISFKILNAVLNKYKALDTIVIEMPRDRNSEEQKKRINDSQKLNEKEMEYIEKKLAVTYGIKLSPSDFSSQKQLSLKLKLWNEQDGICLYSGKTIDPNDIINNPQLFEIDHIIPRSISFDDARSNKVLVYRSENQKKGNQTPYYYLTHSHSEWSFEQYKATVMTLSKKKEYAISRKKIQNLLYSEDITKMDVLKGFINRNINDTSYASRLVLNTIQNFFMANDADTKVKVIKGSYTHQMRCNLKLDKNRDESYSHHAVDAMLIGYSELGYEAYHKLQGEFIDFETGEILRKDMWDKNMSDEVYADYLYGKKWANIRNEVVKAEKNVKYWHYVMRKSNRGLCNQTIRGTREYDGKQYKINKLDIRTKEGIKVFAKLAFSKKDSDRERLLVYLNDRRTFDDLCKIYEDYSDAANPFVQYEKETGDIVRKYSKKHNGPRIDKLKYKDGEVGACIDISHKYGFEKGSKKVILESLVPYRMDVYYKEENHSYYLVGVKQSDIKFEKGRNVIDEEAYARILVNEKMIQPGQSRTDLENHGFKFKLSFYKNDVIEYEKDGKIYTERLVSRTMPKQRNYIETKPIDKAKFEKQNLVGLGKTKFIKKYRYDILGNKYSCSEEKFTSFC

SEQ ID NO: 16694 - protein, 1104 aa, unidentified
  REGION 1..1104: note = Cas Enzyme sequence
MKYILALDIGIASVGWAVLDKESETVIEAGSNIFPEASAADNQLRRDMRGAKRNNRRLKTRINDFIKLWENNNLSIPQFKSTEIVGLKVRAITEEITLDELYLILYSYLKHRGISYLEDALDDTVSGSSAYANGLKLNAKELETHYPCEIQQERLNTIGKYRGQSQIINENGEVLDLSNVFTIGAYRKEIQRVFEIQKKYHPELTDEFCDGYMLIFNRKRKYYEGPGNEKSRTDYGRFTTKLDANGNYITEDNIFEKLIGKCSVYPDELRAAAASYTAQEYNVLNDLNNLTINGRKLEENEKHEIVERIKSSNTINMRKIISDCMGENIDDFAGARIDKSGKEIFHKFEVYNKMRKALLEIGIDISNYSREELDEIGYIMTINTDKEAMMEAFQKSWIDLSDDVKQCLINMRKTNGALFNKWQSFSLKIMNELIPEMYAQPKEQMTLLTEMGVTKGTQEEFAGLKYIPVDVVSEDIFNPVVRRSVRISFKILNAVLKKYKALDTIVIEMPRDRNSEEQKKRINDSQKLNEKEMEYIEKKLAVTYGIKLSPSDFSSQKQLSLKLKLWNEQDGICLYSGKTIDPNDIINNPQLFEIDHIIPRSISFDDARSNKVLVYRSENQKKGNQTPYYYLTHSHSEWSFEQYKATVMNLSKKKEYAISRKKIQNLLYSEDITKMDVLKGFINRNINDTSYASRLVLNTIQNFFMANEADTKVKVIKGSYTHQMRCNLKLDKNRDESYSHHAVDAMLIGYSELGYEAYHKLQGEFIDFETGEILRKDMWDENMSDEVYADYLYGKKWANIRNEVVKAEKNVKYWYYVMRKSNRGLCNQTIRGTREYDGKQYKINKLDIRTKEGIKVFAKLAFSKKDSDRERLLVYLNDRRTFDDLCKIYEDYSDAANPFVQYEKETGDIVRKYSKKHNGPRIDKLKYKDGEVGACIDISHKYGFEKGSKKVILESLVPYRMDVYYKEENHSYYLVGVKQSDIKFEKGRNVIDEEAYARILVNEKMIQPGQSRIDLENHGFKFKLSFYKNDVIEYEKDGKIYTERLVSRTMPKQRNYIETKPIDKAKFEKQNLVGLGKTKFIKKYRYDILGNKYSCSEEKFTSFC

SEQ ID NO: 16695 - protein, 1104 aa, unidentified
  REGION 1..1104: note = Cas Enzyme sequence
MKYILALDIGIASVGWAVLDKESETVIEAGSNIFPEASAADNQLRRDMRGAKRNNRRLKTRINDFIKLWEKNNLSIPQFKSTEIVGLKVRAITEEITLDELYLILYSYLKHRGISYLEDALDDTVSGSSAYDNGLKLNAKELETHYPCEIQQERLNTIGKYRGQSQIINENGEVLDLSNVFTIGAYRKEIQRVFEIQKKYHPELTDEFCDGYMLIFNRKRKYYEGPGNEKSRTDYGIFTTQLDANGDYIKKANIFEKLIGKCSVYPDELRAAAASYTAQEYNLLNDLNNLTINGRKLEENEKHKIVERIKNSNTINMRKIISDCMGENIDDFNGARIDESIFHKFEVYNKMRKALLKIGIDITDYSREELDKIGYIMTINTDKEALMEAFQESSIGLPEEVKQCLINMRKTNGALFNKWQSFSLKIMNKLIPEMYAQPKEQMTLLTEMGVTKGTREEFAGLKYIPVDVVSEDIFNPVVRRSVRISFKIFNAVLKKYKALDTIVIEMPRDRNLEEQKKRIKDSQKLNEKEMEYIEKKLAVTYGIKLSPSDFSSQKQLSLKLKLWNEQDGICLYSGKTIDPNDIINNHQLFEIDHIIPRSISFDDARSNKVLVYRSENQKKGNQTPYYYLNHSHGEWSFEQYKATVMNLSKKKEYAISRKKIQNLLYSDDITKMDVLKGFINRNINDTSYASRLVLNTIQNFFIANKADTKVKVIKGSYTHQMRCNLKLDKNRDESYSHHAVDAMLIGYSELGYEAYHKLQGEFIDFETGEILRKDMWDENMSDEVYADYLYGKKWANIRNEVVKAEKNVKYWHYVMRKSNRGLCNQTIRGTREYDGKQYKINKLDIRTKEGINVFSKLAFSKKDSDRERLLVYLNDRRTFDDLCKIYEDYSDAANPFVQYEKETGDIVRKYSKKHNGPRIDKLKYKDGQVGSCIDISHKYGFEKGSKKVILESLVPYRMDVYYKEENHSYYLVGVKQSDIKFEKGRNVIDEEAYARILVNEKMIQPGQSRTDLENLGFKFKLSFYKNDIIEYEKDGKIYTERLVSRTKNQRNYIETKPIDRDKHENSKDGRKIIGLSKTKLVKKVRIDILGNKYSCSEEKFTNFC

SEQ ID NO: 16696 - protein, 1104 aa, unidentified
  REGION 1..1104: note = Cas Enzyme sequence
MKYILALDIGIASVGWAVLDKESENVIEAGSNIFPEASAADNQLRRDMRGAKRNNRRLKTRINDFIKLWENNNLSIPQFKSTEIVGLKVRAITEEITLDELYLILYSYLKHRGISYLEDALDDTVSGSNAYANGLKLNAKELETHYPCEIQQERLNTIGKYRGQSQIINDNGEVLDLSNVFTIGAYRKEIQRVFEIQKKYHPELTDEFCDGYMLIFKRKRKYYEGPGNEKSRTDYGIFTTQLDANGDYIKKDNIFEKLIGKCSVYPEELRAAAASYTAQEYNLLNDLNNLTINGRKLEENEKHEIVERIKSSNTINMRKIISDCMGENIDDFAGARIDKSGKEIFHKFEVYNKMRKALLEIGIDISNYSREELDKIGYIMTINTDKEALMEAFQESWIGLPEEVKQCFIDMRKSNGALFNKWQSFSLKIMNELIPEMYAQPKEQMTLLTEMGVTKGTQEEFAGLKYIPVDVVSEDIFNPVVRRSVRISFKILNAVLKKYKALDTIVIEMPRDRNSEEQKKRINDSQKLNEKEMEYIEKKLAVTYGIKLSPSDFSSQKQLSLKLKLWNEQDGRCLYSGKTIDPNDIINNPQLFEIDHIIPRSISFDDARSNKVLVYRSENQKKGNQTPYYYLTHSHSEWSFEQYKATVMNLSKKKEYAISRKKIQNLLYSEDITKMDVLKGFINRNINDTSYASRLVLNTIQNFFMANDADTKVKVIKGSYTHQMRSNLKLDKNRDESYSHHAVDAMLIGYSELGYEAYHKLQGEFIDFETGEILRKDMWDENMSDEVYADYLYGKKWANIRNEVVKAEKNVKYWHYVMRKSNRGLCNQTIRGTREYDGKQYKINKLDIRTKEGIKVFAKLAFSKKDSDRERLLVYLNDRRTFDDLCKIYEDYSDAANPFVQYEKETGDIVRKYSKKHNGPRIDKLKYKDGEVGACIDISHKYGFEKGSKKVILESLVPYRMDVYYKEENHSYYLVGVKQSDIKFEKGRNVIDEEAYARILVNEKMIQPGQSRIDLENHGFKFKLSFYKNDVIEYEKDGKIYTERLVSRTMPKQRNYIETKPIDKAKFEKQNLVGLGKTKFIKKYRYDILGNKYSCSEEKFTSFC

SEQ ID NO: 16697 - protein, 1108 aa, unidentified
  REGION 1..1108: note = Cas Enzyme sequence
MKYILALDIGIASVGWAVLDKESETVIEAGSNIFPEASAADNQLRRDMRGAKRNNRRLKTRINDFIKLWEKNNLSIPQFKSTEIVGLKVRAITEEITLDELYLILYSYLKHRGISYLEDALDDTVSGSSAYANGLKLNAKELETHYPCEIQQERLNTIGKYRGQSQIINDNGEVLDLSNVFTIGAYRKEIQRVFEIQKKYHPELTDEFCDGYMLIFNRKRKYYEGPGNEKSRTDYGRFTTKLDANGNYITEDNIFEKLIGKCSVYPDELRAAAASYTAQEYNLLNDLNNLTINGRKLEENEKHEIVERIKSSNTINMRKIISDCMGENIDDFAGARIDKSGKEIFHKFEVYNKMRKALLEIGIDISNYSREELDEIGYIMTINTDKEAMMEAFQKSWIDLSDDVKQCLINMRKTNGALFNKWQSFSLKIMNELIPEMYAQPKEQMTLLTEMGVTKGTQEEFAGLKYIPVDVVSEDIFNPVVRRSVRISFKILNAVLKKYKALDTIVIEMPRDRNSEEQKKRINDSQKLNEKEMEYIEKKLAVTYGIKLSPSDFSSQKQLSLKLKLWNEQDGICLYSGKTIDPNDIINNPQLFEIDHIIPRSISFDDARSNKVLVYRSENQKKGNQTPYYYLTHSHSEWSFEQYKATVMNLSKKKEYAISRKKIQNLLYSEDITKMDVLKGFINRNINDTSYASRLVLNTIQNFFMANDAYTKVKVIKGSYTHQMRCNLKLDKNRDESYSHHAVDAMLIGYSELGYEAYHKLQGEFIDFETGEILRKDMWDENMSDEVYADYLYGKKWANIRNEVVKAEKNVKYWHYVMRKSNRGLCNQTIRGTREYDGKQYKINKLDIRTKEGIKVFAKLAFSKKDSDRERLLVYLNDRRTFDDLCKIYEDYSDAANPFVQYEKETGDIVRKYSKKHNGPRIDKLKYKDGEVGACIDISHKYGFEKGSKKVILESLVPYRMDVYYKEENHSYYLVGVKQSDIKFEKGRNVIDEEAYARILVNEKMIQPGQSRADLENLGFKFKLSFYKNDIIEYEKDGKIYTERLVSRTMPKQRNYIETKPINRDKHEDSKDGRKIIGLSKTKLVKKIRTDILGNKYSCSEEKFTSFC

SEQ ID NO: 16698 - protein, 1108 aa, unidentified
  REGION 1..1108: note = Cas Enzyme sequence
MKYILALDIGIASVGWAILDKESETVIEAGSNIFPEASAADNQLRRDMRGAKRNNRRLKTKINDFIKLWENNNLSIPQFKSTEIVGLKVRAITEEITLDELYLILYSYLKHRGISYLEDALDDTVSGSSAYANGLKLNAKELETHYPCEIQQERLNTIGKYRGQSQIINENGEVLDLSNVFTIGAYRKEIQRVFEIQKKYHPELTDEFCDGYMLIFNRKRKYYEGPGNEKSRTDYGRFTTKLDANGNYITEDNIFEKLIGKCSVYPDELRAAAASYTAQEYNVLNDLNNLTINGRKLEENEKHEIVERIKSSNTINMRKIISDCMGENIDDFAGARIDKSGKEIFHKFEVYNKMRKALLEIGIDISNYSREELDEIGYIMTINTDKEAMMEAFQKSWIDLSDDVKQCLINMRKTNGALFNKWQSFSLKIMNELIPEMYAQPKEQMTLLTEMGVTKGTQEEFAGLKYIPVDVVSEDIFNPVVRRSVRISFKILNAVLKKYKALDTIVIEMPRDRNSEEQKKRINDSQKLNEKEMEYIEKKLAVTYGIKLSPSDFSSQKQLSLKLKLWNEQDGICLYSGKTIDPNDIINNPQLFEIDHIIPRSISFDDARSNKVLVYRSENQKKGNQTPYYYLTHSHSEWSFEQYKATVMNLSKKKEYAISRKKIQNLLYSEDITKMDVLKGFINRNINDTSYASRLVLNTIQNFFMANEADTKVKVIKGSYTHQMRCNLKLDKNRDESYSHHAVDAMLIGYSELGYEAYHKLQGEFIDFETGEILRKDMWDENMSDEVYADYLYGKKWANIRNEVVKAEKNVKYWHYVMRKSNRGLCNQTIRGTREYDGKQYKINKFDIRTKEGIKVFAKLAFSKKDSDRERLLVYLNDRRTFDDLCKIYEDYSDAANPFVQYEKETGDIIRKYSKKHNGPRIDKLKYKDGEVGACIDISHKYGFEKGSKKVILESLVPYRMDVYYKEENHSYYLVGVKQSDIKFEKGRNVIDEEAYARILVNEKMIQPGQSRADLENLGFKFKLSFYKNDIIEYEKDGKIYTERLVSRTMPKQRNYIETKPINRDKHEDSKDGRKIIGLSKTKLVKKIRTDILGNKYSCSEEKFTSFC

SEQ ID NO: 16699 - protein, 1101 aa, unidentified
  REGION 1..1101: note = Cas Enzyme sequence
MGINIGLDIGIASVGLAVVDSDTGNVLETAADLFNCAEVSENVKRREFRQARRLKRRQHIRLEDFKKLWGAEGFIIPKNINLYSLELKVRALQEKITMDELYVVLYNSLKHRGISYLDDFEESTEGGSEYQKGIQINQQELETKYPCQIQLERFKKYGAYRGQIIVEENGDKTVLSNVYTFSAYKKEIDTILEAQSKYYPELTNDFIEKYQKIFGRKRKYYEGPGSEKSRTDYGIYTTKIDESNGNYIKEDNIFEKLIGKCSVFPEEMRAAAASYSAQEFNLLNDLNNLTIGGRKLEEEEKRQIVETIKNSQRVNVEKIICTVSGENAETIEGARIKDDKHIYHSFEAYRKMKKALSEAGKNIEEYERAELDEIGRILTLNTEHESIEKELIDSGIGMSKEEIDSLINLRKEDGKPFSKWHSFSLKLLNILIPEMYEQPKEQMTLLSEMKLLKSSDELYKGLKYIPQEAMTNEIYNPVVVRSARIAVKALNAVIKKYGNPELVVIEMPRDKNDEEQKQRIKQEQSRNEKELKEIIDKIKSEYGIQVTSAHFRNHKQLALKLKLWNEQEGICLYSGKQIDINQLLTASDMYEIDHIIPLSISFNDSRNNKVLVYATENQEKGQTTPYKYLTMLHRGWGWNEYVAKVNELHRKKNINYKKVENLLFMKDITKIDVLKGFINRNLNDTRYASRVVLNTLQSFFRANETGTKVSVICGAYTSQMRKNMRLDKNREESFAHHAVDALLIVYSQMGYNTFRKLQGEFIDFETGEILNPEMWKENMTDEVYEKCLYGQEGQKWLEIRNNIKETEKHVKYWHKVDKKCNRALCNQTIYGTRNLDGGVYKISKIKDIRSIDGYKKFAEMIKKGKQNSFLMARNDPKTFASLLEICERYKDAKNPFVQYEKETGDWVRRYAKKNNGPKIVSLKYVDGEVNSCIDVSHKYGYERNSRKVILASLNPYRMDVYYNKNDSKYYLIGIKQSDVKFEAGKSVIDEEAYTRILQQEKMLQEGQGRADLEKLGYEFRLSFYRNNIIQYEKGGEIFTERFQSRTMPAQRNYIETKPVDRAKFNRQNLVGLGKTTSIKKVHVDILGNQYITEKEIFSFEC

SEQ ID NO: 16700 - protein, 1101 aa, unidentified
  REGION 1..1101: note = Cas Enzyme sequence
MGINIGLDIGIASVGLAVVDSDTGNVLETVADLFNCAEVSENVKRREFRQARRLKRRQHTRLEDFKKLWVGMGFIIPENINIYPIELKVRALRGEITMDELYVVLYNSLKHRGISYLDDFEGTVEGGSEYQKGIQINQQQLETKYPCEIQLERIKKYGAYRGNITVEENGEKAVLSNVYTFSAYEKEIAAILDSQKKYHSELTNDFIEKYQKIFGRKRKYYEGPGSEKSRTDYGIYTTKIDESNGNYIKEDNIFEKLIGKCSVFPEEMRAAAASYSAQEFNLLNDLNNLTIGGRKLEEEEKRQIVETIKNSQRVNVEKIICMVSGENAETIEGARIKDDKHIYHSFEAYRKMKKALFEAGKNIEEYERAELDEIGRILTLNTEHESIEKELIDSGIGMSKEEIDSLINLRKEDGKPFSKWHSFSLKLLNILIPEMYEQPKEQMTLLSEMKLLKSSDELYKGLKYIPQEAMTNEIYNPVVVRSARIAVKALNAVIKKYGNPELVVIEMPRDKNDEEQKQRIKQEQSRNEKELKEIIDKIKSEYGIQVTSAHFRNHKQLALKLKLWNEQEGICLYSGKQIDINQLLTASDMYEIDHIIPLSISFNDSRNNKVLVYATENQEKGQTTPYKYLTMLHRGWGWNEYVAKVNELHRKKNINYKKVENLLFMKDITKIDVLKGFINRNLNDTRYASRVVLNTLQSFFRANETGTKVSVICGAYTSQMRKNMRLDKNREESFAHHAVDALLIVYSQMGYNTFRKLQGEFIDFETGEILNPEMWKENMTDEVYEKCLYGQEGQKWLEIRNNIKETEKHVKYWHKVDKKCNRALCNQTIYGTRNLDGGVYKISKIKDIRSIDGYKKFAEMIKKGKQNSFLMARNDPKTFASLLEICERYKDAKNPFVQYEKETGDWVRRYAKKNNGPKIVSLKYVDGEVNSCIDVSHKYGYERNSRKVILASLNPYRMDVYYNKNDSKYYLIGIKQSDVKFEAGKSVIDEEAYTRILQQEKMLQEGQGRADLEKLGYEFRLSFYRNNIIQYEKGGEIFTERFQSRTMPTQRNYIETKPVDRAKFNRQNLVGLGKTTSIKKVHVDILGNQYITEKEIFSFEC

SEQ ID NO: 16701 - protein, 1097 aa, unidentified
  REGION 1..1097: note = Cas Enzyme sequence
MGINIGLDIGIASVGLAVVDSDTGNVLETVADLFNCAEVSENVKRREFRQARRLKRRQHTRLEDFKKLWVGMGFIIPENINIYPIELKVRALRGEITMDELYVVLYNSLKHRGISYLDDFEGTVEGGSEYQKGIQINQQQLETKYPCEIQLERIKKYGAYRGNITVEENGEKAVLSNVYTFSAYEKEIAAILDSQKKYHSELTNDFIEKYQKIFGRKRKYYEGPGSEKSRTDYGIYTTKIDESNGNYIKEDNIFEKLIGKCSVFPEEMRAAAASYSAQEFNLLNDLNNLTIGGRKLEEEEKRQIVETIKNSQRVNVEKIICMVSGENAETIEGARIKDDKHIYHSFEAYRKMKKALFEAGKNIEEYERAELDEIGRILTLNTEHESIEKELIGMSKEEIDSLINLRKEDGKPFSKWHSFSLKLLNILIPEMYEQPKEQMTLLSEMKLLKSSDELYKGLKYIPQEAMTNEIYNPVVVRSARIAVKALNAVIKKYGNPELVVIEMPRDKNDEEQKQRIKQEQSRNEKELKEIIDKIKSEYGIQVTSAHFRNHKQLALKLKLWNEQEGICLYSGKQIDINQLLTASDMYEIDHIIPLSISFNDSRNNKVLVYATENQEKGQTTPYKYLTMLHRGWGWNEYVAKVNELHRKKNINYKKVENLLFMKDITKIDVLKGFINRNLNDTRYASRVVLNTLQSFFRANETGTKVSVICGAYTSQMRKNMRLDKNREESFAHHAVDALLIVYSQMGYNTFRKLQGEFIDFETGEILNPEMWKENMTDEVYEKCLYGQEGQKWLEIRNNIKETEKHVKYWHKVDKKCNRALCNQTIYGTRNLDGGVYKISKIKDIRSIDGYKKFAEMIKKGKQNSFLMARNDPKTFASLLEICERYKDAKNPFVQYEKETGDWVRRYAKKNNGPKIVSLKYVDGEVNSCIDVSHKYGYERNSRKVILASLNPYRMDVYYNKNDSKYYLIGIKQSDVKFEAGKSVIDEEAYTRILQQEKMLQEGQGRADLEKLGYEFRLSFYRNNIIQYEKGGEIFTERFQSRTMPTQRNYIETKPVDRAKFNRQNLVGLGKTTSIKKVHVDILGNQYITEKEIFSFEC

SEQ ID NO: 16702 - protein, 1106 aa, unidentified
  REGION 1..1106: note = Cas Enzyme sequence
MQYIVAIDIGVASVGYAVIDKTSETVIEAGSNIFPEASATDNQERRGMRQARRLKRRERTRLDDFTKLWEYHGLAIPQVKKNDIVGLKVKALYESISLDEVYLILYSYLKHRGISYLEDVEDSSVSGSTAYANGLKLNAKELEKNFPCEIQKYRLENIGKYRGQIQIEDDQGEKLDLSNVFTIGAYTKEIQQILDTQKKYHAEIEDEFCEKYLKIFTRKRKYYEGPGNEKSRTDYGKYTTRLKENGEYITEKNIFEKLIGKCSVYKDELRAASASYTAQEFNLLNDLNNLTVNGRKLEENEKHLIVDKVKTSNTINMRKIIADAMGEKIEEFYGARIDKSEKEIFHKFEVYNKMRKALAAIHVNIEEFSRDDLDEIGYILTINTDKEAMMEAFDNSRLELPGEIKNCLISLRKTNGTLYSKWHSFSLKIMNELIPEMYRQPKEQMTLLTEMGVMKGQTDEFEKNKYIPVDVASEDIFNPVVRRSVRISFKILNALMKKYGTLDEVVIEMPRDRNSDEQKKWEKETQKKNEKEQEYIENKLATVYDIRLSSADFSSQKQLNLKLKLWNEQDGKCLYSGKIIEPEDLIKHSELFEIDHIIPRSISFDDSRNNKVLVYRTENQGKGNQTPYYYLTHANNKWSFEQYKALVMDLSKKKEYGLSKKKVQNLLYSEDVTKADVLRGFINRNINDTSYAARVVLNTVQGYFRAKEMGTKVKVIRGSYTHQMRVNMKLDKDREKSYAHHAVDAMLIAFSQLGYEAYRKLQGEFIDFETGEILNSEKWKDQMSDGIYKEYLYGKKWSNIRNEITKAEKNVKYWYYVDHKSNRGLCNQTIRGTRVYDGKIYKINKLDIRTKEGVALFKKLAFSEKESDREKLLVYKNDKKTYEDLVQIMQDYSDSKNPFVQYEKETGDYVRKYAKKHNGPRIDKLKYTDGEVGSCIDISHKYGYEKGSRKVVLESRVPYRMDVYYKKEEQTYYLVGIKQSDVKCQKGEYVIDEDAYAINLVNEKMIQQGQKRSDLESLGFEFQLSFYKNDIIEYEKDGKIVRERFLSRTMPKVKNYIETKPIDREKYEGHDRKLVGLGKTKRIRKYRMDILGNYYLCNKEEFSKYC

SEQ ID NO: 16703 - protein, 1106 aa, unidentified
  REGION 1..1106: note = Cas Enzyme sequence
MQYIVALDIGVASVGYAVIDKMSETVIEAGSNIFPEASAANNQVRRGMRQARRLKRRERTRLDDFKKLWEYHGLAIPQAKENDIVGLKVKALYESISLDEVYLILYSYLKHRGISYLEDAEDSSVSGSTAYANGLKLNAKELEKNFPCEIQKHRLENIGKYRGQIQIEDDQGEKLDLSNVFTIGAYAKEIQQILDTQKKYHAEIADEFCEKYLKIFTRKRKYYEGPGNEKSRTDYGKYTTRLAENGEYITEKNIFEKLIGKCSVYKDELRAASASYTAQEFNLLNDLNNLTVNGRKLEENEKHLIVDKVKASNTINMRKIIADAMGEKIEEFYGARIDKSEKEIFHKFEVYNKMRKALAAIHVNIEEFSRDDLDEIGYILTINTDKEAMMEAFDNSRLELPGEIKNCLISLRKTDGALFSKWHSFSLKIMNELIPEMYRQPKEQMTLLTEMGVMKGQTDEFEKNKYIPVDVASEDIFNPVVRRSVRISFKILNELMKKYGTLDEVVIEMPRDRNSDEQRKWEKETQKKNEKEQEYIENKLATVYDIKLSSADFSSQKQLNLKLKLWNEQDGKCLYSGKIIEPEDLIKHSELFEIDHIIPRSISFDDSRNNKVLVYRTENQNKGNQTPYYYLTHANNKWSFEQYKALVMDLSKKKEYGLSKKKVQNLLYSEDITKADVLRGFINRNINDTSYAARVVLNTVQGYFRAKEMGTKVKVIRGSYTHQMRVNMKLDKDREKSYAHHAVDAMLIAFSQLGYEAYRKLQGEFIDFETGEILNSEKWKDQMSDGIYKQYLYGKKWSNIRNEITKAEKNVKYWYYVDHKSNRGLCNQTIRGTRVYDGKIYKINKLDIRTKEGVALFKKLAFSEKESDREKLLVYKNDKKTYEDLVQIMQDYSDSKNPFVQYEKETGDYVRKYAKKHNGPRIDKLKYTDGEVGSCIDISHKYGYEKGSRKVVLESLVPYRMDVYYKKEEQTYYLVGIKQSDVKCQKGEYVIDEDAYAINLVKEKMIQQGQKRSDLESLGFEFQLSFYKNDIIEYEKDGKIVRERFLSRTMPKVKNYIETKPIDREKYEGHDRKLVGLGKTKRIRKYRMDILGNYYLCNKEEFSKYC

SEQ ID NO: 16704 - protein, 1104 aa, unidentified; identical to SEQ ID NO: 15268
  REGION 1..1104: note = Cas Enzyme sequence

SEQ ID NO: 16705 - protein, 1117 aa, unidentified
  REGION 1..1117: note = Cas Enzyme sequence
LEEDLITRRKNMQYIVAIDIGVASVGYAVIDKTSETVIEAGSNIFPEASATDNQERRGMRQARRLKRRERTRLDDFTKLWEYHGLAIPQVKKNDIVGLKVKALYESISLDEVYLILYSYLKHRGISYLEDVEDSSVSGSTAYANGLKLNAKELEKNFPCEIQKYRLENIGKYRGQIQIEDDQGEKLDLSNVFTIGAYTKEIQQILDTQKKYHAEIEDEFCEKYLKIFTRKRKYYEGPGNEKSRTDYGKYTTRLKENGEYITEKNIFEKLIGKCSVYKDELRAASASYTAQEFNLLNDLNNLTVNGRKLEENEKHLIVDKVKTSNTINMRKIIADAMGEKIEEFYGARIDKSEKEIFHKFEVYNKMRKALAAIHVNIEEFSRDDLDEIGYILTINTDKEAMMEAFDNSRLELPGEIKNCLISLRKTNGTLYSKWHSFSLKIMNELIPEMYRQPKEQMTLLTEMGVMKGQTDEFEKNKYIPVDVASEDIFNPVVRRSVRISFKILNALMKKYGTLDEVVIEMPRDRNSDEQKKWEKETQKKNEKEQEYIENKLATVYDIRLSSADFSSQKQLNLKLKLWNEQDGKCLYSGKIIEPEDLIKHSELFEIDHIIPRSISFDDSRNNKVLVYRTENQGKGNQTPYYYLTHANNKWSFEQYKALVMDLSKKKEYGLSKKKVQNLLYSEDVTKADVLRGFINRNINDTSYAARVVLNTVQGYFRAKEMGTKVKVIRGSYTHQMRVNMKLDKDREKSYAHHAVDAMLIAFSQLGYEAYRKLQGEFIDFETGEILNSEKWKDQMSDGIYKEYLYGKKWSNIRNEITKAEKNVKYWYYVDHKSNRGLCNQTIRGTRVYDGKIYKINKLDIRTKEGVALFKKLAFSEKESDREKLLVYKNDKKTYEDLVQIMQDYSDSKNPFVQYEKETGDYVRKYAKKHNGPRIDKLKYTDGEVGSCIDISHKYGYEKGSRKVVLESRVPYRMDVYYKKEEQTYYLVGIKQSDVKCQKGEYVIDEDAYAINLVNEKMIQQGQKRSDLESLGFEFQLSFYKNDIIEYEKDGKIVRERFLSRTMPKVKNYIETKPIDREKYEGHDRKLVGLGKTKRIRKYRMDILGNYYLCNKEEFSKYC

SEQ ID NO: 16706 - protein, 1106 aa, unidentified; identical to SEQ ID NO: 16702
  REGION 1..1106: note = Cas Enzyme sequence

SEQ ID NO: 16707 - protein, 1104 aa, unidentified
  REGION 1..1104: note = Cas Enzyme sequence
MQHIVALDIGVASVGFAVIDKKTETVIEAGSNIFPEASATDNQMRRGMRQARRLTRRKRTRLDDFTKLWEEYEFAIPQVQENDIVGLKVKALRESISLDELYLILYNYLKHRGISYLEDAEDVSVSGTSAYANGLKLNAKELETNYPCEIQKQRLEQVGKYRGQIQIEDAQGEKLDLSNVFTIGAYTKEIQQVLCTQKNYHSEISDEFCEDYLEIFTRKRKYYEGPGNEKSRTDYGRFTTRLDENGDYITEKNIFEKLIGKCSVYKEELRAASASYTAQEFNLLNDLNNLTINGRKLEEHEKRIIIDKVKTSNTINMRKIIADVMGEKIEEFYGVRIDKSEKEIFHKMEVYNKMRKTLAEIHVNIEEFSRENLDEIGYILTINTDKEAMMEAFEHANVKLSEEIKDCLISLRKTNGALFSKWHSFSLKIMKELIPEMYQQPKEQMTLLTEMGVMRGQTDKFEKNKYIPVDAADEDIFNPVVRRAVRISFKILNALMKKYGTLEEVVIEMPRDRNSEEQKKWEKERQKKNEKELAYIEKKLAAEYNILLSPTDFSNQKQLGLKLKLWNEQDGKCLYSGKTIEPEDLIKHSELFQIDHIIPRSISFDDSRNNKVLVYGEENQKKGNQTPYYYLIHANNQWSFEQYKALVMKLSKKKEYGISKKKVQNLLYSEDITKAEVLRGFINRNINDTGYAARVVLNTVQGYFRAKEINTKVKVIRGSYTYQMRVNMKLDKNREESYAHHAVDAMLIAFSQLGYEAYRKLQGEFIDFETGEILNAEKWNAQMSDEIYEQYLYGKKWSNIRTQITKAEKQVKYWYHVDHKSNRGLCNQTIRGTRTYEGKTYKINKLDIRTKEGAALFKKLAFSEKESDREKLLVYKNDKKTYENLIQIAQEYSDSNNPFVQYEKETGDCVRKYAKNHNGPRIDKLKYTDGEVGSCIDISHKYGYEKGSQKVVLESLVPYRMDVYYKKEEQTYYLVGIKQSDVKCDNGEYVIDEDAYAINLVREKMIQPGQKRGDLEALGFEFQLSFYKNDIIEYEKDGEIVRERFLSRTMPKVKNYIETKPIDRAKYEKQKLVGLSKTKMIRKYRMDILGNYYMCSRENFSKYC

SEQ ID NO: 16708 - protein, 1106 aa, unidentified
  REGION 1..1106: note = Cas Enzyme sequence
MQYIVALDIGVASVGYAVIDKMSETVIEAGSNIFPEASAANNQVRRGMRQARRLKRRERTRLDDFKKLWEYHGLAIPQAKENDIVGLKVKALYESISLDEVYLILYSYLKHRGISYLEDAEDSSVSGSTAYANGLKLNAKELEKNFPCEIQKHRLENIGKYRGQIQIEDDQGEKLDLSNVFTIGAYAKEIQQILDTQKKYHAEIADEFCEKYLKIFTRKRKYYEGPGNEKSRTDYGKYTTRLAENGEYITEKNIFEKLIGKCSVYKDELRAASASYTAQEFNLLNDLNNLTVNGRKLEENEKHLIVDKVKASNTINMRKIIADAMGEKIEEFYGARIDKSEKEIFHKFEVYNKMRKALAAIHVNIEEFSRDDLDEIGYILTINTDKEAMMEAFDNSRLELPGEIKNCLISLRKTDGALFSKWHSFSLKIMNELIPEMYRQPKEQMTLLTEMGVMKGQTDEFEKNKYIPVDVASEDIFNPVVRRSVRISFKILNELMKKYGTLDEVVIEMPRDRNSDEQRKWEKETQKKNEKEQEYIENKLATVYDIKLSSADFSSQKQLNLKLKLWNEQDGKCLYSGKIIEPEDLIKHSELFEIDHIIPRSISFDDSRNNKVLVYRTENQNKGNQTPYYYLTHTNSKWSFEQYKALVMDLSKKKEYGLSKKKVRNLLYSEDITKADVLRGFINRNINDTSYAARVVLNTVQGYFRAKEMGTKVKVIRGSYTHQMRVNMKLDKDREKSYAHHAVDAMLIAFSQLGYEAYRKLQGEFIDFETGEILNSEKWKDQMSDGIYKQYLYGKKWSNIRNEITKAEKNVKYWYYVDHKSNRGLCNQTIRGTRVYDGKIYKINKLDIRTKEGVALFKKLAFSEKESDREKLLVYKNDKKTYEDLVQIMQDYSDSKNPFVQYEKETGDYVRKYAKKHNGPRIDKLKYTDGEVGSCIDISHKYGYEKGSRKVVLESLVPYRMDVYYKKEEQTYYLVGIKQSDVKCQKGEYVIDEDAYAINLVKEKMIQQGQKRSDLESLGFEFQLSFYKNDIIEYEKDGKIVRERFLSRTMPKVKNYIETKPIDREKYEGHDRKLVGLGKTKRIRKYRMDILGNYYLCNKEEFSKYC

SEQ ID NO: 16709 - protein, 1106 aa, unidentified; identical to SEQ ID NO: 16703
  REGION 1..1106: note = Cas Enzyme sequence

SEQ ID NO: 16710 - protein, 1106 aa, unidentified
  REGION 1..1106: note = Cas Enzyme sequence
MQYIVAIDIGVASVGYAVIDKTSETVIEAGSNIFPEASATDNQERRGMRQARRLKRRERTRLDDFTKLWEYHGLAIPQVKKNDIVGLKVKALYESISLDEVYLILYSYLKHRGISYLEDVEDSSVSGSTAYANGLKLNAKELEKNFPCEIQKYRLENIGKYRGQIQIEDDQGEKLDLSNVFTIGAYTKEIQQILDTQKKYHAEIEDEFCEKYLKIFTRKRKYYEGPGNEKSRTDYGKYTTRLKENGEYITEKNIFEKLIGKCSVYKDELRAASASYTAQEFNLLNDLNNLTVNGRKLEENEKHLIVDKVKTSNTINMRKIIADAMGEKIEEFYGARIDKSEKEIFHKFEVYNKMRKALAAIHVNIEEFSRDDLDEIGYILTINTDKEAMMEAFDNSRLELPGEIKNCLISLRKTNGTLYSKWHSFSLKIMNELIPEMYRQPKEQMTLLTEMGVMKGQTDEFEKNKYIPVDVASEDIFNPVVRRSVRISFKILNALMKKYGTLDEVVIEMPRDRNSDEQKKWEKETQKKNEKEQEYIENKLATVYDIRLSSADFSSQKQLNLKLKLWNEQDGKCLYSGKIIEPEDLIKHSELFEIDHIIPRSISFDDSRSNKVLVYRTENQNKGNQTPYYYLTHTNSKWSFEQYKALVMDLSKKKEYGLSKKKVRNLLYSEDITKADVLRGFINRNINDTSYAARVVLNTVQGYFRAKEMGTKVKVIRGSYTHQMRVNMKLDKDREKSYAHHAVDAMLIAFSQLGYEAYRKLQGEFIDFETGEILNSEKWKDQMSDEVYKQYLYRKKWSNIRNEITRAEKNVKYWYYVDHKSNRGLCNQKIRGTRVYDGKIYKINKLDIRKKEGAALFKKLAFSEKESDREKLLVYKNDKKTYEDLVRIMQDYSDSKNPFVQYEKETGDYVRKYAKKHNGPRIDKLKYIDGEVGSCIDISHKYGYEKGSRKVVLESLVPYRMDVYYKKEEQTYYLVGIKQSDVKCQKGEYVIDEDAYAINLVKEKMIQQGQKRSDLESLGFEFQLSFYKNDIIEYEKDGKIVRERFLSRTMPKVKNYIETKPIDRAKYEWHDRKLVGLGKTKRIRKYRMDILGNYYLCNKEEFSKYC

SEQ ID NO: 16711 - protein, 1104 aa, unidentified
  REGION 1..1104: note = Cas Enzyme sequence
MQYIVALDIGVASVGFAVIDKKTETVIEAGSNIFPEASATDNQMRRGMRQARRLKRRKRTRLDDFTKLWEEYAFAIPQVQENDIVGLKVKALRESISLDELYLILYSYLKYRGISYLEDAEDTSLSGTSAYANGLKLNAKELETNYPCEIQKQRLEQVGKYRGQIQIEDAQGEKVDLSNVFTIGAYTKEIQQVLCTQKNYHSEISDEFCEDYLEIFTRKRKYYEGPGNEKSRTDYGRFTTRLDENGDYITEKNIFEKLIGKCSVYKEELRAASASYTAQEFNLLNDLNNLTINGRKLEEHEKRIIIDKVKTSNTINMRKIIADVMGEKIEEFYGARIDKSEKEIFHKMEVYNKMRKTLAEIHVNIEEFSRENLDEIGYILTINTDKEAMMEAFEHANVKLSEEIKDCLISLRKTNGALFSKWHSFSLKIMKELIPEMYQQPKEQMTLLTEMGVMRGQTDKFEKNKYIPVDAADEDIFNPVVRRAVRISFKILNALMKKYGTLEEVVIEMPRDQNSEEQKKWEKERQKKNEKELAYIEKKLAAEYNILLSPTDFSNQKQLGLKLKLWNEQDGKCLYSGKTIEPEDLIKHSELFQIDHIIPRSISFDDSRNNKVLVYGEENQKKGNQTPYYYLIHANNQWSFEQYKALVMKLSKKKEYGISKKKVQNLLYSEDITKAEVLRGFINRNINDTGYAARVVLNTVQGYFRAKEINTKVKVIRGSYTYQMRVNMKLDKNREESYAHHAVDAMLIAFSQLGYEAYRKLQGEFIDFETGEILNAEKWNAQMSDEIYEQYLYGKKWSNIRTQITKAEKQVKYWYHVDHKSNRGLCNQTIRGTRTYEGKTYKINKLDIRTKEGAALFKKLAFSEKESDREKLLVYKNDKKTYENLIQIAQEYSDSNNPFVQYEKETGDCVRKYAKNHNGPRIDKLKYTDGEVGSCIDISHKYGYEKGSQKVVLESLVPYRMDVYYKKEEQTYYLVGIKQSDVKCDNGEYVIDEDAYAINLVREKMIQPGQKRGDLEALGFEFQLSFYKNDIIEYEKDGEIVRERFLSRTMPKVKNYIETKPIDREKYEKQKLVGLSKTKMIRKYRMDILGNYYMCSRENFSKYC

SEQ ID NO: 16712 - protein, 1104 aa, unidentified
  REGION 1..1104: note = Cas Enzyme sequence
MQYIVALDIGVASVGFAVIDKKTETVIEAGSNIFPEASATDNQMRRGMRQARRLKRRKRTRLDDFTKLWEEYAFVIPQVQENDIVGLKVKALRESISLDELYLILYSYLKYRGISYLEDAEDTSLSGTSAYANGLKLNAKELETNYPCEIQKQRLEQVGKYRGQIQIEDAQGEKLDLSNVFTIGAYTKEIQQVLCTQKNYHSEISDEFCEDYLEIFTRKRKYYEGPGNEKSRTDYGRFTTRLDENGDYITEKNIFEKLIGKCSVYKEELRAASASYTAQEFNLLNDLNNLTINGRKLEEHEKRIIIDKVKTSNTINMRKIIADVMGEKIEEFYGARIDKSEKEIFHKMEVYNKMRKTLADIHVNIEEFSRENLDEIGYILTINTDKEAMMEAFEHANVKLSEEIKDCLISLRKTNGALFSKWHSFSLKIMKELIPEMYQQPKEQMTLLTEMGVMRGQTDKFEKNKYIPVDAADEDIFNPVVRRAVRISFKILNALMKKYGTLEEVVIEMPRDQNSEEQKKWEKERQKKNEKELAYIEKKLAAEYNILLSPTDFSNQKQLGLKLKLWNEQDGKCLYSGKTIEPEDLIKHSELFQIDHIIPRSISFDDSRNNKVLVYGEENQKKGNQTPYYYLIHANNQWSFEQYKALVMKLSKKKEYGISKKKVQNLLYSEDITKAEVLRGFINRNINDTGYAARVVLNTVQGYFRAKEINTKVKVIRGSYTYQMRVNMKLDKNREESYAHHAVDAMLIAFSQLGYEAYRKLQGEFIDFETGEILNAEKWNAQMSDEIYEQYLYGKKWSNIRTQITKAEKQVKYWYHVDHKSNRGLCNQTIRGTRTYEGKTYKINKLDIRTKEGAALFKKLAFSEKESDREKLLVYKNDKKTYENLIQIAQEYSDSNNPFVQYEKETGDCVRKYAKNHNGPRIDKLKYTDGEVGSCIDISHKYGYEKGSQKVVLESLVPYRMDVYYKKEEQTYYLVGIKQSDVKCDNGEYVIDEDAYAINLVREKMIQPGQKRGDLEALGFEFQLSFYKNDIIEYEKDGEIVRERFLSRTMPKVKNYIETKPIDRAKYEKQKLVGLSKTKMIRKYRMDILGNYYMCSRENFSKYC

SEQ ID NO: 16713 - protein, 1106 aa, unidentified
  REGION 1..1106: note = Cas Enzyme sequence
MQYIVALDIGVASVGYAVIDKMSETVIEAGSNIFPEASAANNQVRRGMRQARRLKRRERTRLDDFKKLWEYHGLAIPQAKENDIVGLKVKALYESISLDEVYLILYSYLKHRGISYLEDAEDSSVSGSTAYANGLKLNAKELEKNFPCEIQKHRLENIGKYRGQIQIEDDQGEKLDLSNVFTIGAYAKEIQQILDTQKKYHAEIADEFCEKYLKIFTRKRKYYEGPGNEKSRTDYGKYTTRLAENGEYITEKNIFEKLIGKCSVYKDELRAASASYTAQEFNLLNDLNNLTVNGRKLEENEKHLIVDKVKASNTINMRKIIADAMGEKIEEFYGARIDKSEKEIFHKFEVYNKMRKALAAIHVNIEEFSRDDLDEIGYILTINTDKEAMMEAFDNSRLELPGEIKNCLISLRKTDGALFSKWHSFSLKIMNELIPEMYRQPKEQMTLLTEMGVMKGQTDEFEKNKYIPVDVASEDIFNPVVRRSVRISFKILNELMKKYGTLDEVVIEMPRDRNSDEQRKWEKETQKKNEKEQEYIENKLATVYDIKLSSADFSSQKQLNLKLKLWNEQDGKCLYSGKIIEPEDLIKHSELFEIDHIIPRSISFDDSRNNKVLVYRTENQNKGNQTPYYYLTHANNKWSFEQYKALVMDLSKKKEYGLSKKKVQNLLYSEDITKADVLRGFINRNINDTSYAARVVLNTVQGYFRAKEMGTKVKVIRGSYTHQMRVNMKLDKDREKSYAHHAVDAMLIAFSQLGYEAYRKLQGEFIDFETGEILNSEKWKDQMSDGIYKQYLYGKKWSNIRNEITKAEKNVKYWYYVDHKSNRGLCNQTIRGTRVYDGKIYKINKLDIRTKEGVALFKKLAFSEKESDREKLLVYKNDKKTYEDLVQIMQDYSDSKNPFVQYEKKTGDYVRKYAKKHNGPRIDKLKYTDGEVGSCIDISHKYGYEKGSRKVVLESLVPYRMDVYYKKEEQTYYLVGIKQSDVKCQKGEYVIDEDAYAINLVKEKMIQQGQKRSDLESLGFEFQLSFYKNDIIEYEKDGKIVRERFLSRTMPKVKNYIETKPIDREKYEGHDRKLVGLGKTKRIRKYRMDILGNYYLCNKEEFSKYC

SEQ ID NO: 16714 - protein, 1106 aa, unidentified
  REGION 1..1106: note = Cas Enzyme sequence
MQYIVAIDIGVASVGYAVIDKTSETVIEAGSNIFPEASATDNQERRGMRQARRLKRRERTRLDDFTKLWEYHGLAIPQVKKNDIVGLKVKALYESISLDEVYLILYSYLKHRGISYLEDVEDSSVSGSTAYANGLKLNAKELEKNFPCEIQKYRLENIGKYRGQIQIEDDQGEKLDLSNVFTIGAYTKEIQQILDTQKKYHAEIEDEFCEKYLKIFTRKRKYYEGPGNEKSRTDYGKYTTRLAENGEYITEKNIFEKLIGKCSVYKDELRAASASYTAQEFNLLNDLNNLTVNGRKLEENEKHLIVDKVKTSNTINMRKIIADAMGEKIEEFYGARIDKSEKEIFHKFEVYNKMRKALAAIHVNIEEFSRDDLDEIGYILTINTDKEAMMEAFDNSRLELPGEIKNCLISLRKTDGALFSKWHSFSLKIMNELIPEMYRQPKEQMTLLTEMGVMKGQTDEFEKNKYIPVDVASEDIFNPVVRRSVRISFKILNALMKKYGTLDEVVIEMPRDRNSDEQRKWEKETQKKNEKEQEYIENKLATVYDIKLSSADFSSQKQLNLKLKLWNEQDGKCLYSGKIIEPEDLIKHSELFEIDHIIPRSISFDDSRNNKVLVYRTENQNKGNQTPYYYLTHANNKWSFEQYKALVMDLSKKKEYGLSKKKVQNLLYSEDITKADVLRGFINRNINDTSYAARVVLNTVQGYFRAKEMGTKVKVIRGSYTHQMRVNMKLDKDREKSYAHHAVDAMLIAFSQLGYEAYRKLQGEFIDFETGEILNSEKWKDQMSDGIYKQYLYGKKWSNIRNEITKAEKNVKYWYYVDHKSNRGLCNQTIRGTRVYDGKIYKINKLDIRTKEGVALFKKLAFSEKESDREKLLVYKNDKKTYEDLVQIMQDYSDSKNPFVQYEKETGDYVRKYAKKHNGPRIDKLKYTDGEVGSCIDISHKYGYGKGSRKVVLESLVPYRMDVYYKKEEQTYYLVGIKQSDVKCQKGEYVIDEDAYAINLVKEKMIQQGQKRSDLESLGFEFQLSFYKNDIIEYEKDGKIVRERFLSRTMPKVKNYIETKPIDREKYEGHDRKLVGLGKTKRIRKYRMDILGNYYLCNKEEFSKYC

SEQ ID NO: 16715 - protein, 1104 aa, unidentified
  REGION 1..1104: note = Cas Enzyme sequence
MQYIVALDIGVASVGFAVIDKKTETVIEAGSNIFPEASATDNQMRRGMRQARRLKRRKRTRLDDFTKLWEEYAFAIPQVQENDIVGLKVKALRESISLDELYLILYSYLKYRGISYLEDAEDTSLSGTSAYANGLKLNAKELETNYPCEIQKQRLEQVGKYRGQIQIEDAQGEKLDLSNVFTIGAYTKEIQQVLCTQKNYHSEISDEFCEDYLEIFTRKRKYYEGPGNEKSRTDYGRFTTRLDENGDYITEKNIFEKLIGKCSVYKEELRAASASYTAQEFNLLNDLNNLTINGRKLEEHEKRIIIDKVKTSNTINMRKIIADVMGEKIEEFYGARIDKSEKEIFHKMEVYNKMRKALAEIHVNIEEFSRENLDEIGYILTINTDKEAMMEAFEHANVKLSEEIKDCLISLRKTNGALFSKWHSFSLKIMKELIPEMYQQPKEQMTLLTEMGVMRGQTDKFEKNKYIPVDAADEDIFNPVVRRAVRISFKILNALMKKYGTLEEVVIEMPRDQNSEEQKKWEKERQKKNEKELAYIEKKLAAEYNILLSPTDFSNQKQLGLKLKLWNEQDGKCLYSGKTIEPEDLIKHSELFQIDHIIPRSISFDDSRNNKVLVYGEENQKKGNQTPYYYLIHANNQWSFEQYKALVMKLSKKKEYGISKKKVQNLLYSEDITKAEVLRGFINRNINDTGYAARVVLNTVQGYFRAKEINTKVKVIRGSYTYQMRVNMKLDKNREESYAHHAVDAMLIAFSQLGYEAYRKLQGEFIDFETGEILNAEKWNAQMSDEIYEQYLYGKKWSNIRTQITKAEKQVKYWYHVDHKSNRGLCNQTIRGTRTYEGKTYKINKLDIRTKEGAALFKKLAFSEKESDREKLLVYKNDKKTYENLIQIAQEYSDSNNPFVQYEKETGDCVRKYAKNHNGPRIDKLKYTDGEVGSCIDISHKYGYEKGSQKVVLESLVPYRMDVYYKKEEQTYYLVGIKQSDVKCDNGEYVIDEDAYAINLVREKMIQPGQKRGDLEALGFEFQLSFYKNDIIEYEKDGEIVRERFLSRTMPKVKNYIETKPIDRAKYEKQKLVGLSKTKMIRKYRMDILGNYYMCSRENFSKYC

SEQ ID NO: 16716 - protein, 1104 aa, unidentified
  REGION 1..1104: note = Cas Enzyme sequence
MQYIVALDIGVASVGFAVIDKKTETVIEAGSNIFPEASATDNQMRRGMRQARRLKRRKRTRLDDFTKLWEEYAFAIPQVQETDIVGLKVKALRESISLDELYLILYSYLKYRGISYLEDAEDTSLSGTSAYANGLKLNAKELETNYPCEIQKQRLEQVGKYRGQIQIEDAQGEKLDLSNVFTIGAYTKEIQQVLCTQKNYHSEISDEFCEDYLEIFTRKRKYYEGPGNEKSRTDYGRFTTRLDENGDYITEKNIFEKLIGKCSVYKEELRAASASYTAQEFNLLNDLNNLTINGRKLEEHEKRIIIDKVKTSNTINMRKIIADVMGEKIEEFYGARIDKSEKEIFHKMEVYNKMRKTLAEIHVNIEEFSRENLDEIGYILTINTDKEAMMEAFEHANVKLSEEIKDCLISLRKTNGALFSKWHSFSLKIMKELIPEMYQQPKEQMTLLTEMGVMRGQTDKFEKNKYIPVDAADEDIFNPVVRRAVRISFKILNALMKKYGTLEEVVIEMPRDRNSEEQKKWEKERQKKNEKELAYIEKKLAAEYNILLSPTDFSNQKQLGLKLKLWNEQDGKCLYSGKTIEPEDLIKHSELFQIDHIIPRSISFDDSRNNKVLVYGEENQKKGNQTPYYYLTHANNEWSFDRYKAIVMDLSKKKEHGISKKKVQNLLYSEDITKAEVLRGFINRNINDTGYAARVVLNTVQGYFRAKEINTKVKVIRGSYTYQMRVNMKLDKNREESYAHHAVDAMLIAFSQLGYEAYRKLQGEFIDFETGEILNAEKWNAQMSDEIYEQYLYGKKWSNIRTQITKAEKQVKYWYHVDHKSNRGLCNQTIRGTRTYEGKTYKINKLDIRTKEGAALFKKLAFSEKESDREKLLVYKNDKKTYENLIQIAQEYSDSNNPFVQYEKETGDCVRKYAKNHNGPRIDKLKYTDGEVGSCIDISHKYGYEKGSQKVVLESLVPYRMDVYYKKEEQTYYLVGIKQSDVKCDNGEYVIDEDAYAINLVREKMIQPGQKRGDLEALGFEFQLSFYKNDIIEYEKDGEIVRERFLSRTMPKVKNYIETKPIDRAKYEKQKLVGLSKTKMIRKYRMDILGNYYMCSRENFSKYC

SEQ ID NO: 16717 - protein, 1104 aa, unidentified
  REGION 1..1104: note = Cas Enzyme sequence
MQYIVALDIGGASVGFAVIDKKTETVIEAGSNIFPEASATDNQMRRGMRQARRLKRRKRTRLDDFTKLWEEYAFAIPQVQENDIVGLKVKALRESISLDELYLILYSYLKYRGISYLEDAEDTSLSGTSAYANGLKLNAKELETNYPCEIQKQRLEQVGKYRGQIQIEDAQGEKVDLSNVFTIGAYTKEIQQVLCTQKNYHSEISDEFCEDYLEIFTRKRKYYEGPGNEKSRTDYGRFTTRLDENGDYITEKNIFEKLIGKCSVYKEELRAASASYTAQEFNLLNDLNNLTINGRKLEEHEKRIIIDKVKTSNTINMRKIIADVMGEKIEEFYGARIDKSEKEIFHKMEVYNKMRKTLAEIHVNIEEFSRENLDEIGYILTINTDKEAMMEAFEHANVKLSEEIKDCLISLRKTNGALFSKWHSFSLKIMKELIPEMYQQPKEQMTLLTEMGVMRGQTDKFEKNKYIPVDAADEDIFNPVVRRAVRISFKILNALMKKYGTLEEVVIEMPRDRNSEEQKKWEKERQKKNEKELAYIEKKLAAEYNILLSPTDFSNQKQLGLKLKLWNEQDGKCLYSGKTIEPEDLIKHSELFQIDHIIPRSISFDDSRNNKVLVYGEENQKKGNQTPYYYLIHANNQWSFEQYKALVMKLSKKKEYGISKKKVQNLLYSEDITKAEVLRGFINRNINDTGYAARVVLNTVQGYFRAKEINTKVKVIRGSYTYQMRVNMKLDKNREESYAHHAVDAMLIAFSQLGYEAYRKLQGEFIDFETGEILNAEKWNAQMSDEIYEQYLYGKKWSNIRTQITKAEKQVKYWYHVDHKSNRGLCNQTIRGTRTYEGKTYKINKLDIRTKEGAALFKKLAFSEKESDREKLLVYKNDKKTYENLIQIAQEYSDSNNPFVQYEKETGDCVRKYAKNHNGPRIDKLKYTDGEVGSCIDISHKYGYEKGSQKVVLESLVPYRMDVYYKKEEQTYYLVGIKQSDVKCDNGEYVIDEDAYAINLVREKMIQPGQKRGDLEALGFEFQLSFYKNDIIEYEKDGEIVKERFLSRTMPKVKNYIETKPIDRAKYEKQKLVGLSKTKMIRKYRMDILGNYYMCSRENFSKYC

SEQ ID NO: 16718 - protein, 1104 aa, unidentified
  REGION 1..1104: note = Cas Enzyme sequence
MQYIVALDIGVASVGFAVIDKKTETVIEAGSNIFPEASATDNQMRRGMRQARRLKRRKRTRLDDFTKLWEEYAFAIPQVQENDIVGLKVKALRESISLDELYLILYSYLKYRGISYLEDAEDTSLSGTSAYANGLKLNAKELETNYPCEIQKQRLEQVGKYRGQIQIEDAQGEKVDLSNVFTIGAYTKEIQQVLCTQKNYHSEISDEFCEDYLEIFTRKRKYYEGPGNEKSRTDYGRFTTRLDENGDYITEKNIFEKLIGKCSVYKEELRAASASYTAQEFNLLNDLNNLTINGRKLEEHEKRIIIDKVKTSNTINMRKIIADVMGEKIEEFYGARIDKSEKEIFHKMEVYNKMRKTLAEIHVNIEEFSRENLDEIGYILTINTDKEAMMEAFEHANVKLSEEIKDCLISLRKTNGALFSKWHSFSLKIMKELIPEMYQQPKEQMTLLTEMGVMRGQTDKFEKNKYIPVDAADEDIFNPVVRRAVRISFKILNALMKKYGTLEEVVIEMPRDRNSEEQKKWEKERQKKNEKELAYIEKKLAAEYNILLSPTDFSNQKQLGLKLKLWNEQDGKCLYSGKTIEPEDLIKHSELFQIDHIIPRSISFDDSRNNKVLVYGEENQKKGNQTPYYYLIHANNQWSFEQYKALVMKLSKKKEYGISKKKVQNLLYSEDITKAEVLRGFINRNINDTGYAARVVLNTVQGYFRAKEINTKVKVIRGSYTYQMRVNMKLDKNREESYAHHAVDAMLIAFSQLGYEAYRKLQGEFIDFETGEILNAEKWNAQMSDEIYEQYLYGKKWSNIRTQITKAEKQVKYWYHVDHKSNRGLCNQTIRGTRTYEGKTYKINKLDIRTKEGAALFKKLAFSEKESDREKLLVYKNDKKTYENLIQIAQEYSDSNNPFVQYEKETGDCVRKYAKNHNGPRIDKLKYTDGEVGSCIDISHKYGYEKGSQKVVLESLVPYRMDVYYKKEEQTYYLVGIKQSDVKCDNGEYVIDEDAYAINLVREKMIQPGQKRGDLEALGFEFQLSFYKNDIIEYEKDGEIVKERFLSRTMPKVKNYIETKPIDRAKYEKQKLVGLSKTKMIRKYRMDILGNYYMCSRENFSKYC

SEQ ID NO: 16719 - protein, 938 aa, unidentified
  REGION 1..938: note = Cas Enzyme sequence
MRRGMRQARRLKRRKRTRLDDFTKLWEEYAFAIPQVQENDIVGLKVKALRESISLDELYLILYSYLKYRGISYLEDAEDTSLSGTSAYANGLKLNAKELETNYPCEIQKQRLEQVGKYRGQIQIEDAQGEKVDLSNVFTIGAYTKEIQQVLCTQKNYHSEISDEFCEDYLEIFTRKRKYYEGPGNEKSRTDYGRFTTRLDENGDYITEKNIFEKLIGKCSVYKEELRAASASYTAQEFNLLNDLNNLTINGRKLEEHEKRIIIDKVKTSNTINMRKIIADVMGEKIEEFYGARIDKSEKEIFHKMEVYNKMRKTLADIHVNIEEFSRENLDEIGYILTINTDKEAMMEAFEHANVKLSEEIKDCLISLRKTNGALFSKWHSFSLKIMKELIPEMYQQPKEQMTLLTEMGVMRGQTDKFEKNKYIPVDAADEDIFNPVVRRAVRISFKILNALMKKYGTLEEVVIEMPRDQNSEEQKKWEKERQKKNEKELAYIEKKLAAEYNILLSPTDFSNQKQLGLKLKLWNEQDGKCLYSGKTIEPEDLIKHSELFQIDHIIPRSISFDDSRNNKVLVYGEENQKKGNQTPYYYLIHANNQWSFEQYKALVMKLSKKKEYGISKKKVQNLLYSEDITKAEVLRGFINRNINDTGYAARVVLNTVQGYFRAKEINTKVKVIRGSYTYQMRVNMKLDKNREESYAHHAVDAMLIAFSQLGYEAYRKLQGEFIDFETGEILNAEKWNAQMSDEIYEQYLYGKKWSNIRTQITKAEKQVKYWYHVDHKSNRGLCNQTIRGTRTYEGKTYKINKLDIRTKEGAALFKKLAFSEKESDREKLLVYKNDKKTYENLIQIAQEYSDSNNPFVQYEKETGDCVRKYAKNHNGPRIDKLKYTDGEVGSCIDISHKYGYEKGSQKVVLESLVPYRMDVYYKKEEQTYYLVGIKQSD

SEQ ID NO: 16720 - protein, 1106 aa, unidentified
  REGION 1..1106: note = Cas Enzyme sequence
MQYIVALDIGVASVGYAVIDKMSETVIEAGSNIFPEASAANNQVRRGMRQARRLKRRERTRLDDFKKLWEYHGLAIPQAKENDIVGLKVKALYESISLDEVYLILYSYLKHRGISYLEDVEDSSVSGSTAYANGLKLNAKELEKNFPCEIQKYRLENIGKYRGQIQIEDDQGEKLDLSNVFTIGAYTKEIQQILDTQKKYHAEIEDEFCEKYLKIFTRKRKYYEGPGNEKSRTDYGKYTTRLKENGEYITEKNIFEKLIGKCSVYKDELRAASASYTAQEFNLLNDLNNLTVNGRKLEENEKHLIVDKVKTSNTINMRKIIADAMGEKIEEFYGARIDKSEKEIFHKFEVYNKMRKALAAIHVNIEEFSRDDLDEIGYILTINTDKEAMMEAFDNSRLELPGEIKNCLISLRKTNGTLYSKWHSFSLKIMNELIPEMYRQPKEQMTLLTEMGVMKGQTDEFEKNKYIPVDVASEDIFNPVVRRSVRISFKILNALMKKYGTLDEVVIEMPRDRNSDEQKKWEKETQKKNEKEQEYIENKLATVYDIRLSSADFSSQKQLNLKLKLWNEQDGKCLYSGKIIEPEDLIKHSELFEIDHIIPRSISFDDSRSNKVLVYRTENQNKGNQTPYYYLTHTNSKWSFEQYKALVMDLSKKKEYGLSKKKVRNLLYSEDITKADVLRGFINRNINDTSYAARVVLNTVQGYFRAKEMGTKVKVIRGSYTHQMRVNMKLDKDREKSYAHHAVDAMLIAFSQLGYEAYRKLQGEFIDFETGEILNSEKWKDQMSDGIYKEYLYRKKWSNIRNEITRAEKNVKYWYYVDHKSNRGLCNQKIRGTRVYDGKIYKINKLDIRKKEGAALFKKLAFSEKESDREKLLVYKNDKKTYEDLVRIMQDYSDSKNPFVQYEKETGDYVRKYAKKHNGPRIDKLKYIDGEVGSCIDISHKYGYEKGSRKVVLESLVPYRMDVYYKKEEQTYYLVGIKQSDVKCQKGEYVIDEDAYAINLVKEKMIQQGQKRSDLESLGFEFQLSFYKNDIIEYEKDGKIVRERFLSRTMPKVKNYIETKPIDRAKYEWHDRKLVGLGKTKRIRKYRMDILGNYYLCNKEEFSKYC

SEQ ID NO: 16721 - protein, 1104 aa, unidentified
  REGION 1..1104: note = Cas Enzyme sequence
MQYIVALDIGVASVGFAVIDKKTETVIEAGSNIFPEASATDNQMRRGMRQARRLKRRKRTRLDDFTKLWEEYAFAIPQVQENDIVGLKVKALRESISLDELYLILYSYLKYRGISYLEDAEDTSLSGTSAYANGLKLNAKELETNYPCEIQKQRLEQVGKYRGQIQIEDAQGEKLDLSNVFTIGAYTKEIQQVLCTQKNYHSEISDEFCEDYLEIFTRKRKYYEGPGNEKSRTDYGRFTTRLDENGDYITEKNIFEKLIGKCSVYKEELRAASASYTAQEFNLLNDLNNLTINGRKLEEHEKRIIIDKVKTSNTINMRKIIADVMGEKIEEFYGARIDKSEKEIFHKMEVYNKMRKTLAEIHVNIEEFSRENLDEIGYILTINTDKEAMMEAFEHANVKLSEEIKDCLISLRKTNGALFSKWHSFSLKIMKELIPEMYQQTKEQMTLLTEMGVMRGQTDKFEKNKYIPVDAADEDIFNPVVRRAVRISFKILNALMKKYGTLEEVVIEMPRDRNSEEQKKWEKERQKKNEKELAYIEKKLAAEYNILLSPTDFSNQKQLGLKLKLWNEQDGKCLYSGKTIEPEDLIKHSELFQIDHIIPRSISFDDSRNNKVLVYGEENQKKGNQTPYYYLIHANNQWSFEQYKALVMKLSKKKEYGISKKKVQNLLYSEDITKAEVLRGFINRNINDTGYAARVVLNTVQGYFRAKEINTKVKVIRGSYTYQMRVNMKLDKNREESYAHHAVDAMLIAFSQLGYEAYRKLQGEFIDFETGEILNAEKWNAQMSDEIYEQYLYGKKWSNIRTQITKAEKQVKYWYHVDHKSNRGLCNQTIRGTRTYEGKTYKINKLDIRTKEGAALFKKLAFSEKESDREKLLVYKNDKKTYENLIQIAQEYSDSNNPFVQYEKETGDCVRKYAKNHNGPRIDKLKYTDGEVGSCIDISHKYGYEKGSQKVVLESLVPYRMDVYYKKEEQTYYLVGIKQSDVKCDNGEYVIDEDAYAINLVREKMIQPGQKRGDLEALGFEFQLSFYKNDIIEYEKDGEIVRERFLSRTMPKVKNYIETKPIDRAKYEKQKLVGLSKTKMIRKYRMDILGNYYMCSRENFSKYC

SEQ ID NO: 16722 - protein, 1104 aa, unidentified
  REGION 1..1104: note = Cas Enzyme sequence
MQYIVALDIGVASVGFAVIDKKTETVIEAGSNIFPEASATDNQMRRGMRQARRLTRRKRTRLDDFTKLWEEYEFAIPQVQENDIVGLKVKALRESISLDELYLILYNYLKHRGISYLEDAEDVSVSGTSAYANGLKLNAKELETNYPCEIQKQRLEQVGKYRGQIQIEDAQGEKLDLSNVFTIGAYTKEIQQVLCTQKNYHSEISDEFCEDYLEIFTRKRKYYEGPGNEKSRTDYGRFTTRLDENGDYITEKNIFEKLIGKCSVYKEELRAASASYTAQEFNLLNDLNNLTINGRKLEEHEKRIIIDKVKTSNTINMRKIIADVMGEKIEEFYGARIDKSEKEIFHKMEVYNKMRKTLAEIHVNIEEFSRENLDEIGYILTINTDKEAMMEAFEHANVKLSEEIKDCLISLRKTNGALFSKWHSFSLKIMKELIPEMYQQPKEQMTLLTEMGVMRGQTDKFEKNKYIPVDAADEDIFNPVVRRAVRISFKILNALMKKYGTLEEVVIEMPRDQNSEEQKKWEKERQKKNEKELAYIEKKLAAEYNILLSPTDFSNQKQLGLKLKLWNEQDGKCLYSGKTIEPEDLIKHSELFQIDHIIPRSISFDDSRNNKVLVYGEENQKKGNQTPYYYLIHANNQWSFEQYKALVMKLSKKKEYGISKKKVQNLLYSEDITKAEVLRGFINRNINDTGYAARVVLNTVQGYFRAKEINTKVKVIRGSYTYQMRVNMKLDKNREESYAHHAVDAMLIAFSQLGYEAYRKLQGEFIDFETGEILNEEKWNAQMSDEIYEQYLYGKKWSNIRTQITKAEKQVKYWYHVDHKSNRGLCNQTIRGTRTYEGKTYKINKLDIRTKEGAALFKKLAFSEKESDREKLLVYKNDKKTYENLIQIAQEYSDSNNPFVQYEKETGDCVRKYAKNHNGPHIDKLKYTDGEVGSCIDISHKYGYEKGSQKVVLESLVPYRMDVYYKKEEQTYYLVGIKQSDVKCDNGEYVIDEDAYAINLVREKMIQPGQKRGDLEALGFEFQLSFYKNDIIEYEKDGEIVRERFLSRTMPKVKNYIETKPIDRAKYEKQKLVGLSKTKMIRKYRMDILGNYYMCSRENFPKYC

SEQ ID NO: 16723 - protein, 1104 aa, unidentified
  REGION 1..1104: note = Cas Enzyme sequence
MQYIVALDIGVASVGFAVIDKKTETVIEAGSNIFPEASATDNQMRRGMRQARRLTRRKRTRLDDFTKLWEEYEFAIPQVQENDIVGLKVKALRESISLDELYLILYNYLKHRGISYLEDAEDVSVSGTSAYANGLKLNAKELETNYPCEIQKQRLEQVGKYRGQIQIEDAQGEKLDLSNVFTIGAYTKEIQQVLCTQKNYHSEISDEFCEDYLEIFTRKRKYYEGPGNEKSRTDYGRFTTRLDENGDYITEKNIFEKLIGKCSVYKEELRAASASYTAQEFNLLNDLNNLTINGRKLEEHEKRIIIDKVKTSNTINMRKIIADVMGEKIEEFYGARIDKSEKEIFHKMEVYNKMRKTLAEIHVNIEEFSRENLDEIGYILTINTDKEAMMEAFEHANVKLSEEIKDCLISLRKTNGALFSKWHSFSLKIMKELIPEMYQQPKEQMTLLTEMGVMRGQTDKFEKNKYIPVDAADEDIFNPVVRRAVRISFKILNALMKKYGTLEEVVIEMPRDRNSEEQKKWEKERQKKNEKELAYIEKKLAAEYNILLSPTDFSNQKQLGLKLKLWNEQDGKCLYSGKTIEPEDLIKHSELFQIDHIIPRSISFDDSRNNKVLVYGEENQKKGNQTPYYYLIHANNQWSFEQSKALVMKLSKKKEYGISKKKVQNLLYSEDITKAEVLRGFINRNINDTGYAARVVLNTVQGYFRAKEINTKVKVIRGSYTYQMRVNMKLDKNREESYAHHAVDAMLIAFSQLGYEAYRKLQGEFIDFETGEILNAEKWNAQMSDEIYEQYLYGKKWSNIRTQITKAEKQVKYWYHVDHKSNRGLCNQTIRGTRTYEGKTYKINKLDIRTKEGAALFKKLAFSEKESDREKLLVYKNDKKTYENLIQIAQEYSDSNNPFVQYEKETGDCVRKYAKNHNGPRIDKLKYTDGEVGSCIDISHKYGYEKGSQKVVLESLVPYRMDVYYKKEEQTYYLVGIKQSDVKCDNGEYVIDEDAYAINLVREKMIQPGQKRGDLEALGFEFQLSFYKNDIIEYEKDGEIVRERFLSRTMPKVKNYIETKPIDRAKYEKQKLVGLSKTKMIRKYRMDILGNYYMCSRENFSKYC

SEQ ID NO: 16724 - protein, 1104 aa, unidentified
  REGION 1..1104: note = Cas Enzyme sequence
MQYIVALDIGVASVGFAVIDKKTETVIEAGSNIFPEASATDNQMRRGMRQARRLKRRKRTRLDDFTKLWEEYAFAIPQVQENDIVGLKVKALRESISLDELYLILYSYLKYRGISYLEDAEDTSLSGTSAYANGLKLNAKELETNYPCEIQKQRLEQVGKYRGQIQIEDAQGEKLDLSNVFTIGAYTKEIQQVLCTQKNYHSEISDEFCEDYLEIFTRKRKYYEGPGNEKSRTDYGRFTTRLDENGDYITEKNIFEKLIGKCSVYKEELRAASASYTAQEFNLLNDLNNLTINGRKLEEHEKRIIIDKVKTSNTINMRKIIADVMGEKIEEFYGARIDKSEKEIFHKMEVYNKMRKALAEIHVNIEEFSRENLDEIGYILTINTDKEAMMEAFEHANVKLSEEIKDCLISLRKTNGALFSKWHSFSLKIMKELIPEMYQQPKEQMTLLTEMGVMRGQMDKFEKNKYIPVDAADEDIFNPVVRRAVRISFKILNALMKKYGTLEEVVIEMPRDQNSEEQKKWEKERQKKNEKELAYIEKKLAAEYNILLSPTDFSNQKQLGLKLKLWNEQDGKCLYSGKTIEPEDLIKHSELFQIDHIIPRSISFDDSRNNKVLVYGEENQKKGNQTPYYYLIHANNQWSFEQYKALVMKLSKKKEYGISKKTVQNLLYSEDITKAEVLRGFINRNINDTGYAARVVLNTVQGYFRAKEINTKVKVIRGSYTYQMRVNMKLDKNREESYAHHAVDAMLIAFSQLGYEAYRKLQGEFIDFETGEILNAEKWNAQMSDEIYEQYLYGKKWSNIRTQITKAEKQVKYWYHVDHKSNRGLCNQTIRGTRTYEGKTYKINKLDIRTKEGAALFKKLAFSEKESDREKLLVYKNDKKTYENLIQIAQEYSDSNNPFVQYEKETGDCVRKYAKNHNGPRIDKLKYTDGEVGSCIDISHKYGYEKGSQKVVLESLVPYRMDVYYKKEEQTYYLVGIKQSDVKCDNGEYVIDEDAYAINLVREKMIQPGQKRGDLEALGFEFQLSFYKNDIIEYEKDGEIVRERFLSRTMPKVKNYIETKPIDRAKYEKQKLVGLSKTKMIRKYRMDILGNYYMCSRENFSKYC

SEQ ID NO: 16725 - protein, 1106 aa, unidentified
  REGION 1..1106: note = Cas Enzyme sequence
MQYIVALDIGVASVGYAVIDKMSETVIEAGSNIFPEASAANNQVRRGMRQARRLKRRERTRLDDFKKLWEYHGLAIPQAKENDIVGLKVKALYESISLDEVYLILYSYLKHRGISYLEDAEDSSVSGSTAYANGLKLNAKELEKNFPCEIQKHRLENIGKYRGQIQIEDDQGEKLDLSNVFTIGAYAKEIQQILDTQKKYHAEIADEFCEKYLKIFTRKRKYYEGPGNEKSRTDYGKYTTRLAENGEYITEKNIFEKLIGKCSVYKDELRAASASYTAQEFNLLNDLNNLTVNGRKLEENEKHLIVDKVKATNTINMRKIIADAMGEKIEEFYGARIDKSEKEIFHKFEVYNKMRKALAAIHVNIEEFSRADLDEIGYILTINTDKEAMMEAFDNSRLELPGEIKNCLISLRKTDGALFSKWHSFSLKIMNELIPEMYRQPKEQMTLLTEMGVMKGQTDEFEKNKYIPVDVASEDIFNPVVRRSVRISFKILNELMKKYGTLDEVVIEMPRDRNSDEQRKWEKETQKKNEKEQEYIENKLATVYDIKLSSADFSSQKQLNLKLKLWNEQDGKCLYSGKIIEPEDLIKHSELFEIDHIIPRSISFDDSRNNKVLVYRTENQNKGNQTPYYYLTHDNNKWSFEQYKALVMDLSKKKEYGLSKKKVQNLLYSEDITKADVLRGFINRNINDTSYAARVVLNTVQGYFRAKEMGTKVKVIRGSYTHQMRVNMKLDKDREKSYAHHAVDAMLIAFSQLGYEAYRKLQGEFIDFETGEILNSEKWKDQMSDGIYKQYLYGKKWSNIRNEITKAEKNVKYWYYVDHKSNRGLCNQTIRGTRVYDGKIYKINKLDIRTKEGVALFKKLAFSEKESDREKLLVYKNDKKTYEDLVQIMQDYSDSKNPFVQYEKETGDYVRKYAKKHNGPRIDKLKYTDGEVGSCIDISHKYGYEKGSRKVVLESLVPYRMDVYYKKEEQTYYLVGIKQSDVKCQKGEYVIDEDAYAINLVKEKMIQQGQKRSDLESLGFEFQLSFYKNDIIEYEKDGKIVRERFLSRTMPKVKNYIETKPIDREKYEGHDRKLVGLGKTKRIRKYRMDILGNYYLCNKEEFSKYC

SEQ ID NO: 16726 - protein, 1106 aa, unidentified
  REGION 1..1106: note = Cas Enzyme sequence
MQYIVAIDIGVASVGYAVIDKTSETVIEAGSNIFPEASATDNQERRGMRQARRLKRRERTRLDDFTKLWEYHGLAIPQVKKNDIVGLKVKALYESISLDEVYLILYSYLKHRGISYLEDVEDSSVSGSTAYANGLKLNAKELEKNFPCEIQKYRLENIGKYRGQIQIEDDQGEKLDLSNVFTIGAYTKEIQQILDTQKKYHAEIEDEFCEKYLKIFTRKRKYYEGPGNEKSRTDYGKYTTRLKENGEYITEKNIFEKLIGKCSVYKDELRAASASYTAQEFNLLNDLNNLTVNGRKLEENEKHLIVDKVKTSNTINMRKIIADAMGEKIEEFYGARIDKSEKEIFHKFEVYNKMRKALAAIHVNIEEFSRDDLDEIGYILTINTDKEAMMEAFDNSRLELPGEIKNCLISLRKTNGTLYSKWHSFSLKIMNELIPEMYRQPKEQMTLLTEMGVMKGQTDEFEKNKYIPVDVASEDIFNPVVRRSVRISFKILNALMKKYGTLDEVVIEMPRDRNSDEQKKWEKETQKKNEKEQEYIENKLATVYDIRLSSADFSSQKQLNLKLKLWNEQDGKCLYSGKIIEPEDLIKHSELFEIDHIIPRSISFDDSRSNKVLVYRTENQNKGNQTPYYYLTHTNSKWSFEQYKALVMDLSKKKEYGLSKKKVRNLLYSEDITKADVLRGFINRNINDTSYAARVVLNTVQGYFRAKEMGTKVKVIRGSYTHQMRVNMKLDKDREKSYAHHAVDAMLIAFSQLGYEAYRKLQGEFIDFETGEILNSEKWKDQMSDGIYKEYLYRKKWSNIRNEITRAEKNVKYWYYVDHKSNRGLCNQKIRGTRVYDGKIYKINKLDIRKKEGAALFKKLAFSEKESDREKLLVYKNDKKTYEDLVRIMQDYSDSKNPFVQYEKETGDYVRKYAKKHNGPRIDKLKYIDGEVGSCIDISHKYGYEKGSRKVVLESLVPYRMDVYYKKEEQTYYLVGIKQSDVKCQKGEYVIDEDAYAINLVKEKMIQQGQKRSDLESLGFEFQLSFYKNDIIEYEKDGKIVRERFLSRTMPKVKNYIETKPIDRAKYEWHDRKLVGLGKTKRIRKYRMDILGNYYLCNKEEFSKYC

SEQ ID NO: 16727 - protein, 1106 aa, unidentified
  REGION 1..1106: note = Cas Enzyme sequence
MQYIVALDIGVASVGYAVIDKMSETVIEAGSNIFPEASAANNQVRRGMRQARRLKRRERTRLDDFKKLWEYHGLAIPQAKENDIVGLKVKALYESISLDEVYLILYSYLKHRGISYLEDAEDSSVSGSTAYANGLKLNAKELEKNFPCEIQKHRLENIGKYRGQIQIEDDQGEKLDLSNVFTIGAYAKEIQQILDTQKKYHAEIADEFCEKYLKIFTRKRKYYEGPGNEKSRTDYGKYTTRLAENGEYITEKNIFEKLIGKCSVYKDELRAASASYTAQEFNLLNDLNNLTVNGRKLEENEKHLIVDKVKTSNTINMRKIIADAMGEKIEEFYGARIDKSEKEIFHKFEVYNKMRKALAAIHVNIEEFSRDDLDEIGYILTINTDKEAMMEAFDNSRLELPGEIKNCLISLRKTNGTLYSKWHSFSLKIMNELIPEMYRQPKEQMTLLTEMGVMKGQTDEFEKNKYIPVDVASEDIFNPVVRRSVRISFKILNALMKKYGTLDEVVIEMPRDRNSDEQKKWEKETQKKNEKEQEYIENKLATVYDIRLSSADFSSQKQLNLKLKLWNEQDGKCLYSGKIIEPEDLIKHSELFEIDHIIPRSISFDDSRSNKVLVYRTENQNKGNQTPYYYLTHTNSKWSFEQYKALVMDLSKKKEYGLSKKKVRNLLYSEDITKADVLRGFINRNINDTSYAARVVLNTVQGYFRAKEMGTKVKVIRGSYTHQMRVNMKLDKDREKSYAHHAVDAMLIAFSQLGYEAYRKLQGEFIDFETGEILNSEKWKDQMSDGIYKEYLYRKKWSNIRNEITRAEKNVKYWYYVDHKSNRGLCNQKIRGTRVYDGKIYKINKLDIRKKEGAALFKKLAFSEKESDREKLLVYKNDKKTYEDLVRIMQDYSDSKNPFVQYEKETGDYVRKYAKKHNGPRIDKLKYIDGEVGSCIDISHKYGYEKGSRKVVLESLVPYRMDVYYKKEEQTYYLVGIKQSDVKCQKGEYVIDEDAYAINLVKEKMIQQGQKRSDLESLGFEFQLSFYKNDIIEYEKDGKIVRERFLSRTMPKVKNYIETKPIDRAKYEWHDRKLVGLGKTKRIRKYRMDILGNYYLCNKEEFSKYC

SEQ ID NO: 16728 - protein, 1106 aa, unidentified
  REGION 1..1106: note = Cas Enzyme sequence
MQYIVALDIGVASVGYAVIDKSSEMVIEAGSNIFPEASAANNQVRRGMRQARRLKRRERTRLDDFKKLWEHHGLAIPQAKENDIVGLKVKALYESISLDEVYLILYSYLKHRGISYLEDAEDSSVSGSTAYANGLKLNAKELEKNFPCEIQKHRLENIGKYRGQIQIEDDQGEKLDLSNVFTIGAYTKEIQQILDTQKKYHAEIADEFCEKYLKIFTRKRKYYEGPGNEKSRTDYGKYTTRLKENGEYITEKNIFEKLIGKCSVYKDELRAASASYTAQEFNLLNDLNNLTINGRKLGESEKHLIVDKVKTSNTINMRKIIADAMGEKIEEFYGARIDKSEKEIFHKFEVYNKMRKALAAIHANIEEFSRDDLDEIGYILTINTDKEAMMEAFDNSRLELPGEIKNCLISLRKTNGALFSKWHSFSLKIMNELIPEMYRQPKEQMTLLTEMGVMKGQTDEFEKNKYIPVDMANEDIFNPVVRRSVRISFKILNALMKKYGTLDEVVIEMPRDRNSDEQKKWEKETQKKNEKEQEYIENKLATVYDIKLSSADFSSQKQLNLKLKLWNEQDGKCLYSGKIIEPEDLIKHSELFEIDHIIPRSISFDDSRNNKVLVYRTENQGKGNQTPYYYLTHANNKWSFEQYKALVMDLSKKKEYGLSKKKVQNLLYSEDVTKADVLRGFINRNINDTSYAARVVLNTVQGYFRAKEMGTKVKVIRGSYTHQMRVNMKLDKDREKSYAHHAVDAMLIAFSQLGYEAYRKLQGEFIDFETGEILNSEKWKDQMSDGIYKEYLYGKKWSNIRNEITKAEKNVKYWYYVDHKSNRGLCNQTIRGTRVYDGKIYKINKLDIRTKEGVALFKKLAFSEKESDREKLLVYKNDKKTYEDLVQIMQDYSDSKNPFVQYEKETGDYVRKYAKKHNGPRIDKLKYTDGEVGSCIDISHKYGYEKGSRKVVLESRVPYRMDVYYKKEEQTYYLVGIKQSDVKCQKGEYVIDEDAYAINLVNEKMIQQGQKRSDLESLGFEFQLSFYKNDIIEYEKDGKIVRERFLSRTMPKVKNYIETKPIDREKYEGHDRKLVGLGKTKRIRKYRMDILGNYYLCNKEEFSKYC

SEQ ID NO: 16729 - protein, 927 aa, unidentified
  REGION 1..927: note = Cas Enzyme sequence
VFTIGAYTKEIQQILDTQKKYHAEIEDEFCEKYLKIFTRKRKYYEGPGNEKSRTDYGKYTTRLKENGEYITEKNIFEKLIGKCSVYKDELRAASASYTAQEFNLLNDLNNLTVNGRKLEENEKHLIVDKVKTSNTINMRKIIADAMGEKIEEFYGARIDKSEKEIFHKFEVYNKMRKALAAIHVNIEEFSRDDLDEIGYILTINTDKEAMMEAFDNSRLELPGEIKNCLISLRKTNGTLYSKWHSFSLKIMNELIPEMYRQPKEQMTLLTEMGVMKGQTDEFEKNKYIPVDVASEDIFNPVVRRSVRISFKILNALMKKYGTLDEVVIEMPRDRNSDEQKKWEKETQKKNEKEQEYIENKLATVYDIRLSSADFSSQKQLNLKLKLWNEQDGKCLYSGKIIEPEDLIKHSELFEIDHIIPRSISFDDSRSNKVLVYRTENQNKGNQTPYYYLTHTNSKWSFEQYKALVMDLSKKKEYGLSKKKVRNLLYSEDITKADVLRGFINRNINDTSYAARVVLNTVQGYFRAKEMGTKVKVIRGSYTHQMRVNMKLDKDREKSYAHHAVDAMLIAFSQLGYEAYRKLQGEFIDFETGEILNSEKWKDQMSDGIYKEYLYRKKWSNIRNEITRAEKNVKYWYYVDHKSNRGLCNQKIRGTRVYDGKIYKINKLDIRKKEGAALFKKLAFSEKESDREKLLVYKNDKKTYEDLVRIMQDYSDSKNPFVQYEKETGDYVRKYAKKHNGPRIDKLKYIDGEVGSCIDISHKYGYEKGSRKVVLESLVPYRMDVYYKKEEQTYYLVGIKQSDVKCQKGEYVIDEDAYAINLVKEKMIQQGQKRSDLESLGFEFQLSFYKNDIIEYEKDGKIVRERFLSRTMPKVKNYIETKPIDRAKYEWHDRKLVGLGKTKRIRKYRMDILGNYYLCNKEEFSKYC

SEQ ID NO: 16730 - protein, 1108 aa, unidentified
  REGION 1..1108: note = Cas Enzyme sequence
MKYDIGIDIGVASTGIAIVDEEGKVLEATSSLYSEADAASNVERRNFRDSRRTKRRQHTRIEDFKKLWNAYGYSIPESLDNNVIGLRNKGIIEKISMDQLYAVLLTMLKHRGISYLDDAIDETKSSNYAKGIALNQKELADKLPCEIQAERLEKYGKYRGDSIIKNGEEEEYHSNVFTISAYKKELEKLFDTQSKFNFEITPEFQEAYMKIFSRKREYYEGPGNEMSRTDYGIYTTKKGEDGKYITEKNIFEKLIGKCSIYPDQLRASGASYTAQEFNVLNDLNNLTINNRKLNEEEKRKIVDIIKESNSVNMRSIIKKVIKEDIEQFSGARVDKKEKEIYHTFEVYRKMKKALEAIDVDINVFSREELDQIGDILTLNTEKDGIIKAFENSDKSYSKEIIDTLVGLRKKNSSLFSKWHSFSFKAMENLIPDMYEQSKEQMQLLTEMGVFKQKTSKYNDYKYIPVEKVIEEIYNPVVVRSIRTTVKMINEAIKKYGYPENIVIEMPRDKNSAEEKEKVKKAQAKNEKEYESILKKIYDEYGIEITKADYRRQEKLPLKLKLWNEQSGKCLYSGKPISVEDILDNPQLFEIDHIIPKSISFDDSRNNKVLVYRAENQKKGNQTPYMYLSHLDREWNFDQYKNYVLEMKKKNGIANKKVQNFLFMEDINKVDVLKGFISRNLNDTRYASRVVLNELQSFFRAKEDCSTKIKVIRGSFTHQMRVNLRLEKNRDESYSHHAVDAMLIVFSQRGYDAYRKLQETCFDFETGEILNKEKWDECLEEDKYDQILYEAKWSKIKEEIQEAEKKVKYHYRVDKKCNRGLCNQTIYGTRMRNGEPYKICSFNIYDDKECAALLKMIEKGKESDILMYNNDIKTYQDMLKIIKEYSSEKNPFVAYNKETGDYFRKYSKKHNGPKIEKIKYYKEKVVSCIDISHKYGYEKGSKKVILGSLNPYRTDVFVNKTTGEYYLVGVKHNHIKCKGNLYVIDEESYNKLLLNAGAINEGETLKDLERLNIVYKFSLYKNDIIQYEKNGEFYTERFLSRTMEQKKNYIETKPIDKPFFKKVEKDGQIKNKQNLVGLGKTKFVGKLVTDALGNEYKVEQEKFSLVVDN

SEQ ID NO: 16731 - protein, 1106 aa, unidentified
  REGION 1..1106: note = Cas Enzyme sequence
MGYILALDIGVASVGWAVLEKETETVVEAGSNIFPEASVAANQLRREMRQSRRIKRRERTRLNDFNKLWEKNNFCIPQRENNDIVGLKVKALNDEISLDELYLILYSYLKHRGISYLEDAQDETVSGTSPYANGLKLNAKALENKFPCEIQKERLETIGKYRGQTQITDVAGNKVDLSNVFTISAYRKEIQRIFEVQKKFHSDLTDEFCDEFLVIFKRKRKYYEGPGNEKSRTDYGKYTTRLNDDGEYINEQNIFEKLIGKCSVYEDELRAAAASYSAQEFNLLNDLNNLTINGRKLQEEEKRAIVDRVKTSDTVVMRKILEKSMGEKIDELRGARIDKSGKEQFHKFEAYNKMRKALTEIGIDITGFSRDELDEIGYILTINTDKEAMVEAFDKSDLNLSDEVKECLISLRKKNGVLFGKWHSFSLKIMNELIPEMYEQPKEQMTLLTEMGVFNGKTDEFVGLKYIPVDAAGDEIFNPVVRRAVRISFKILNAVLKKYGKLDTVVIEMPRDRNSDEEKKRITDSQKMNEKEMEFIQKKLAENYGIKLSPADFSSQKQLGLKLKLWNEQDGICVYSGRNIDPKDILENPDLFEIDHIIPRSISFDDSRSNKVLVYHSENQKKGNQTPYFYLCHSHSDGNWSFEQFKATVMKLSGKKEYAIPRKKVQNLLYSEDITKMDVLRGFINRNINDTGYASRMVLNTIQSFFKANDTDTKVKVIKGSYTHQMRSNMKLDKDREESYSHHAVDAMLIGFSQLGYESYRKLQGTFIDFETGEILDETMWNRNMSDKVYEDYLYGIKWSNIRCEIIRAEKEVKYWYYVERKSNRGLCNQTIRGTREYDGKQYKINKLDIRTKEGLKVFEGLAFSKDEKKKERLLVYKNDRRTFDDLVRIYEDYSDAPNPFVQYEKETGDYVRKYSRKHNGPKIEKLKYMDGEVGSCIDISHKYGHEKGSKKVILESLVPYRMDVYYKEEEKLYYLVGIKQSDIKAEKGVNVIDEEAYAKILMNEKMIKPGQTRADLEQLGYTFKLSFYKNDIIEYEKDGEKCLERFLSRTKPKSRNYIETKPINKAKFDKQKLTGLSKTKYIRKYRMDILGKRYLVETEKFTKYC

SEQ ID NO: 16732 - protein, 1065 aa, unidentified
  REGION 1..1065: note = Cas Enzyme sequence
MAFSFKYSGISKRKKVNGTLHLDVDVTAEFLRTEDDYVALFDWLNSRKEIDQKAFLKYPKFGLKKEIDNYRWNYVEDKLYPCNETRYAILSRLEKVGVSIDFLSDEKETVLWHILYSVSDKQEIEKALRTFAVKNGLNESFVEVFKKFPPFKSEYGAYSAKAIKKLLPLMRCGKYWDTSLIDDATRDRIERIITGEYDRNIAAKVREKAINLSDIYCFKRLPLWLACYVVYNRHSENKEIAKWETPADIDAYLASFKQHSLRNPIVEQVITETLRVVRDIWKQVGKIDEIHIELGREMKSPADKRKRMTAQIQENEKANLRIKTLLVEFMNPEYEVENIRPYSPSQQEILRIYEDTVLKREEPIPEDIDAILKKFNNSKLPTKSEFLRYKLWLEQKYRSPYTGELIPLGKLFTTAYEIEHIIPQSRYFDDSFSNKVICESAVNKLKDNQLGYEFIKNHHGQKVEVGFGKKVEILSVDSYERFVKEQYAKSSVKMKKLLMDDIPEQFIERQLNDSRYISKVVKGLLSNIVREKNDNDGYEPEAVSRNVLVCTGNVTDRLKKDWGMNDVWNCIVYPRFERLNALTGTQCFGHWENKDGKKVFQTELPLEYQKGFSKKRIDHRHHAMDAIVIACATRNHVNYLSNESASRNTNISRYDLQRLLCDKNRVDGGGNYRWVIKKPWNTFTQDTREALDKIVISLKQNLRIINKTTNIYQHFDITGNRIYKKQEIGDNWAVRKPMHKDTVFGAVNLRKVKRVRLSVALDTPTMIVDKRVKGKVLELLSYKYDKKKIEKYFKENVFFWKDLDIAEVAVYYFTENTSEPLVAVRKSLDSTFNEKKIKESVTDTGIQKILLNHLSVKGGKADWAFSAEGIEEMNRNILQLNDGKKHQPIYKVRVYESRGNKFSVGVSGNKGTKWVGAAKGTNLFFAIYVTENGKRTYVTVPLDVAIEREKQGLIPVPDRNDKGDKLLFWLSPNDLVYLPTEEERELGRINEPIDRGRIYKIVSFTGNRLYGVPCNVANVIVDKLEYSSLNKVELTDAKESIKEICIPIRVDRLGHIIEVKYRINE

SEQ ID NO: 16733 - protein, 1112 aa, unidentified
  REGION 1..1112: note = Cas Enzyme sequence
MKYRIGLDIGIASIGWSVLETDEAGEPIRIADLGVRIYDVPEDPQTGDSLAAPRRQARSLRRLIRRRSHRVDRVKSLISLTFGDEIVAELEKNKPLDIVALRVKGLDNELTPYEISRLCVYFVKHRGFRSSKKAGSKDKDEGVLLTATSENRKKLIEGGYRSIGELLYKEYSGYTLRGDRVYLYRNKDGKYDNTFLREDLLAEITQILDKQIEKGIITRDFAQKYAEIFTSQRSFDEGPGKGSPYSGTFAIGLCTFERKNGYERAPKASYTAEYSIALQRLNNLMPVRRGEQLPLTVEQRGAVLAEIEKCKEIKFDKLRKILGYDKDDSVRFNLLSYSKDKTVKAVEGAVFVTMRNSYDIRKALSYHDNPTPELLDGVAEIISKYKSLDRQESELLKLDGTITNEEIEAIGKLDATKFVHLSLYALRKIQPYLYEGYKYSEACEKAGYNHSDFSGDKRKLLKGEDITELINEIGSPVVRRAFSQVIKVINAIVLKYGNPVGVNVEVARELSKTLDERRKIQKDNDSRHVENERLKERIRSDFGVEAKGLDIIKLRLYEQQRGKCAYSGEPIDISALFHDPTAYQVDHVIPYSRSFDDSFKNKVLVKTSENQNKKNMIPYEYFGLDEKRWAEYEARVGTFDFPYAKKQLLLRKSFTEEDESNWKDRNLKDTQYISRLVYNVIQNYLLFDESVQAKKKVRAVSGGITSYLRKMWGLTKVREDGDKHHALDAVVIAVVTDKYVNNISRYNKNKELFFGEKGVYIDYETGEVISREEFDARYGKKLNPPYGEFVDELKIRLMDECEETDLYGMVHKGIRQCYLDKLAEFGYNEEQLNAVKPIFVSRVPNRKAKGALHKATVYSNKYNNPEHGKVIVKKTPLKDLKLDKNGEIAGYFSLARQSDPALYEAIKERLKAFNNDGKKAFEAEFHKPTKSGELGPVVRSVRTEEKGSIGLTLEAKKGYVKNESMVRSDVFYKDGKYYFVPVYVKDIARGVIPNKAISAGKDYEDWDEMKEEDFLFSLYKNDLILVRMKNDISLVKPRTKEKYAGKSKEMLLYYKGVDSSTGNVSIIVHDNSYEGRPGLKTALSIKKYTVDVLGNVTEITKKEKRDTLGKKK

SEQ ID NO: 16734 - protein, 1097 aa, unidentified
  REGION 1..1097: note = Cas Enzyme sequence
MSVNVGLDIGIASVGVAVVDSESGEILEAVSDLFESAEANQNVDRRGFRQSRRLKRRQYNRIHDFMKLWEEFGFVKPENINLNTVGLRVKSLTEQVTLDELYVILLSELKHRGISYLEDSEEVDGGSEYKEGLRINQRELQSKYPCEIQLERLKIYGRYRGNFTVEIDGEKVGLSNVFTTGAYRKEIQQLLSIQKTYQSKLTDDFINKYLEIFDRKRQYYVGPGNEKSRTDYGRYTTKKDAEGNYITDENIFEKLIGKCSIYPEEMRAAGASYTAQEFNLLNDLNNLTIGGRKIEEEEKRAIIETIKSSKVVNVEKIICKVTGEDAETITGARIDKDDKRIYHSFECYRKLKKALETIEVKIEEYSREELDELARILTLNTEREGILGELEKSFLDLGEEVIDCVIDFRRKNGPLFSKWQSFSLRLMNDIIPDMYEQPKEQMTLLTEMGLMKSKKEIFKGMKYIPENVMRDDIYNPVVVRSVRIAVRALNAVIKKYGEIDKVVIEMPRDRNTEEQKKRIDAENKRNREELPGIEKRILEEYGIKITSAHYRNHKQLGLKLKLWNEQGGICPYSGKTIDLERLLQNAGDYEVDHIIPLSISLDDSRNNKVLVYASENQKKGNQTPYAYLSSVQREWGWEQYRHYVLSDLKKKKISSKKIENYLFMKDISKIDVVKGFIQRNLNDTRYASKVVLNTLESFFKANEKETKVSVIRGSFTSLMRKNLKLDKSREESYAHHAVDALLIAYSKMGYDSYHKLQGEFIDFETGEILDSRMWETNLEPDILKGYLYGRKWSEIRENIKIAESRVKYWHMTNKKCNRSLCNQTLYGTRTYDGKIYQIKKIKDIRTPEGLKTFKDLVDKNKGDHLLMARNDPKTYEQILQIYRDYSDAKNPFLQYEMETGDCIRKYSKKHNGSRIVSLKYHDGEVNSCIDVSHKYGFEKGSQKVVLMSLNPYRMDVYKNCNDGKYYLIGLKQSDIKCEGRHYVIDEEKYAKVLVNEKMIQPGQSRKDLPDLGYEFVMSFYKNEIIQYEKDGKFYKERFLSRTKPASRNYIETKPVDKPNFEKRHQIGLAKTTFIRKIRTDILGNEYNCDREKFSSIC

SEQ ID NO: 16735 - protein, 1130 aa, unidentified
  REGION 1..1130: note = Cas Enzyme sequence
MKAYNKTNFRGDNMANYVLGLDIGIGSVGVGLIEKETGEIIHKSVNLFPSGDAASNVERRGFRGAKRIKRRKTHRIKRTEDLFEKYDIDVDLLSVPINLNPYEIRVRGLNEKLSLTELFVALKNMVKHRGISYLDDAIDEDNAATSGSDYKKAIEINARELKNKTPGEIQLERLEKYGQVRGDFSVKLEDGTERRLINVFSTSEYRKEAERILKTQQQFYPELTDEFISDYLEILTKKRKYYHGPGNEKSRTDYGRYRTNGETLDNIFSILIGKCTYYPDEFRAAKASYSAQEFNLLNDLNNLTVPTETKKLSLEQKEEIIQFVKDAKTCGAKNILSKIAKMIGCKADDITGVREDKDHKAEMHSFEAYRKMKQLETIDVASLTREQLDQLGRILTLNTEREGILESIHEYLPDTFTNEQIDELIQFRKKNTTLLNKGWHSFSLKLLNELIPELYHTSEEQMTILTRLGKQKPKNESAKTKYIDGELITEEIYNPVVAKAVRQTIKIVNKILQEHGEIDTIVVEMARDKNDEDQKKRIQEGQKKNKNEKDAAILAAAMDYSNSKELPSTVFHGHKDLALKIRLWYQQEKRCAYSGREIPIAQLINNQGGYEIDHILPLSLTFDDGLDNKVLVEHIANQEKGQRTPFQAMPLLTNSWSWGEFKHYVINNSRFSKKKREYLLFEEDINKFEVRSKFIARNLVDTRYASRIVLNALQDFFKQRGANTKIAVVRGQFTAQLRRKWGIEKTRDTYHHHAIDALVIAASSQLKLWRKTKNTLIRYSENELLDTETGELISDDQYKENVFQAPYDNFTKVLKSKELEDSILFAYQQDSKVNRKISDATIYTTRKRGDEEITVAKIKDIYSIEGYDEFLKVYQKDPSKFLMAQHDPVTFEKVIKVIVETYPDKEINENGKEVKVSPFKKYYDEHGFVRKYSRKGNGPVIKQLKYLDKAVGKHIDITPENSSRTVALKSLKPWRSDVYFNPETKRYEIMGLKYSDLRFQKGGDYGITKEKYDVIKEREKISENSVFKFTLYKNNLVLVKDTETNEQQIFRFGSRNETNFNYVELKPYDKAKFDSKEKLVKFGTVASSGQFIKSINIDNLSLYKIETNILGKKYIIKNEGEDPQLTFKNF

SEQ ID NO: 16736 - protein, 1003 aa, unidentified
  REGION 1..1003: note = Cas Enzyme sequence
MSSKMRYRLALDLGTTSIGWAMLRLDQQDRPCAVIRAGVRIFNDGRVPKTGEALAVQRRLARQQRRTRDRSLRRKNKLINMLVRFGFFPENLAERKSLERLNPYELRAKGLEHQLKPEEFARALFHLAQRRGFKSNRKTDRGDAESGVMKTAIEETKQEIETLGCRTIGEYLYKRLQAGLGTRARLRDKPKVKGGATKSYDLYLERSQVETEFDALWDVQSRFAPELFTQEKREALRDTIFHQRDLRPVKPGRCTLFPEEERAPLALPSQQRFRICQEVNNLRKIDEHLCSIELTQTEKAKLVQALSGARKKTFEQLRKVIGYEGQFNLEEAGAGRADLKGNETAVVIGKIIGKDWLKYSLSEQDKLVLMLLNIESESELIGKLQEEFDLSEAVAKKLSGAPLVNGYGSLSRKAIDLILPFLEQGMTYDKAVAAADIPSHSDLTWQVKSDELMDQLPYYGEVLQRHVGFGTGNPEDAPEVRFGKIANPTVHICLNQLRLVVNLIIKRYGNPDGVVIEVARDLKLSREKKNEIVRKQKKNQEKREQVRKEIAAILECDETLVTSEDIEKWLLWEELNPGNALDRRCPYTGRQISAVDLLSKAFEIEHILPRSRTLDDSRANKTVSYWEANRLKSNLTPWEAREIFEAHGWNYEDILKRAENLPPNKRYRFGADGYKTWLREDSDFLARELTDTQYISRIAREYVSFVCPKNTYVIPGRMTAMLRHCLGLNTILSDDDKKNRNDHRHHAVDACVIGITDRSLLNKIAALSARGEEQNDRKFQRSVEEPWRGFRESVCRAVERINVSHRPEHSYEGQMHDQTAYPIDKNGQGWKKEVKSNGQTEWKKISVIPIVSQKAAQRHGYLSDGTLRPYKGYSGNSNFCIEITVNEKGKWQAEFVTTYDAYQIARKFGKDKLYGKESQSGHKLVMRLMKKDVVAMEDVDGCRRLYLLHKFSTNGVLSFAPINESNVSARVTEGSFKYVSKTAGSLQRAKARQVMLSPLGDRS

SEQ ID NO: 16737 - protein, 1003 aa, unidentified
  REGION 1..1003: note = Cas Enzyme sequence
MSSKMRYRLALDLGTTSIGWAMLRLDQQDRPCAVIRAGVRIFNDGRVPKTGEALAVQRRLARQQRRTRDRSLRRKNKLINMLVRFGFFPENLAERKSLERLNPYELRAKGLEHQLKPEEFARALFHLAQRRGFKSNRKTDRGDAESGVMKTAIVETKQEIETLGCRTIGEYLYKRLQAGLGTRARLRDKPKVKGGATKSYDLYLERSQVETEFDALWDVQSRFAPELFTQEKREALRDTIFHQRDLRPVKPGRCTLFPEEERAPLALPSQQRFRICQEVNNLRKIDEHLCSIELTQTEKAKLVQALSGARKKTFEQLRKVIGYEGQFNLEEAGAGRADLKGNETAVVIGKIIGKDWLKYSLSEQDKLVLMLLNIESESELIGKLQEEFDLSEAVAKKLSGAPLVNGYGSLSRKAIDLILPFLEQGMTYDKAVAAADIPSHSDLTWQVKSDELMDQLPYYGEVLQRHVGFGTGNPEDAPEVRFGKIANPTVHICLNQLRLVVNLIIKRYGNPDGVVIEVARDLKLSREKKNEIVRKQKKNQEKREQVRKEIAAILECDETLVTSEDIEKWLLWEELNPGNALDRRCPYTGRQISAVDLLSKAFEIEHILPRSRTLDDSRANKTVSYWEANRLKSNLTPWEAREIFEAHGWNYEDILKRAENLPPNKRYRFGADGYKTWLREDSDFLARELTDTQYISRIAREYVSFVCPKNTYVIPGRMTAMLRHCLGLNTILSDDDKKNRNDHRHHAVDACVIGITDRSLLNKIAALSARGEEQNDRKFQRSVEEPWRGFRESVCRAVERINVSHRPEHSYEGQMHDQTAYPIDKNGQGWKKEVKSNGQTEWKKISVIPIVSQKAAQRHGYLSDGTLRPYKGYSGNSNFCIEITVNEKGKWQAEFVTTYDAYQIARKFGKDKLYGKESQSGHKLVMRLMKKDVVAMEDVDGCRRLYLLHKFSTNGVLSFAPINESNVSARVTEGSFKYVSKTAGSLQRAKARQVMLSPLGDRS

SEQ ID NO: 16738 - protein, 1117 aa, unidentified
  REGION 1..1117: note = Cas Enzyme sequence
MPDTFLFYNNYHKGQYSMRYRVGLDVGTASLGVAAISLDKQGQPTDLVWKHVRIFDEPLESGQAGLKSKKAGRRTARMQRRQIDRRKSRTKQIAQLAPLLGINMQASPDSGRTLLEIRAKAAREKIDLSDLIRVFIRIGKRRGYAGEFRGKKEGAKLGEVESGSSDLKKELKSMAESKGLAEVTLGEFLYQRWLDKKPTKLKIKESTDKSTEYPNLYALRSQLEAEFEQIWQTQAAFYPVLNSQHQDKPLKEIFHQTIFYQRPLKSVGGMVGQCNLEPTLTRAPRAQLAFQRFRIEKTLSDLRWGAGKRAEKLTPEQKTVIRQLCDEKKSVKFNAIYKALESANYAKPETKGLNLDRLSRDEIPGNKTNHVFRKLELDKEWLALDERTQIQVINFLADLGSPEQLDDPVWHTRFAKADGTPRILPEPFVIFINQLKDHKDFDRLSKLGFEGGRASYSIKALNKLTDWLETPWWPENWQNEMHPDEDTAVRVCYPHRFGQARQLLNQLNPQPKTGNAVVDGSLRQIRYVLNRMIDELGEPPEQIVVEMAREMGVGISKRNQRETENNNNRNARLAAEQAIREHGVTVTPSRVRRYLLYVEQGKGHCPYCSVKINLGDALNGAETEYEHILPRSLTQVGLKRSEIVLAHRSCNQDKGNRTPFQAWGHDQERWQIIQARAKYFAANKHHRKAKLLLLEDYEAEVLTDKSIDGFADRQFHQTSWIAKEAAQWLQTISKTPVSVSRGELTAGLRRKWKLETVIPQARICEGLPVLDEDGLVITPEDFEKYRDVWEGHKVDKSRYTDRKLNKRIDHRHHLIDAITVALTSRSLFQQMARQYKLDSEHVINGEKPKLRIGEFLPLKNLRELALAAVKECPLSIKPDRYPDGAMFQETAYGVAVKESGGRSMLTLRKKITDLIDRKKGTTEQARKAIESIVSKTVRELVSQAFETRIAGGFSAPEALAQPIFQTLYGEPMEIKKVRCFTGNYADDVAIIKHPNKDKSEFAHIKYLPHAGYAYLETEMRDGRIERQELVNIQQAMKQKSTPVNDGTFRFHKGDSVVDLEDGKRYKICYFKVSGIIALLPLCEPRSFKEANEKAPTEAKVGKTISFKPAAKRLKAID

SEQ ID NO: 16739 - protein, 1558 aa, unidentified
  REGION 1..1558: note = Cas Enzyme sequence
MKSQEMTWGYDLGKGSIGEVVRLKKTGKVDFPHKKVWLFPPDFGRRGPTTKTGTPASRYRAWKTRNAHKKREEWLDEIWQAGGMTILHGRQVAVAGGTWRLVQKGDPRLESEAVGTKPEDCCSSCLLRIRLLRPGEKLVDWQIYKALRAAIQKRGYTSVPWERGGKPKENLTSEEQAETDKGNARWTKFAGLPEIQRLGKDFQLPCYYDAFHLELWSPGTPHKDCNGVVNAAANEHTRKVIFDGAAVEREVLLLAKNAVALFPQLQDGFQKVMDKYKQSVRERVANINARRALHNKPVIHIPLRGGATSFGELLAFGVGGRPNTPDDKRRIASWDPTIQKDMGLKPGSPQDQKAGLGQIVARFENRLRAECALIRRRPGLPPLAVCRNPSKEKIAKAKADDDPCLLPAQFTFLSKLKNVCVEEKVEPHKQRKLYPAEITRIFAEHNPKRKYSITPGQWREWCNEFGVQPALDLKEKIEDAEDAAGNNQESKAKKKKAFVVDPPSNEGRSRFSRPALRILNKLILSGLKPSEMRTLLEKRDEQLLNGLKMDILDVPPITVVGEKGREFIKQPRTWLLVSDLDFFSRMRNAEGQEDWDNFFIPSSNLDRLAAESNATQKERHDSIKKLIGQQSNPIVRHRLTAFWERLKAMESKFGIPDRIVLELIRDDPENSWLGKDTVKEIIKFQAKNRERREEARKLLKQMPQYKNEEPSETTVTKFMLWQQQGGECLYGRQVKEAGNVYVETGLPFTQLEQFRIDHIVPRALGGSDSIHNKVLTDDDTNARKGDRTPFQWFHDDRVEQWQAFRDRVLKPNKSLGGKKIRLLLSANAEELVSRYTPLAETAWIARLAQVVAGLHFGWVNGIDEKGKRRITRVSGGLTGRVRRQYNLNTLTGEHADRPLPTDKEERKDWEVQGEAERATKDRKDRRHHALDAMVLTFLEEWVNDPEREGEFRFRDLGDNPAYLPQDHFARRREYERIAQLQEDFKTCRTTGRGDEIQREITRCRDRLAQMRQRRNWRPVREFFEKQLKGTSPDGQPVIPVYRHYERPRMEATLHRGTWMLEENSKAEQSTVEDFDKAFKTEKMPLVNLPYRVREDVSEKLFDLEHARRRAAAIASHKDYNEEVVRKIIQEFLRSNPTEKDWQQFATSEQIPALIKRKKGEPETRNILLYKLKEVRTKRVSVFETGLGKKSVAVFDSDHFDDQLARLVIKPERPKKGDIKIAATPSSSSASPRPNTGLQSLLRELKPRIEQFFREHDPDMSEKSEAEEKAFKVALDEFAKTQGFDKHLPFYLSTPQEKPDDDPWEKKTLRGFLVRNEKRFSGSAAQKEAFAVIDPWIRIQLRYFYRTNPVPKHWRKFCDVFCQVKREHFKTFVTDADRSAVDFIEFYRAAKESGGGVQPIKSVHQLIGENLEEYVDVSKDHTGQYAKGGNRGYFIYKCKQDEESVWRAEPVRAFQSVQKIKERLLADSTVQPLWETEPNGKKVWRLWRTNMLLRLRQAVETGREGKKKRIEEGYYFLGSIQCEDSNDYINLKSPIGKKVPAALVFHDVMKAGLEFMSGD

SEQ ID NO: 16740 - protein, 967 aa, unidentified
  REGION 1..967: note = Cas Enzyme sequence
MVVKYRLGLDVGTASVGAAAVSLDKDGQPDALIWHHVRIFNEPLENGQAGLVSKKAGRRKARMQRRQIDRRASRLRHIAHLSSLLGLKRAEITPDDGSTLPYLRAQAATERVELDNLLRIFLRLSKRRGYKGEFKAKKKGEVAEGSSELSFAMRALATERGIVLKNENDTGITLGQYLLYRLESGLPTKLKIKEINDESKNKKGEDANAPKNLYALRKMIEHEFNTIWDTQAKFHNILNGTHDGIPIREHFYEALFYQRPLKSAAELVAQCSLEPTLSRAPRAQMAFQRFRIEKTLADLRWAAGKRAEPITPDQKRVIRDLLDRNDKVKFDEIYEALKNAECAKPETKGLNLERASREELLGNSTLAALRKLDKYSTKHHPERAANLEQAFRALDEKIQIATINFLAEIGSPEQLDDPEWHTCFVKSVKDVKVKDNKSKEQWKYKNVPRVFSPELISFVNCIKEHDNFDRLSKMDFDGGRASYSVKALNNLAGWLEEPNWPGDWQDDMKRMDEEAAIRVCYPKSLNPEIKRLQTLPSPESTGNAVVDGSLRQIRWTVNKMIAELGGPPDEIVVEMAREMSLGIARRNEREKEITNNQKARREAEKTIREHGEVPTRPKIFRYLLWAEQDESFCPYCNKTINLTEALSGGATANEHIIPKKLTQVGKKRSELVLSHSVCNDAKGDFTPFEAWGNGKNEMRWQAVEAAAKRFLAKALSLKKKIDNARRNDTLAPYRGEMNGLFRKAALLRLQDAGDDESVEGFADRQLHQTGWIAKEAVQWLECLCPKRVSVSRGELTAMLRRSWKLETVIPEVRIENNLPVLDNEGKPIEPEYFSQLKKYLEGHPVRREDREANPGFEFNRRPDKRLDHRHHLIDAITLSLTSRSLFQQMAKNYKAAAEKMQPRDGETADDRERRIKNETRLRLEVPEPPLRNVRAAALDAVRECRITIKPDRYPDGALFKETAYGVA

SEQ ID NO: 16741 - protein, 1022 aa, unidentified
  REGION 1..1022: note = Cas Enzyme sequence
MPFRYRLALDLGPTSLGWAVFRINAENRPIALVLSGVRIFSDGRNPKDGTSLAVTRRLARAMRRRRDRLLKRKSKLIAALIKHGFFPADEKERKALEVLDPYRLRAEGLNRALAAHEFGRALFHLNQRRGFKSNRKTDKRETDSSVMKSTISSVHNALEEGGFCTVGEWLYQRSRQGQKVRARFNAQRITTDAGKTKIEKSYDLYIDRAMVEHEFDVLWARQAKLDPELFHEQARAELRDILLFQRRLRPVDPGRCTFYPKEARAPLALPSVQRFRFYQELNNLRWLDDSLVERPLTLAQRDAMAAALETSVKKTFQQLRAIAGLGSGATFSIEDLKRQEFKGNTTSCILSKKQHFGSRWGRFDEALQDEIVIRLLMEENESALIAWLQERTGVDEAQAEAIANVALPEGYGRLSLKAIRKILPALREDVRTYDKAVLAAGIDHHSHLGARATGEILPELPYYGKALERHVGFGTGNPEDPEERRFGRISNPTVHVGLNQVRVVVNELIRRYGHPAQVVIELARDLKQTWEQKRETEREQAANQQRNTLYRREIANVLGIGEEQVKRELIEKRILWEELSFDPVKRCCPYSGEQIGLKMLFSDEVEIEHILPFAKTLDDSLNNKTVALRRANRLKGDCTPWEAFGRQEVAGFKYDDILQRAQAMPQRKRYRFAQDSMEQWLKNDKSFLDRALNDTRYLSRLAKEYLEWICPQATWVVPGQLTSMLRRIYGLNNPDILGWWGQKNREDHRHHAIDACVIGVTDRWLLQIMSDTSARARDQLHGRLLKNMPMPWPTYRDHVKRAVSHIWVSHKPDHSYEKAMHNDTAYGLLPGGYVRVRKEVDGVRVRTTEKLAVIPISSAKAGPRHGFLPDGSPKPYKGYKGDSNYCIEIVRDKASGKWMGEVISTYQAYQVIREHGRVNGWNRLRHPGCGLSGRSLVMRLMINDIVRLEDNGELKTWRVAKISGNGQIYFADVHEANVDARNRDKNDSFSYVSKMAGSLNKAKARRVTISPAGRLADPGYVP

SEQ ID NO: 16742 - protein, 1104 aa, unidentified
  REGION 1..1104: note = Cas Enzyme sequence
MKYRLGLDIGIASVGWCILDEDNSIVKAGVRLFPEGSSDENQKRRGRRASRRLLRRRQFRIERVRELLYRYEIIDNYNYDFYTNETTPYHIRKKGLYEKLSKKELAIAMFHLAKRRGAGEFNIEIKEGDEESTKSILADNEKLLREGKYICEIQLERFENKTQEVRGNRNNFKTSDYIKEIRKLIEIQREFYPNLDKKFEEEYVEIIEGRRKYFEGPGKNSPYSWKSQEEWMEGLMGNCTYFPEELRLVKNCYTAEKFNLLNDLNNLKIKRAENDRITKEEKLELLKLFKGAKTEKSVTLKKIASILNVKEEDISGYRVKKDGSPEFAFLKSYVEINKIFKCDDVDILDSISKIATYYQDVETRKEEYREELKGVAGVTEEVIDTLAQKIKFTGSHSLSKKAIKLIENDLLETSKNQMELFNDYELVPYKMDFKDEKIKYISKDYVNNWVLSPTVKRSMFQTINIVNEILKEYGTPDEIVIELAREKNSDDMRKTLKDIQNKNEKENKEIIELLEDKKLDKRYFELLKYWRKQDGICMYSGEMIGIDEILQNPLAFEIDHIIPRSISFDDSQDNKVLVRRIENQKKGQRSPYEYFSSKMTERSYEEFKAQVLNMFDNKKISLKKRDLLLLEEDISKYSRNFIARNLVDTRYATREFMSLLRVFFRDKQEKVKIKAIRGSFTSQIRKEWKMTKMREISHNHHAQDAYIILMAEKTLHKLKWVKDFDENDELVRTYVRKEEILNDEDFKKLFDYKYSTPIKEYKDFSYSHFVDKKPNRQLSDETLYSTGIFEEKDKKGKKIDNEYIIGKISNIYDKKSNVVNFFGDEKKHSSLLMYHHDKQTFDKMLKIFNEYGGKGAKVNPFTKYFEEFGKIRKYSKKENGPEINDLKYRVSQLGNHLDITHKYKDSKNRVVMLSIPTYRADMYFNGKDYKFISVRYLMLRDRGKYYIIDKKEYEKEKNRKGIDEKYNFVFSLYTGDVVEVERQDGSIEKVKFKGVNNDERKCIEVDNVERNYGSYIELIREVVTKKKEAEKNGIRYNFEEELSVILGVTLTKNEGEEFVNSTPLSSKQKIITIGGDIKRLRKIYTNVLGKEYNGKEKLEEIIKK

SEQ ID NO: 16743 - protein, 1104 aa, unidentified
  REGION 1..1104: note = Cas Enzyme sequence
MKYRLGLDIGIASVGWCILDEDNSIVKAGVRLFPEGSSDENQKRRGRRASRRLLRRRQFRIERVRELLYRYEIIDNYNYDFYTNETTPYHIRKKGLYEKLSKKELAIAMFHLAKRRGAGEFNIEIKEGDEESTKSILADNEKLLREGKYICEIQLERFENKTQEVRGNRNNFKTSDYIKEIRKLIEIQREFYPNLDKKFEEEYVEIIEGRRKYFEGPGKNSPYSWKSQEEWMEGLMGNCTYFPEELRLVKNCYTAEKFNLLNDLNNLKIKRAENDRITKEEKLELLKLFKGAKTEKSVTLKKIASILNVKEEDIFGYRVKKDGSPEFAFLKSYVEINKIFKCDDVDILDSISKIATYYQDVETRKEKYREELKGVAGVTEEVIDTLAQKIKFTGSHSLSKKAIKLIENDLLETSKNQMELFNDYELVPYKMDFKDEKIKYIPKDYVNNWVLSPTVKRSMFQTINIVNEILKEYGTPDEIVIELAREKNSDDMRKTLKDIQNKNEKENKEIIELLEDKKLDKRYFELLKYWRKQDGICMYSGEMIGIDEILQNPLAFEIDHIIPRSISFDDSQDNKVLVRRIENQKKGQRSPYEYFSSKMTERSYEEFKAQVLNMFDNKKISLKKRDLLLLEEDISKYSRNFIARNLVDTRYATREFMSLLRVFFRDKQERVKIKSIRGSFTSQIRKEWKMTKMREISHNHHAQDAYIILIAEKTLHKLKWVKDFDENDELVRTYVRKEEILNDEDFKKLFDYKYSTPIKEYKDFSYSHFVDKKPNRQLSDETLYSTRIFEEKDKKGKKIDNEYIIGKISNIYDKKSNVVKYFSDEKKYGELLIYHHDRQTFDKMLKIFNEYGGKGAKVNPFTKYFEEFGKIRKYSKKENGPEINDLKYRVSQLGNHLDITHKYKDSKNRVVMLSIPTYRADMYFNGKDYKFISVRYLMLRARGKYYTIDINEYEREKNRKGIDEKYNFVFSLYTGDIVEVERQDGSIEKVKFKGVNNDERKCIEVDNVERNYGSYVELIREVVTKKKEAEKNEIRYNFEEELSVILGVTLTKNEGEEFLNSISLSSKQKIITIGGDIKRLRKIYTNVLGKEYNGKEKLEEIIKK

SEQ ID NO: 16744 - protein, 1062 aa, unidentified
  REGION 1..1062: note = Cas Enzyme sequence
MIMNNTNEHIWGFDMGKGSLGEAVRIGYEFKHVQSLIIDPEFAEIKTAANARRQMRTRKAHLAREKFLEKCLQECGIDVLQRRKVDIVDGKWQLVSKGDVRLEKEFPSANENICYNSIALRCKLILGEKLESWQVFKALNSAIQNRGYDENLPWKETETSSKENNEYSQKLKEFEREKDELLTNLPKLDEKLRSKFDYSCFFKAYKMGLWNPENPDQVNLRIDNQAQKAKCYVIPRKYVEAEFIKLVEMASLQFPKLKNKAMYILYGITEKPYASFDPTMRKEFNLKRGADTDWTALGQKIPCFDNRIVNKCKLIPRFNVCKVKKLDEIKSENDLLHYEITLALKLLNLRFFRNNKEDSLTFEEFKKAFDLAKNNKFKLTKTNVKKLFKELGASVLNEDQSEIEAPSESGRSSFSRPAMKLLKELIFSGISPNEFYQEKIKAITNTDTNKGLVVTDLDFIKLMNATSWNGIYIPDVETYQYAISQNTNSAEQINKIIGSQNDPIVRHRLAFFYERIKSLEKKFGAPDKIVLEFVREDFLGKKAKKDLQDAIKKRAKEKLDIAKKLDEEGFKGNKMLLKLELLQKQGGICLYTGNAISPSDLPSLEIEHIVPRSRGGPDAQYNYVLTDEKTNKEKDNKTPFEWLCSDKQRWASYVDRVRSRTKELGKKRVALLLSENAEELVEKYTALAETAWIAKLAQRIACLHFGFQFGGTTGQKRVFTVSGSVTASIRGAYGLNVILHNTVIDKTKLTEVEILKKHEELEKKNRANKKHHALDAMCLCFAPTGINVKKTKSNQILPIKIAKDAEAYFRKYLDAIIPNEVATKKPRLEESIYAKRIINGKECIVKKFNLIELAYKSGLKPVFDISTIQKLVNSGSKGIINPVIRNIIKEFVDTNPSEEEWINWCNTIRIPAKHGNGTRIIRVQAFVGNPDEYKDLSKDNCGAYRKGDAHKGQIIWKSKNGKYYVAPIYTHASKQTVLESLKQKKDFVEIAGVFRSRCLVKLEDAVYNDVGIPLLPKGIYLLNTIKTNGFAVLTNANGEKTKSPISINYLMQAGMKRITMEY

SEQ ID NO: 16745 - protein, 962 aa, unidentified
  REGION 1..962: note = Cas Enzyme sequence
RIALLQGKKLDGWQIYKAVWSAIQHRGYDEKNHWKNDDDSAENKKNVNEYIKYCKDNKFEEKYWLPCYVDAHRMGIWSPEDSNNLYRKRNNETNPAPARNKNHSKYHLVFPRSKVEEELKHLLSQAAKLFPKLAGKENYIVYGPGEVQYASMKKMEFSKYRGKEWDWQGLLGQKIPRFDNRMLNKCCCMSHFNVCRADDMLNQEVMFLMMLKNMRYHSKNKPDEMLTAEQIKELFNKFKDRLKFEKNEKDKVKNRKKEVIPKSLLRKWVIEKLNGEIHPAHSLIPMPNAGGRSRYCRPALEVIREVILSGKTPKQVYEECVAKNKIENPEQNSKKGRIQSDFDFLIKKGTSEKWENFYISDNRYELREMSADERKIEIEKTLNEINNPIVSHRLKWFKKELNKLAFGEPEKKNPGYGIPEKVVLEFARDEFMGKQAKEDYYKFIKEQTKERKIVVEELEKAGFSKPSGEMIRKMMLFRQQDGIDFYSMQNIKLSHLGEYEIDHVIPRSRGGSDAFYNIILTTNKNNSAKGDKTPYEWLGKGDIWDNISEKLKVNKKMGSKKKLLFMASSEEQYKLLIDKYTQLSQTAYISKLAQKVTALTFGWGMQTKDDNRNIVIATGGQTARIRSRFKLDRLLHSGMTDEEFEKALRNGEIEKKNRSNPRHHALDALVLSAVPEIRVDKNRKGKYDDIYPSWLTRDFCEKEVAHVYPKQIKFSKAQLAEVLYGKREVKKEDGLWYTYAITRQNEGTRIEDYYVKKSEKKSDIEDMEKLRNKILKKVNHIFSNDIRTDFKKKLEEKPTEEQWNDFIKNYKVNGTCPHRISVIGNPGVKGFKEKQPLPPNYKEIRPNSKQYYETKTGQKWSYTAQLICLNEKDEWEVHPVYAWDSLYERIKKAEQEFKKVVKFHSRQSVEIKNDCANGKIKKGIYILATIQNGNWGVLESQGEKIDASLNELMNIGEMWPII

SEQ ID NO: 16746 - protein, 1080 aa, unidentified
  REGION 1..1080: note = Cas Enzyme sequence
MNATTKSPDTNLELAFDVGHSSIGWAVLQHTNGSATVPVASSVNILGCGVVTFRADDCLASTRRSYRRQRRHIRSTRQRIARMKRLLLHLGVLTEAQLNSPGCGWPWKLAAKVLVTGGQQTLTWRELWDVLRWYAHNRGYDANRRWSRGDAAGEDDDTEKVETAKSKMKEYGVQTMAETFCRYLGIDPLGPKLSSTARFKGLNAAFPRELVVDEVKRILEAHFGKLNGANETLVKSLFTDWRATPCPSIKVPKRYQGGLLFGQLVPRFDNRIIAKCPVTGEKVPSRNTSEFLNFRWAMQLANVRVGKSGNAEFRALTPEERKKVDAVMRAQGRLTEKEFKKAVRDTTGTERDNLDALLLHPDAKKALLLDPVQDCISSSRLQAVWPKFTPRMQKRVRGQLRRGKLLTLATIRADMERLGEAIASLDGEIQRMLDAAAARGSKKSKLLTRESLLAEMFQAERLDGRAAYSRPVLQKAFDEVMAGTHPKEEDGCLFVTEQMRQAQLQRSLAEQTNNHLVRHRLLILERLLRDIIKEFANGEKSRVGKITIEVNRDLREMSGRTAKEKAQDLGRRIADHHRVAEKLEEAFKGQRFSGQPIRVTPGLIRKGRIAEDLGWTCPYTGQKYEPIDLVTRKVDKDHIVPRSSRLSDSLDSLVITYSTINKWKGKRTAYRFVEQEQGKPVPDLPNQMIVSLTRYKGFVEALDVKKGHGDDQRRKKNRQRLLLTPSYEEEEFVPRDLTQTSQLVRLGAQALKRGFSGLDNPPTMVSLPGSVTGVVRKGWNLLGCLTQACPQVLDEAGDVRTKTEIRDITHLHHALDACVLGLASYFIPSNGSIWQMIIKRKLDDGEKLQLRGLGIFDFDSEGRFGLREAPDAIKAEIRKRLSEKRVVQHLPKRTTGMPVDQNMWRLRGWNDKGKAILEKHSRDASGKRKRDNPKAGADSKDRLVGWQPENGSGKLQRLKAVLISNENFGVALTQPKPVIVPFHKVHKRLEELKHSNAGKMPQVIRAGALVQIPKGTHNGSWRVFSIKNNANGVAFALGQRDALHPDPSKQNVLVRQLEKDGMVVQGTALTGIPVCPTTSS

SEQ ID NO: 16747 - protein, 948 aa, unidentified
  REGION 1..948: note = Cas Enzyme sequence
MAEVFCEISCLDPLGDKISCNQAGNKRPKATNAAFPREVVESEVRTILQKHIGHLHGVDEAFIRCIMEDWTAIPCPQIKLPSRFGQVLADGTLAKGGLLFGQLIPRFDNRIISKCPITFERLYQSVLAETGDIEKSKLEANKLCKVPSKNCREFLRFRWAMQVANIRIAHAEKRETRALTIKERKALDSSIPKEGYFTPTGLKNAVRKITGGAPDNLDQLLVHPDAIEALLIDPARKALSRVPWSDVAFALPDKQLGIVLNKLRRGSSISLRDILVMNHPSRTALDEAIAAEAKKKRKTSADEIFGIWQNEKASCPRMNGRAPYSREVMSDVDGFVFSTDRHPVEGTPEGKDNGPLYRSEEIRSAQLQRDIDEQTNNRLVRHRLLILERLHRDILKEFAEGNAERVSRVTIEVNRDLREMSGKPNKLIEQELGLRLGNFKSVATRLEADLKPHGIRVNAGLIRKARIAEDLGWKCPYTGQSFDALDLHGRTVDKDHIIPRSQRPSDSLESLAITYSEVNRMKGNMTALAFIEQFGGQQVAGRNGLYVHTRQQFEALVNSLETRRGHQDDQRRKKKRKELLLLRDYVEKEFTPRDLTQTSQLVRMGAQILEKAYLGNANKPVITSLAGSVTGTIRKAWNLTQCLATANPLILNPEDLDSNGNPRPHPKSEIRGITHLHHALDACVLAFTSLFLPRDGGVWGLLVKRRLNPQEASYLKDRLGNMVQIAKDGTFQIADLPNFLKEQIHTRLAEKRVCQHIPSEIRGLIVKQNAWRVIAIKDGKVHLKQRMRQADGTRSTEEKELKEGKVLGISPARGSGKLKKIKAALEISENYGLALDPEPQIIPFHKVHQRICELTRKNGGKRPRILQNGMLIEVRKKGRRADYRGIWKIFSLKDNATGPAVDMGWPDAVALKNKTQGHKINVNLQSLLESDMRICAPLLTGTTWGTCE

SEQ ID NO: 16748 - protein, 1140 aa, unidentified
  REGION 1..1140: note = Cas Enzyme sequence
MSIKNKILRGANANLHVSFDVGHSSIGWAVLEKTSTQASDIKINGCGSVVFRADDCLASSRRAYRRQRRHIRSTRQRIARMKILLKHLGVLTEAELNPKDKDGRLKPGCAWPWKLAAQILQGGKLLTWSELWDVLRWYAHNRGYDGNQRWSNNSEIESEAAELDDAALDKILKDASATEDEKKDAEKVIEAKNLMRRHGVRTMAETFCKELGIEPKGEKKSSMKRFKGLNAAFPRKTVETEVLQILQAHKSCDVKLAHLLIARKLSDEDRKFLKSAGIRLPKRYEGGLLFGQLVPRFDNRIISNCPITYHQIFEDQIEKTGDLKTAKHIAKKLSKVPSRNCPEFLNFRWAMQLANIRIACAGEKELRPLTAAERKIIDQVVREKGGVTPFQLKLIVREKTKCVRDDLEQMLMLPDFEKALQLDLVQKMIVSDDFQPFWKLLPERLQKRLRGQWRRNKVFSLAQIRTQLESLGDTSAFDAELQRQVDAHNSKAKKIEKQKSREKWLQEHYPSKSLKLDGRAAFARHLLKRAYEEVMAGKHPKEEGGCLFISEEIRQKELNREITDQTNNHLVRHRLLILERLLKDIVKEYADGKKERIGKITIEVNRDLREMSGKSNYKKQADLNNRIKNHHAVAEKLEKAFAEESNGKRIQITAGLIRKARIAEDLGWKCPYTGQTYEPKNLITRFVDKDHIVPRSERVSDSLDSLAVTFSAVNKWKGKRTAYQFVEQEQGKPVPDLPNLFIMSLARYKQFVDSLESYKGHDDDKRRKKKRKELMLLPKYEEKEFTPRDLTQTSQLVRLGAQVLKRTFADCKEKPTVISLPGSVTGTVRKAWKVLGCLSLANPQIMEEVLDERGKKIIRAKNKKEIRDITHLHHALDACVLGLSSHFIPNNGRVWELIVKRNPNDLEKRQLEALDVFGFNAEGRFEMHDLAEKLKEQIRQRLAEKRVVQHIPARMDGLRVEQNTWRVDSIDENGNVTIHQRIRQTDGSRPKKSPVIEKATKLLGLNPTNGNGKLAKNKGVLIIPDNFGVALDPQPTVIPFHKVWTRLQELKKANDNKLPRILRNGQLIQFTENEKIEVWKIFSIKNTARGIMLDIGRPDEVSNSRNNNRLTSFLKNGLKILPRKYTGVAVCPTTSNIDSP

SEQ ID NO: 16749 - protein, 1071 aa, unidentified
  REGION 1..1071: note = Cas Enzyme sequence
MAQTNLQLAFDVGHSSLGWSVLQTAIRAPSQAQAPSVDILGCGVVTFRADDCLASARRVYRRQRRHIRSTRQRIARMKILLRHLGVLQKEQLDLPGCAWPWQLAARVLRGGVLLTWPELWDVLRWYAHNRGYDGNRRWSAAEAEAQKEDSEKEANARTLMGKHGVSSMAETFCKELGIEPSGKKKSSMRRFKGLNAAFPREVVEREVRKILEAHFDKLKAVDKNLEDVLFSDWRAIPCPGLKLPKRYEAGLLFGQLVPRFDNRIISKCPISGQKVPSRNCPEFLNFRWAMQLANIRVLRFGEKELAPLTVPERKQLDTLMRQQGGMGVEEFKKQVRQTTSAIRDNLDTMLMHPDAKDALLLDPVQKLIQSTELKSFWPLLPSPVQKRTRGQWRRGKNLTLAKWREQLGTDTAAFDDQVTRQLDAENIKGRKKDKQISRDEFLNRPFSVRKLDQRAAFARHLLQKAFEEVMAGRHPKEEGGCLFVTAGMRNEQLQREIAQQTNNHLVRHRLLILERLLADIVKEYAAGDKTRIARMTIEVNRDLREMSGMTAKQKAQDLGLRIANHHHVVELLEKNDSLMKALQKQKSRISASLIRKARVADDLGWMCPYTSQRFEPVDLITKRVDKDHIVPRSDRVSDSLDSLVITFSAINKWKGKRTAWQFVEQEQGKPVPDLPNLSILSLTRYRQLVNGLETFKGHDDDKRRKKRRKDLLLLPAYEEKEFTPGDLTTTSQLVRLGALSLRKAFIGCKDQPVIVSLPGSVTGTVRKAWKLLGCLSITAPLVLDENGELKTKNDIRDITHLHHALDACVLGLASHFIPNNGRVWELILKRKWTPAEENELKALGIFAKDSEGRFQMRDLDKALKDQICQRLAEKRVVQHVPARLEGLRVEQNTWRVISVKDGEATIQQRIRQSDGSRPVKDAVEKTSKLLGLEPVTGNGKLKAEKGALIIPENFGVALDPQPTIIPFHKVWTRMQELKAANFGKKPRVLRNGQLIRVPNGKNYKGIWKVFSAKNNASGMAVDIGFPDVVRLKNKTEGHKINVRLATLIKDGLEILKTPLTGIAAYPIPSSA

SEQ ID NO: 16750 - protein, 1114 aa, unidentified
  REGION 1..1114: note = Cas Enzyme sequence
LASYSTKKNGAIIRAAEQENSFIFEVPYERAVFKFEPLILSLIPFKINDNNLRMSTTNLSNFNLSFDIGYSSIGWSISSKPANAVFPNWLGAGVVVFDDDSCMAKSRAEFRRMRRNIASKRNRIKRMREVLSGLGVMGKDELDNAKTEHPWFLAAETLASGKILSWSELWSVLRYYAHNRGYDGNSMWAKFGDDSDGDSEREANAEKLMADLGTSTQAETICAYLGVDAKSPKPLRFKKYFKGQNLAFPREIVFKEVERIIDAHIGILPKCDENFKKLMIGNWREVPSNIKLPGRFTSDRGLLFGQYMPRFSNRIITKCPLSGEKTPNCHSREFLDFRWKSLLANMAFPDGTDLMETRRKIDDFMLLYGALSKNALKKILKEVIGELPSNYNGMFLASEMEKALEVDPVRALILRTVYPNISFSLPNAELVEKLWKLIPKFVFTRMFRLKEYSFADICALLSPEKSAELAEFVRVIFDSSPASKKSPKPDFETAFNFKMRVQKISGRSPYSRQLMKSASEEIMRGVDPRSEGGSLYPRSESTKKEVLSNIDTWTNNHLVRHRLKIFKRLYMDIVREYCGADKSLVKSVAIEVVKDITAFSGLDSKKKAAKLNDLVAHHKSVSAYLKKEYPELSPNGSILRKARIADDLGWVCPYTGCHFSPRQLFESGNMEREHIIPRSLRPSDSLESLVITWKEVNDMKGQRTAYEFIKECQGMKVPGRQNLSIVTPERFEAFVRRLKKPMHPAGKADIERIKIRNKLLLTEHYNKREGGFLPSDLTQTSHLNKLAFKVVKSLYADAEKAPELIHVPGIVTSVVRKNWDLLPCMGDACPEIYETLENGDKVLRLKDEIRSITHLHHAVDAVAMGLAASVFPRTRNFYEAVSKRRLNQADRQELLKTGLVLFSGDKWKLVELEKSYLKEISGRISENRVVKFLPRKMSGMDVEQTLWGVVKENENGTVTIRQYGAGKGESRRSIKKAYEPKLKLLGYESKNTAKSKLARNKAVIIIKGNFGVALANPPQIIPHHNVWQRLSELAEKNGGRFPKILRRNQIIEIPSGRYKGIWRITSIKNNSNYIGVDMIHPIYVRIKEKSKINVNLNTIIKDGMKIIDTRLIGA

SEQ ID NO: 16751 - protein, 1357 aa, unidentified
  REGION 1..1357: note = Cas Enzyme sequence
LVKLICEEILKEVGNMRKNYSIGLDIGTNSIGYSVIFDDNYKVPVKTAKVLGNTNKKSIRKNLMGSVLFDSGETAMARRMKRTNRRRIERRRNRIRYLQEIFAPFMMQVDENFFARLQDSFLWEEDKPHTKYPFFGNVEQEVAFHDNYKTIYHLRKKLADGKEKADLRLVYLALAHIVKFRGHFLIEGNVDIENNDIQQLFDEFLAFYSAYFEDSSVLEKKMEVREILTEKISKSAKKDKIVQTYSLDKKSPFIEFLKLIVGNSGELKKIFDLEEKSSLQFSKESYEDDLTALLEQVGDEVADVFLAAKKVYDSVVLANILSIKDKNTKAPLSAAMIERYENHEEELAELKQFFKATLERETYKEFFNDPKKDGYAGYIDGSTTQEAFYKQLKKLFEATEAPELFKEKLEREDFLRKQRTFDNGSIPHQIHQKEFEAIIERQGAFYPFLLENKDKLVKIFEFRIPYYVGPLAKNQRSPFAWATYHTDEPVRPWNFEEIVDTKVAAEEFIHRMTNYDIYLPDQKVLPKHSYLYELFTVYNELTKIKFVDDQGNDSYFNAKAKKDIIDNVFKKERKVTYEKLMNYLRVAYADFRIESIVGLSKDTKAFNASLGTYHDLLKLKVDKDFLDNESNLPIIEDIILTLTIFEDRKMIRERLSQYTSYFDEKVMKRLERRHYTGWGRLSKKFIDGIRDNGKTILDYLKDDPAGNRNFMQLIRDDYLTFKKQIAEAQVVGEKDSLVEQVQSLAGSPAIKKGILQTMKIVDELIKIMGYKPTSIVIEMARENQTTAQGLKQSRTRFKKLSEGLKLLSSKLLEEQNITNKELMKEKLYLYCLQNGRDMYTDEPLDISRLSDYDVDHIIPRSFLPDDSIDNKVLVSSKLNRGKSDDVPSIEVVNRMDTYWGVLLNAKLISESKYNRLTKARHGGLTDKDKEGFIHRQLVETRQITKHIARMLDERWNSSVDDSGKKIYEVKIVTLKSNLVSNFRKMFDIPKIRDLNHYHHAHDAYLNAVVGNLLIKKYPRLAPEFIYGQHLYINRKVKDEEKATKKVVLYSNVLKFLQDEGEQKDSTENVIWNKNQHIGMIKKVIFNNQVTIVKKTEIQSGGFTNETVEKKGTSDKLIPRKNGWDTNKYGGVKGENTAYSVMFEYEKTKGKKHVKVKDIIGISIMNQKQFEENPNVFLEELDYTNIQKDSIIILPKYTLFELENGKRRRLASHQELQKANELTLSADFTLLLFHALHRDDEENKKHREYLDQHRSDFKDLFDVIIEKSEQWIVKPTAVAKLRKIMDKNYEQASIDELSLAILSLLTFTQAGASAAFQFFGEQIDRQRYSTVTEILTGTLIYQSVTGFYETRIDLKLEK

SEQ ID NO: 16752 - protein, 1333 aa, unidentified
  REGION 1..1333: note = Cas Enzyme sequence
MSIVKNRGKIKYYIGVDIGTNSVGWAVIDENGYLLNKGKHHLWGSRLFDQAQTAQNRRNYRSSRRRYNKRKERIRLLQMIMSDMVLEVDSSFFIRLEKTTFLDKEDKKAILKDNYKMNYNLFCDEDYNDKDYFKVYPTIYHLRKKLCESDEKADPRLIYLALHHIVKYRGNFLYEGQELHLEPSNKEEDLKILFNMLSKNNDTTYDISDEQIQFILKTVVENISKTAKVDECMSHLKLNSEDKKIVKEFMRGLVGNKFNVSKLYMHEDLQFDDEDLKLQFSDKSYEEKIMEYENVLEEKMEFIDLMQQFYSWIELSKIVGSDSQHASISGAMVNIYERHREDLRTLKEVMLKIGKKEYDEMFKPTSKNVVNYYNYVNPVACSGDKTDGFYKYVKKAIEKSDDSRKDEILQKIANETYMLKQTSKNNAYIPYQMQKDELIKILDHQEKYYPVLKENRDKIISILEFRIPYYYGPLDGNKQFGWLIKKKGKENERILPWNHQEIVDVQETAAQFIKKLTNYCTYLPIEKVMPQKSLTCSMYEVLSEVNKIRIDGKLLPIDTKNRLIEDLFFKRKTVKEKDLINWLKQNQLTVGEITGYQKEKAFSSSLAPWIDFKEIFDEINDSNYDLIEKIIEDMTIFNEGSILKERLKKAYNLDQNKVKKIMKLKYSGWSRLSKKLINGIRADNKFGSSVSILEVMKESHMALMEIINDQDLGFKQIIEKENFKNETGSFEYEDIENLAGSPALKRGIWQTLQVIEEIKNYMGHEPKNIYIEFAREEQEKVRTTTRVKKLKSIYNDIKNQLDVHGKEVYSNLNKQDEKSSIEKRLYLYYTQLGKCMYSGESLDIDKLSDYEIDHIFPRTLTSDDSLDNLVLVKKKENQRKLDDLVLPLEIRNKMEVFWKKLYDNGLITQTKYYRLMRDEFRRDQIDKFINRQLVETRQIIKHVANIIENHYEDTKVFTVRANLSHEFREKYGIYKNRNVNDFHHAHDAYIACIIGRYIQIRFPGLEAKYVYGQYMQNVKKTKNNIDKENHGFIINSMKYECIDEDTGEVIWNPERILDYIKCFNYRDVYITKKLDTNNRELFNVTILPNDKNSEKGKTKATIPVNKLRSNVRKYGGFSGLQSDIVAIEGKKGKKIDRRLINLPILLRYVSIEDQCKYIMENNKYSDIKIIKKIKKNQLIEIDGGLYYLSSATELVNAHQLILNNKENEIIFEINNAMIKNDYSYFENREIEITKLYNLLCDKMKKYYPKYKGIYEKILTKNIDFNILEIDLKCRVILEVLKILKAGAINGNLKFEPYNMTDREGRLSKQSIHLDNTYFYDVSITGIYSKKYKL

SEQ ID NO: 16753 - protein, 1391 aa, unidentified
  REGION 1..1391: note = Cas Enzyme sequence
MANKTWYLGLDIGSASVGWAATDTEYKIIRKNKKRLWGVRLFEEATTAEDRRGYRSSRRRLARRKWRLNLLEELFASEVKKDDENFFLRLKESQYHYEDKTHKVPYAIFNDKDYTDKDYYKDYPTIYHLRSKLMTEKTPDIRKVFLAIHHIIKNRGHFLLQGQSFKDGNLNNLIKELLELDILHVGFEVTEEVVGKIADISLEKKTLTDKVNDLKKLYPKEKQLLEVFRLIFGGKTSLDKLFAIDEYKELDASIKSVSFKEKIYEEVRHDYEQVLSNYIELLDLAKLVYDSIILSDIKKEGKTLSESKVELFEKHRDDLLKLKNLVKNDSKLSEDKKVELYASIFKEDKDKGTNYVNYIRKSEEGKGCNYEDFKKFLVKELAKLEENSVKTEIIKDLELEQFLPLQRTKDNSVVPYQIHKEELVKILDNAAKYHSFLEKKDESGYNVREKVIQLLEFRIPYYVGPLNSSKKAKEGGFAWSVRNKGYEDTPVTPWNYSKVIDESASAEKFITNLTNKCTYLKGEDVLPKSSLLYSEFALLNELNALKYDGNRISLEARNTIIEKLFKQQGKKVTKTSIKNLLKAEGYIDGKGEITGIDITVKNDLKSYRDFKKILGNKFNTEHVENIILWITLYGESRKLIKAKIESVYGEVYSKDEITKMSRLVYKDWGRFSRKLLTELVSKKLYNEETGECLNIIGAMRQNNILFMELLADRFDYSKQIVEFNKELQEDVTEITPEILDDLYVSPAVKRSIWQTVRIVEELKKIIGCAPAKIFVETTRANQDKKKPTDSRKKQLELAYKAVKKDVKELEKEISAINFDVLNERLSSVEPSKLKAKKLYLYYTQLGRCMYSGKPIKIDKLNTTKYDIDHIYPQSKIKDDSFTNTVLVERELNAAKSDRYPLGSDIQTPSNRRFWKFLKEKGLISDEKYNRLVRTEEFSDEELSGFIARQLVETSQSVKAVASILGELNPETSICYSKAENVSRFRKDFGKIKDGNSKSNNNEQLVKVREINNFHHAKDSYLNVVVGNVYDTKFTRNVFNFIKDKKDGRKYSLNKVFYENVSDSKTVAWEMDKTIYQVEKVMNNNNILVTRRTSEQKGGLFDATVYKAKVAAKAKDGVYYPLKTSNPVVKDVAKYGGFTKIKIAYYSIFEYVLVNKKGEEKITRIIPIPIYISQNIKDDNTLLEFGKTQINLKSGEEIKDLKLKYRKLCIGDKICLEGYPYFVGGKTSDYFVYDSAVQVLIDKENEKYIKEIVKFTNWKKDNKDGELSKNITRKKNTDLYNTLLQKMKTPELINKKPNKYQEFEKEKTIHKFNDLNEEEQSKVLLEMLNLLTDMKTVYDLKLINITATRGKQNFDLTSLKEFTIVEQSVTGFYEKEITIIGDKGNDMENNNS

SEQ ID NO: 16754 - protein, 950 aa, unidentified
  REGION 1..950: note = Cas Enzyme sequence
GFSSETINRIKNIKFEEKDYGSYSEKAIKKLLPLMRMGKYWNADAIDAKTKERIDKIITGEYDEKIKDRVREKTINLTDISQFKGLPLWLACYVVYDRHSETKEITRWESPDDIDTYLKNFKQHSLRNPIVEQVVTETLRTVRDIWKQEGNIDEIHIELGREMKNPADKRKKMAERIQQNENTNLRIKAMLMEFMDPDMGIENVRPYSPSQQDILRIYEEYALDNLTKDDKEFDFISKVSRQAQPSKSDITRYKCWLEQKYRSPYTGEMIPLAKLFTSAYEIEHVIPQSRYFDDSFSNKVICEAEVNKLKDRQLGFEFIKAHKGEKVQISQGKTVEIFSIEAYEKFVKDNYANNRTKMKKLLMDDIPDGFIERQLNDSRYISKLIKGLLSNIVREKLPNGEYEQEAVSKNLISCNGSITDRLKKDWGMDDVWNRIVLPRFERLNELTGKDNFTAVNKQGHLIPNMPLELQKGFNKKRIDHRHHAMDAIVIACTTRDHVNLLNNEAAHSKKYDKSYRYDLQSKLRRKDEEGHYKEFVKPWDSFTSDAKQALDNIIVSFKQNLRVINKTTNYYQHYDENGKKVLVKQEKGDNWAIRKSMHKDTGWGEINLRFTKEVSLNEALKNPKSIVNKDFKRKVQELLVQGHDAKYIKKYVEDNKDVWSDIDIKKIKVYYFTKDTNERYFATRFMSDLVGYMSGIKDYDKAIAKIEGITDTGIQKILKAHLQAKDNNPELAFSADGIDEMNHNIVDLNGGKPHKPIYKVRHYESGNKYSIGQKGCKVKKFVEADKGTNLFFAVYTIDKLDKKTGNVEKVRTFATVPLNIVIDCQKKYQKEWKMELDKVLKEKEFVANDAVFQFIISPNDLVYVPTSDELRNGINADKIDKSRVYKMVSSSGSQCFFINNKVASIIVNKVEYSPLNKMERSISGEMIKEICIPIKVDRLGNVIEFNGIKS

SEQ ID NO: 16755 - protein, 1560 aa, unidentified
  REGION 1..1560: note = Cas Enzyme sequence
MKRILGLDLGTNSIGWAVVNAEEVIRENETSFLKPVSINASGSRIIPMDEGVLGDFDRGNTKSQTKDRTDKRGTRRLLERYLLRRERLLRVLKLMDFLPEHYAEKIDSYGKFTDESEPKLAWRKGTDGKFEFIFKDSFNEMLDDFAKNQQQLVADGKKVPYDWTIYYLRKKALSQRLTKEELAWILLQFNQKRGYYQLRGEEEEENVDKLVEFLAQKVVRVEATDEKKGDDVWYNVYLENGMVYRRSSRIPLDWEGKVKEFIVTTDLEKDGTPKKDKDGNIKYSFRAPKEDDWILLKKKTEFDINNSKKTIGCYIYDALLTNPDQKIIGKLVRTVERKYYKEELNQILAVQKDLIPELQDENLYKACIEELYPKNEAHRNNIAKPDFANLFINDILFYQRPLKSKKSLISDCPYESHFDKDGNEYPIKCIAKSNPLFQEFRLWQFVHNLRIYQRERTISDGQLDLFGNVSSGKLQTDVDVTDELLKTEDDYVALFDWLNDRSTIKQDTLLNSYFKFKKEKGKDHYPYRWNYVEDKEYPCNQTRAVILSKLDKNEKDLLSKELTNKIWHLLYSVTTKVEIDSVFDDSKKNKVKCHKNGTTTYGIYKMLLDSGFSSETINRIKNIKFEEKDYGSYSEKAIKKLLPLMRMGKYWNADAIDAKTKERIDKIITGEYDEKIKDRVREKTINLTDISQFKGLPLWLACYVVYDRHSETKEITRWESPDDIDTYLKNFKQHSLRNPIVEQVVTETLRTVRDIWKQEGNIDEIHIELGREMKNPADKRKKMAERIQQNENTNLRIKAMLMEFMDPDMGIENVRPYSPSQQDILRIYEEYALDNLTKDDKEFDFISKVSRQAQPSKSDITRYKCWLEQKYRSPYTGEMIPLAKLFTSAYEIEHVIPQSRYFDDSFSNKVICEAEVNKLKDRQLGFEFIKAHKGEKVQISQGKTVEIFSIEAYEKFVKDNYANNRTKMKKLLMDDIPDGFIERQLNDSRYISKLIKGLLSNIVREKLPNGEYEQEAVSKNLISCNGSITDRLKKDWGMDDVWNRIVLPRFERLNELTGKDNFTAVNKQGHLIPNMPLELQKGFNKKRIDHRHHAMDAIVIACTTRDHVNLLNNEAAHSKKYDKSYRYDLQSKLRRKDEEGHYKEFVKPWDSFTSDAKQALDNIIVSFKQNLRVINKTTNYYQHYDENGKKVLVKQEKGDNWAIRKSMHKDTGWGEINLRFTKEVSLNEALKNPKSIVNKDFKRKVQELLVQGHDAKYIKKYVEDNKDVWSDIDIKKIKVYYFTKDTNERYFATRFMSDLVGYMSGIKDYDKAIAKIEGITDTGIQKILKAHLQAKDNNPELAFSADGIDEMNHNIVDLNGGKPHKPIYKVRHYESGNKYSIGQKGCKVKKFVEADKGTNLFFAVYTIDKLDKKTGNVEKVRTFATVPLNIVIDCQKKYQKEWKMELDKVLKEKEFVANDAVFQFIISPNDLVYVPTSDELRNGINADKIDKSRVYKMVSSSGSQCFFINNKVASIIVNKVEYSPLNKMERSISGEMIKEICIPIKVDRLGNVIEFNGIKS

SEQ ID NO: 16756 - protein, 1059 aa, unidentified
  REGION 1..1059: note = Cas Enzyme sequence
MEKEKNNHVWGFDIGKGSLGEAVRIGGDFKHIASVLLDPEFGEIKTAALARRQMRTRKAHKAREKWLEECLEGTGVEILKRREVGIVDGQWQLISKGDERLEREYSPSGEDVCYNSIALRCKLLLGEKLEGWQVFKALNSAIQKRGYDENIPWGEAEEKSSKKDDDDYAQKLSQYEKEKSELFESFADGEKYDFPCFFKAYKMGLWSPENPTRVEVRIDCRAQKAKSYVIARKYVEREFECLVEAAAKFFPKLKGRAKFILYGVSETPYASYYGNMRKKFGLKRGAESDWTALGQKVPRFDNRIIDKCRLIPRMNVCKIRPLNEARNEKDLLYYEVTLALKLLNLRFFRNSNIEQLTFEEFKKAFEIAAGAKYKMTKTAMKKFLKSISATALGDDYAEIEPPKESGRASFSRPAMEILKELIFSGMPPREFYGRKISEISNTDKNKGVVSSDLDFIKLMGDCPWGGIFIPDVQTYQFANAAFPDPDAQINKLIGSQNNPIVRHRLTFFFERIKFLESKYGVPDKVVLEFVRDDFMGEKEKKEMRIAMKKRAEEKMRIAKDLDEHGFKGGNLLLKMELYRKQNGICLYTGDALPLSELATLEIEHIVPRSRGGPDAQYNYVITREKTNKLKGDKTPYEWLSSDAKEWASYTDRINACAKALGKKRCRLLLEKDAEELVEKYTALAETAHIAKLAQKIVCMHFGFQFGGLSGTKRVFTVPGALTSRIRKFYGLDRILHISAAESENLSFEEFLKFSEDLEKKNRKNKKHHALDAMCLCFAPTGVDSRRAKLGEILPEKLRSEKAAREFFKSYLDKIMPVDVAPKKPRLEDGIYSKRIIGGKACMVKRNNLVDLAYKSGLKPVFDIPTLIKLVDKKEKGIINPQIRKMIGEFAATNPDESAWRKWCEEVRLPSKSGLGARIMRVLVYYGEADEYKDLSKDGCGAYRKGDGHKGQVIWESVDGKYYVEPVYVHASKAGVMAALNANPKKKRICGMFNSHCTMDVGDVYNDKGDFILPAGRYMVNTIWKNGQCVLTNADGEKRNPININYLMRAGMRRVELSEL

SEQ ID NO: 16757 - protein, 1059 aa, unidentified
  REGION 1..1059: note = Cas Enzyme sequence
MEKEKNNHVWGFDIGKGSLGEAVRIGGDFKHIASVLLDPEFGEIKTAALVRRQMRTRKAHKAREKWLEECLEGTGVEILKRREVGIVDGQWQLISKGDERLEREFPPSGEDVCYNSIALRCKLLLGEKLEGWQVFKALNSAIQKRGYDENIPWGEAEEKSSKKDDDDYAQKLSQYEKEKSELFESFADGEKYDFPCFFKAYKMGLWSPENPTRVEVRIDCRAQKAKSYVIARKYVEREFECLVEAAAKFFPKLKGRAKFILYGVSETPYASYYGNMRKKFGLKRGAESDWTALGQKVPRFDNRIIDKCRLIPRMNVCKIRPLNEARNEKDLLYYEVTLALKLLNLRFFRNSNIEQLTFEEFKKAFEIAAGAKYKMTKTAMKKFLKSISATALGDDYAEIEPPKESGRASFSRPAMEILKELIFSGMPPREFYGRKISEISNTDKNKGVVSSDLDFIKLMGDCPWGGIFIPDVQTYQFANAAFPDPDAQINKLIGSQNNPIVRHRLTFFFERIKFLESKYGVPDKVVLEFVRDDFMGEKEKKEMRIAMKKRAEEKMRIAKDLDEHGFKGGNLLLKMELYRKQNGICLYTGDALPLSELATLEIEHIVPRSRGGPDAQYNYVITREKTNKLKGDKTPYEWLSSDAKEWASYTDRVNACAKALGKKRCRLLLEKDAEELVEKYTALAETAHIAKLAQKIVCMHFGFQFGGLSGTKRVFTVPGALTSRIRKFYGLDRILHNSAAESENLSFEEFLKFSEDLEKKNRKNKKHHALDAMCLCFAPTGVDSRRAKLGEILPEKLRSEKAAREFFKSYLDKIMPVDVAPKKPRLEDGIYSKRIIGGKACMVKRNNLVDLAYKSGLKPVFDIPTLIKLVDKKEKGIINPQIRKMIGEFAATNPDESAWRKWCEEVRLPSKSGLGARIMRVLVYYGEADEYKDLSKDGCGAYRKGDGHKGQVIWESVDGKYYVEPVYVHASKAGVMAALNANPKKKRICGMFNSHCTVDVGDVYNDKGDFILPAGRYMVNTIRSDNQCVLTNADGEKRNPININYLMRAGMRRVDLSEL

SEQ ID NO: 16758 - protein, 1059 aa, unidentified
  REGION 1..1059: note = Cas Enzyme sequence
MEKEKNNHVWGFDIGKGSLGEAVRIGGDFKHIASVLLDPEFGEIKTAALVRRQMRTRKAHKAREKWLEECLEGTGVEILKRREVGIVDGQWQLISKGDERLEREFPPSGEDVCYNSIALRCKLLLGEKLEGWQVFKALNSAIQKRGYDENIPWGEAEEKSSKKDDDDYAQKLSQYEKEKSELFESFADGEKYDFPCFFKAYKMGLWSPENPTRVEVRIDCRAQKAKSYVIARKYVEREFECLVEAAAKFFPKLKGRAKFILYGVSETPYASYYGNMRKKFGLKRGAESDWTALGQKVPRFDNRIIDKCRLIPRMNVCKIRPLNEARNEKDLLYYEVTLALKLLNLRFFRNSNIEQLTFEEFKKAFEIAAGAKYKMTKTAMKKFLKSISATALGDDYAEIEPPKESGRASFSRPAMEILKELIFSGMPPREFYGRKISEISNTDKNKGVVSSDLDFIKLMGDCPWGGIFIPDVQTYQFANAAFPDPDAQINKLIGSQNNPIVRHRLTFFFERIKFLESKYGVPDKVVLEFVRDDFMGEKEKKEMRIAMKKRAEEKMRIAKDLDEHGFKGGNLLLKMELYRKQNGICLYTGDALPLSELATLEIEHIVPRSRGGPDAQYNYVITREKTNKLKGDKTPYEWLSSDAKEWASYTDRVNACAKALGKKRCRLLLEKDAEELVEKYTALAETAHIAKLAQKIVCMHFGFQFGGLSGTKRVFTVPGALTSRIRKFYGLDRILHNSAAESENLSFEEFLKFSEDLEKKNRKNKKHHALDAMCLCFAPTGVDSRRAKLGEILPEKLRSEKAAREFFKSYLDKIMPVDVAPKKPRLEDGIYSKRIIGGKACMVKRNNLVDLAYKSGLKPVFDIPTLIKLVDKKEKGIINPQIRKMIGEFAATNPDESAWRKWCEEVRLPSKSGLGARIMRVLVYYGEADEYKDLSKDGYGAYRKGDGHKGQVIWESVDGKYYVEPVYVHASKAGVMAALNANPKKKRICGMFNSHCTVDVGDVYNDKGDFILPAGRYMVNTIRSDNQCVLTNADGEKRNPININYLMRAGMRRVDLSEL

SEQ ID NO: 16759 - protein, 1059 aa, unidentified
  REGION 1..1059: note = Cas Enzyme sequence
MEKEKNNHVWGFDIGKGSLGEAVRIGGDFKHIASVLLDPEFGEIKTAALARRQMRTRKAHKAREKWLEECLEGTGVEILKRREVGIVDGQWQLISKGDERLEREFPPSGEDVCYNSIALRCKLLLGEKLEGWQVFKALNSAIQKRGYDENIPWGEAEEKSSKKDDDDYAQKLSQYEKEKSELFESFADGEKYDFPCFFKAYKMGLWSPENPTRVEVRIDCRAQKAKSYVIARKYVEREFECLVEAAAKFFLKLKGRAKFILYGVSETPYASYYGNMRKKFGLKRGAESDWTALGQKVPRFDNRIIDKCRLIPRMNVCKIRPLNEARNEKDLLYYEVTLALKLLNLRFFRNSNIEQLTFEEFKKAFEIAAGAKYKMTKTAMKKFLKSISATALGDDYAEIEPPKESGRASFSRPAMEILKELIFSGMPPREFYGRKISEISNTDKNKGVVSSDLDFIKLMGDCPWGGIFIPDVQTYQFANAAFPDPDAQINKLIGSQNNPIVRHRLTFFFERIKFLESKYGVPDKVVLEFVRDDFMGEKEKKEMRIAMKKRAEEKMRIAKDLDEHGFKGGNLLLKMELYRKQNGICLYTGDALPLSELATLEIEHIVPRSRGGPDAQYNYVITREKTNKLKGDKTPYEWLSSDAKEWASYTDRVNACAKALGKKRCRLLLEKDAEELVEKYTALAETAHIAKLAQKIVCMHFGFQFGGLSGTKRVFTVPGALTSRIRKFYGLDRILHNSAAESENLSFEEFLKFSEDLEKKNRKNKKHHALDAMCLCFAPTGVDSRRAKLGEILPEKLRSEKAAREFFKSYLDKIMPVDVAPKKPRLEDGIYSKRIIGGKACMVKRNNLVDLAYKSGLKPVFDIPTLIKLVDKKEKGIINPQIRKMIGEFAATNPDESAWRKWCEEVRLPSKSRLGARIMRVLVYYGEADEYKDLSKDGCGAYRKGDGHKGQVIWESVDGKYYVEPVYVHASKAGVMAALNANPKKKMICGMFNSHCTVDVGDVYNDKGDFILPAGRYMVNTIRSDNQCVLTNADGEKRNPININYLMRAGMRRVDLSEL

SEQ ID NO: 16760 - protein, 1034 aa, unidentified
  REGION 1..1034: note = Cas Enzyme sequence
MGAEFRHVTSLLLDEDFGEIKTAAGLRRQMRTRKAHKAREKWLERCLLEFGIEPLKRREVGIVNGRWMLISKGDERLEREFPPDGEEICYNAIALRCKLLLGEKLESWQIFKALNSAIQNRGYDENIPWKESDVSLPKKDDDDYAKKLSQYSREKGELLESFEDGEKYDYPCFFKAYKMGLWSPENPERVEIRIGNDAQKAKGYVIPRKDVEREFESLVEAASKWHPAMKGKAMYIMYGIAETPYASFKPALRKKFDLKRGAESDWTALGQKIPRFDNRIIDKCRLIPRLNVCKIRPLSEARGEGDLLHYEITLSLKLLNLRFFRNSNVESLSFEEFKAAFEIAKSAKYKMGKAALKKFLKSISASVLSEDQSEIEAPRESGRASFSRPAMLLLKELIFSGMPPAEFYAKKAGEISNADPNKGIVASDLDFIKLMGNCGWNGIFIPDVETYRFANNGADSAKLINGLIGSQNNPIVRHRLAFFYERIKFLESKFGVPDKVVLEFVREDFMGKEQKKRMQIEMKKRASEKMLIAKKLDEAGYKGGNLLLKMELLEKQGGICLYTGEPLLPSELGVLEIEHIVPRSRGGPDAQYNYVLTREKTNKEKADRTPFEWLSSDPVKWAGYSDRVKARAGQLGRKRCELLLEKNAEELVEKYTALAETAHISKLAQKIVCLHFGFQFGGLGGTKRVFTVPGALTARIRSFYGLNKILHNEDLAKDALSYEEVLKRGEELDKKNRKNKKHHALDAMCLCFAPTGVNSKRARIDMLLPPDIRGESEAELFFRKYLDRLIPVDVAPKKPRLEDGIYSMRAVGGKKFMARRVNLVDLAYKSGLKPVYDISALIKLLDKKEKGIINAQIRKLVADFARTNPSEDEWRKWCGECRLPSKNGIGTRVIRVLLNYGEPAEYKDLSKDGRGAFRRGDGHKGQIVWESTDGKYYVVPIYVHASKAKLLAELDANPKKKRVCDIFTSHCMVKVGNAYNDKGELLLPEGVYMVNTIKTNRQCILTNANGEKSEQININYLMKAGMRKVSVKDL

SEQ ID NO: 16761 - protein, 1218 aa, unidentified
  REGION 1..1218: note = Cas Enzyme sequence
LENGWIYRRTSKIPLDDWKGKTRDFIVTTDLNDDGTIKLDKEGKEKRSFRAPDENDWNLLKKKTEHDIDFSGKTVGAYIYDHLLQNPNQKIKGKLVRTIERKYYKDELKAILAKQIALQPELFTETLLADCIRELYRKNETQQQNLLSKDFPHLFVEDIIFYQRPLRSKKSTIANCTLEKRSYIDKETNERKDAPIKVCAKSNPYYQEFRVLQWLQNLRIYEIETDREITAEFIETAEDYEALFNFLMSQKEIDNEGLLNYFLFAKNPQIKDKVAKSELKKWLTTYRWNYVYDAADNSSKKYPMNETGYDLQRYLQKVEGLPANFLTFDITYQLWHLLYSVKDKVEFEKALKKFAQKYQLDEVSFVDSFKNFKPYPNEYGSFSEKAIKKLLPLMRFGNHWDFNRIDVSTQKRIDDLINGVANEDIRTIIREKAEKYQLNSESCFQGLPLWLAQYVVYNRHAEATDIEKWTSVSDLETYLEDFKQHSLRNPIVEQVVTETLRVVRDVWQQYGRGQANFFDEIHIELGRELKKTAEERKQLSDKNQENENTNLRIKKLLAELKEDASIQNVRPYSPVQQELLKIYEEGVFSATDEVEEDIQKIRKKAEPTTPEIQRYKLWLEQKYKSPYTGEVISLTKLFTEEYEIEHIIPQSRYYDDSLSNKVICESAVNKLKTNQLGLEFIQNHHGEKVRITANKEVTIFTEEQYKEFVKKHYANNSAKQQKLLLNEIPEKMVTRQLNDTRYISKYISEILSKIVRSDEKDEGVNSKNIIPCTGKITTALKQDWGLNDVWNELILPRFERMNQLTQTQLFTSYNDRLQKNLPTVPIEYSQGFQKKRIDHRHHAMDALVIACATKEHINYMNNQHALDKSKDKKEKQQSRIDLRTILCEKKNNNWQFKKPWSTFTQEAKEALEHIVVSFKQNLRVINKATNYYEKWEEKNGVLVKKKVKQEGTNWAIRKPLHKETVSGKIVLDRKIGKDKILTATRKAVDITFTEKIISSITDTGIQKILLNYLKYKGSPEVAFSAEGLEELNKNIAQYNDGKKHQPIYKVRIFEEGSKFPLGETGAKATKYVEAAKGTNLFFGVYQGKGKRTYATIPLNEVIERQKQGLPSVPERNEKGEPLLFSLSPNDLVYVPMEGEIAETIDFNNLSKEQKERIYKTVSFTGNQCFFVQEAVATPIVNKMEYSPLNKMERDILGTMIKEVCIKLKVDRLGNITKA

SEQ ID NO: 16762 - protein, 1453 aa, unidentified
  REGION 1..1453: note = Cas Enzyme sequence
MKRILGLDLGSNSIGWAFVQQDFENKQGKIIAAGSRIIPMDQKMLSNFEEGTTVSQTAERTTYRSMRRLRERHLLRRERLHRVLHILGFLPPHYDSQIDFTKRFGKFIDNAEPKIAYNNGNFIFMNSFNEMIEDFKKHQPQLFYKKSNGEESKIPYDWTIYYLRKKALSQKITQQELAWLILHFNQKRGYYQLRGEEETEGNDMEIISSKVLSVIKKNKDKKYDKYWYDITLENGLVYKAAFYNDLVYSWIGQEREFVVKRTLLKNGDEKIELSYLPTFDEIAKMDKKQQDKFYQKIKVKTESNIGNKTVGAYIYDHLLQNPNQKIKGKLVRTIERKYYKDELKAILAKQIALQPEFFTENLLADCIRELYRKNQTQQQNLLSKDFLHLFVEDIIFYQRPLRSKKSTIANCPLEKRSYIDKETNERKDVPIKVCAKSNPYYQEFRVLQWLQNLRIYEIETDREVTAEFIGTAQDYEALFNFLMSQKEIDNEGLLKYFLLTKNPQIKDKAAKSELKKWLTTYRWNYVYDVADNSSKKYPMNETGYELQRYLQKVEGLPANFLTFDITYQLWHLLYSVKDKVEFEKALKKFAQKYQLNEASFVDSFKNFKPYPNEYGSFSEKAIKKMLPLMRFGNHWDFNHIDVHTQKRIDDLINGVANEDIRTIIREKAEKYQLNSETCFQGLPLWLAQYIVYNRHAEATDIEKWTSVSDLEAYLEDFKQHSLRNPIVEQVVTETLRVVRDIWQQYGGGQANFFDEIHIELGRELKNTSKERERLSKQNQENENTNLRIKKLLAELKEDASIQNVRPYSLVQHDLLKIYEEGVFSSTDEIDEDIQKIRKKAEPNKTELQRYKLWLEQKYRSPYTGEVISLTKLFTEEYEIEHIIPQSRYYDDSLSNKVICESAVNKLKTNQLGLEFIQNHHGEKVRIAGNKEVTIFTEEQYKEFVKKYYANNLPKQQKLLLNDIPEKMVARQMNDTRYISKYVSEILSKIVRSDEKDEGVNSKNVIPCTGKITTALKQDWGLNDVWNELILPRFERMNQLTQTQLFTSYNDRLQKNLPTVPIKYSQGFQKKRIDHRHHAMDALVIACATREHINYMNNQHALDKSKDKKEKQQSRIDLRTILCEKKNNNWQFKKPWGTFTQEAKEALEHIVVSFKQNLRVINKATNYYEKWEEKNGVLVKKKVKQEGTNWAIRKPLHKETVSGKIVLDRKIGKDKILTATRKAVDITFTEKIISSITDTGIQKILLNYLKYKGSPEVAFSAEGLEELNKNIAQYNNGKKHQPIYKVRIFEEGSKFPLGETGAKATKYVEAAKGTNLFFGVYQGKGKRTYATIPLNEVIERQKQGLSSVPERNEKGEPLLFSLSPNDLVYVPMEGEIAETIDFNNLSKEQKERIYKTVSFTGNQCFFVQEAVATPIVNKMEYSPLNKMERDILGTMIKEVCIKLKVDRLGNITKA

SEQ ID NO: 16763 - protein, 1450 aa, unidentified
  REGION 1..1450: note = Cas Enzyme sequence
MKHILGLDLGSNSIGWALVQQDFENKQGKIMAAGSRIIPMDQGVLGDFEKGNTVSQTAERTTYRSMRRLRERHLLRRERLHRVLHILGFLPPHYDAQIDFTKRYGKFIDNAEPKIAYNNGNFIFTNSFNEMIEDFKKHQPQLFYKKSNGEESKIPYDWTIYYLRKKALSQKITQQELAWLILHFNQKRGYYQLRGEEETESPNKEVAFHSLKVVEVEAEAPNKKGEIWYTIRLENGWIYRRTSKIPLDNWKGKTRDFIVTTDLNDDGTIKVDKEGKEKRSFRAPEENDWNLLKKKTEHDIDFSGKTVGAYIYDHLLQDPNQKIKGKLVRTIERKYYKNELKAILTKQIALQPELFTKNLLADCIRELYRKNETQQQNLLSKDFLHLFVEDIIFYQRPLRSKKSTIANCTLEKRSYIDKETNERKDAPIKVCAKSNPYYQEFRVLQWLQNLRIYEIETDREVTAQFIETPQDYEALFNFLMSQKEIDNESLLKYFLLAKNPQIKDKAAKSELKKWLTTYRWNYVYDVADNSSKKYPMNETGYDLQRYLQKVEGLPANFLTFDTTYRLWHLLYSVKDKVEFEKALKRFAKKKQLNETSFVESFKNFKPYPNEYGSFSEKAIKKLLPLMRFGNHWDFNRIDVSTQKRIDDIINGVANEDIRTIIREKTEKYQLNSETCFQGLPLWLAQYVVYNRHAEATDIEKWTSVSDLEAYLEDFKQHSLRNPIVEQVVTETLRVVRDIWQQYGGGQANFFDEIHIELGRELKKTAEERKQLSDKNQENENTNLRIKKLLAELKEDASIQNVRPYSPVQQELLKIYEEGVFSSTDEIDEEIQKIRKKAEPTTPEIQRYKLWLEQKYKSPYTGEVISLTKLFTEEYEIEHIIPQSRYYDDSLSNKVICESAVNKLKTNLLGLEFIQKHHGEKVRVAGDKEVTIFTEEQYKDFVKKHYANNLAKQQKLLLNEIPEKMVARQLNDTRYISKYISEILSKIVRSDEKDEGVNSKNVIPCTGKITTALKQDWGLNDVWNELILPRFERMNQLTQTQLFTSYNDRYQKNLPTVPIEYSQGFQKKRIDHRHHAMDALVIACATREHINYMNNQHALDKSKDKKEKQQSRIDLRTILCEKKNNNWQFKKPWGTFTQEAKESLEHIVVSFKQNLRVINKATNYYEKWEEKNGVLVKKKVKQEGTNWAIRKPLHKETISGKILLDRKIGKDKILTATRKAVDITFTEKIISSITDTGIQKILLNYLKYKGSPEVAFSAEGLEELNKNIAQYNDGKKHQPIYKVRIFEEGSKFPLGETGAKATKFVEAAKGTNLFFGVYQGKEKRSYATIPFNKVIERQKQGLPSVPERNEKGEPLLFSLSPNDLVYVPMEGEATETMDFNNLSKEQKERIYKTVSFTGNQCFFVQEAVASPIVNKMEYSPLNKMERDILGIMIKEVCIKLKVDRLGNITKV

SEQ ID NO: 16764 - protein, 1450 aa, unidentified
  REGION 1..1450: note = Cas Enzyme sequence
MKHILGLDLGSNSIGWALVQQDFENKQGKIMAAGSRIIPMDQGVLGDFEKGNTVSQTAERTTYRSMRRLRERHLLRRERLHRVLHILGFLPPHYDAQIDFTKRYGKFIDNAEPKIAYNNGNFIFMNSFNEMIEDFKKYQPQLFYKKPNGEESKIPYDWTIYYLRKKALSQKITQQELAWLILHFNQKRGYYQLRGEEETESPNKEVAFHSLKVVEVEAEAPNKKGEIWYTIRLENGWIYRRTSKIPLDDWKGKTRDFIVTTDLNDDGTIKVDKEGKEKRSFRAPEENDWNLLKKKTEHDIDFSGKTVGAYIYDHLLQDPNQKIKGKLVRTIERKYYKNELKAILTKQIALQPELFTKNLLADCIRELYRKNETQQQNLLSKDFLHLFVEDIIFYQRPLRSKKSTIANCTLEKRSYIDKETNERKDAPIKVCAKSNPYYQEFRVLQWLQNLRIYEIETDREVTAQFIETPQDYEALFNFLMSQKEIDNESLLKYFLLAKNPQIKDKAAKSELKKWLTTYRWNYVYDVADNSSKKYPMNETGNDLQRYLQKVEGLPANFLTFDTTYRLWHLLYSVKDKVEFEKALKKFAQEYQLDETSFVESFKNFKPYPNEYGSFSEKAIKKLLPLMRFGNHWDFNRIDVSTQKRIDDLINGVANEDIRTIIREKAEKYQLNSETCFQGLPLWLAQYVVYNRHAEATDIEKWTSVNDLEAYLEDFKQHSLRNPIVEQVVTETLRVVRDIWQQYGGGQANFFDEIHIELGRELKNTPKEREKFSKQNQENENTNLRIKKLLAELKEDASIENVRPYSPVQQELLKIYEEGVFSSTDEIEEDIQKIRKKTEPSKADLQRYKLWLEQKYKSPYTGEVISLTKLFTEEYEIEHIIPQSRYYDDSLSNKVICESSVNKLKTNQLGLEFIQKHHGEKVRVAGNKEVTIFTEEQYKDFVKKHYANNLAKQQKLLLDEIPEKMVTRQLNDTRYISKYISEILSKIVRSDEKDEGVNSKNVIPCTGKITTALKQDWGLNDVWNELILPRFERMNQLTQTQLFTSYNDRYQKNLPTVPIEYSQGSQKKRIDHRHHAMDALVIACATREHINYMNNQHALDKSKDKKEKQQSRIDLRTILCEKKNNNWQFKKPWSTFTQEAKEALEHIVVSFKQNLRVINKATNYYEKWEEKNGILVKKKVKQEGTNWAIRKPLHKETISGKILLDRKIGKDKILTATRKAVDITFTEKIISSITDTGIQKILLNYLKYKGSPEVAFSAEGLEELNKNIAQYNDGKKHQPIYKVRIFEEGSKFPLGETGAKATKFVEAAKGTNLFFGVYQGKEKRSYATIPFNKVIERQKQGLPSVPERNEKGEPLLFSLSPNDLVYVPMEGEATETMDFNNLSKEQKERIYKTVSFTGNQCFFVQEAVASPIVNKMEYSPLNKMERDILGIMIKEVCIKLKVDRLGNITKV

SEQ ID NO: 16765 - protein, 1476 aa, unidentified
  REGION 1..1476: note = Cas Enzyme sequence
MFSQRNNPYCELLSNCATKVSIIFLMCKSFLIYFYFSFLFVIFALPNYKTMKNILGLDLGTTSISFAHIVEDENKEKSEIKELGVRIVSLTTDEQSDFEKGKSITTNANRTLKHGARLNLDRYQQRRKFLIDLLQKANLITSSSILAENGKNTTHSTWQLRAKAVTERVEKEEFARVLLAINKKRGYKSSRKAKTEDEGQAIDGMAIAKRLYDENLTPGQLSLQLLQQNKKLLPDFYRSDLQREFDLVWNFQKQFYPDILTDTFYKELQGKGKDATSKAFSKRYHFDTAENKGSKESVRLQAYQWRAEAISKQLSKEEVAYVLTEINNNLNNASGYLGAISDRSKELYFNRQTVGQYLYAQLQENRHNSLKNKVFYRQDYLDEFERIWETQASFHKELTDELKKQIRDVVIFYQRKPKSQKGLISFCEFESKEIEIEKDGKTIIKSIGARVVPKSSPLFQEFKIWQILNNVICKRKGIRKKKISAKTTQLDLLNESSQTIFSLDMECKQLLFDELNLKGDLKSDKVLKLLGYSPQEWEINYNQLEGNRTQKALYEAYLKIVEMEAHDVKNILQIKSAKDDWSLDESPLSASEIKEKVKDIFQALGICTKILYFDPLLPVKEFEEQDSYQLWHLLYSYESDDSTSGNETLYRILEKKYAFKREHARILANVALQDDYGSLSTKAIRKIYPYIKENQYSKACELAGYKHSKLSLTTEELEARELKNIIPLLKKNALRNPVVEKILNQMINVVNALIEKNSERDAEGKITKYFHFDEIRIELARELKKNAQKRYEMTQNINKAKLEHQKISEILQKQFGIKNPTKSDIIRYRLYQELEHNGYKELYTNAPIARDMLFSKNIEIEHIVPKARVFDDSFSNKTLTFHRINSDKGESTAFDYITSLNSEEELNQYLTRVENAYKTKSISPAKYKNLLKKASEIGDGFINRDLRDTQYIAKKAKEILFQVTKNVLSTSGSITDRLREDWGLVDVMKELNMPKYQSLGLTEVEERKDGNKVTVIKNWTKRNDHRHHAMDALTVAFTKPSYIQYLNHLNARKDENNKNYSVILAIEEKETIKVPTNNGKNKRVFIEPIPNFRQVAKKHLEEIFISHKAKNKVVTKNVNKPAGTDKQQITLTPRGQLHKETVYGKYQYYVNKEEKIGVKFDKETIAKVSNPLYREALLKRLQANDNDPKKAFTGKNALSKKPIYLDEAKTKTLPEKVNLTYLEEDFSIRKDISPDNFKDLKSIEKVIDQGVKRILIKRLQAYGNDPKKAFVDLEKNPIWLNKEKGIAIKRVTISGVNNAQPLHIGKDHLGKTTLNKEGKEIPVDYVSTGNNHHVAIYRDKEGNLQEQIVSFFEAVVRTQQGLPIIDKTYKQEEGWQFLFTMKQNEMFVFPNATTGFNPAEIDLLDPKNKKQISPNLFRVQKIATKDYFFRHHLETNVETDNVLKNTTWKREGLSGLKDIVKVRINHLGDIVSIGEY

SEQ ID NO: 16766 - protein, 1506 aa, unidentified
  REGION 1..1506: note = Cas Enzyme sequence
MFSQRNNPYCELLSNSATKVSVIFFISKFFLIFFVFISFLLSLPHQNIKRMKRILGLDLGSNSIGWAFVQQDFENKQGKIIATGSRIIPMDQGILGDFEKGNTVSQTAERTAYRTTRRLRERHLLRRERLHRVLHILGFLPPHYDAQIDFTKRYGKFIDNAEPKIAYNNGNFIFMNSFNEMVEDFKKHQPQLFYKKSNGEESKIPYDWTIYYLRKKALSQKITQQELAWLILHFNQKRGYYQLRGEEETENPNKEVAFHSLKVVDVEAEAPNKKGEIWYTIRLENGWIYRRTSKNPLDDWKGKTRDFIVTTDLNDDGTIKVDKEGKEKRSFRAPDENDWNLLKKKTERDIDFSGKTVGAYIYDHLLQNPNQKIKGKLVRTIERKYYKDELKAILAKQIALQPELFTETLLADCIRELYRKNETQQQNLLSKDFLHLFVEDIIFYQRPLRSKKSTIANCTLERRSYIDKETNERKDTPIKVCAKSNPYYQEFRVLQWLQNLRIYEIETDREVTAEFIETAEDYEALFNFLMSQKEIDNEGLLKYFLFAKNPQIKDKVAKSELKKWLTTYRWNYVYDAADNSSKKYPMNETGYELQRYLQKVEGLPANFLTFDTTYRLWHLLYSVKDKVEFEKALKKFAQEYQLDEASFVDSFKNFKPYPNEYGSFSEKAIKKLLPLMRFGNHWDFNRIDVSTQKRIDDLINGVANEDIRTIIREKAEKYQLNSETCFQGLPLWLAQYVVYNRHTEATDIEKWTSVNDLEAYLEDFKQHSLRNPIVEQVVTETLRVVRDVWQQYGRGQANFFDEIHIELGRELKKTAEERKQLSDKNQQNENTNLRIKKLLAELKEDASIQNVRPYSLVQQELLKIYEEGVFSATDEVEEDIQKIRKKAEPTTPEIQRYKLWLEQKYKSPYTGEVISLTKLFTEEYEIEHIIPQSRYYDDSLSNKVICESAVNKLKTNQLGLEFIQNHHGEKVRITGNKEVTIFTEEQYKEFVKKHYANNSAKQQKLLLNEIPEKMVARQLNDTRYISKYISEILSKIVRSDEKDEGVNSKNVIPCTGKITTALKQDWGLNDVWNELILPRFERMNQLTQTQLFTSYNDRLQKNLPTVPIEYSQGFQKKRIDHRHHAMDALVIACATREHINYMNNQHALDKNKDKEEKQQSRIDLRTILCEKKNNNWQFKKPWSTFTQEAKEALEHIVVSFKQNLRVINKATNYYEKWEEKNGVLVKKKIKQEGTNWAIRKPLHKETVSGKIVLDRKIGKDKILTATRKAVDITFTEKIISSITDTGIQKILLNYLKYKGSPEVAFSAEGLEELNKNIAQYNDGKKHQPIYKVRIFEEGSKFPLGEKSAKATKYVEAAKGTNLFFGVYQGKGKRTYATIPLNEVIERQKQGLPSVPERNEKGEPLLFSLSPNDLVYVPMEGEIAETIDFNNLSKEQKERIYNINDFSSTTCYFTPNRVAKAICPKEIDKKGKDSGSFDTKTASIEGVQIKEVCIKLKVDRLGNIIKA

SEQ ID NO: 16767 - protein, 1503 aa, unidentified
  REGION 1..1503: note = Cas Enzyme sequence
MFSQRNHPYCELLSNSATKVGIIFLMCKYFYIKIFITFVLSKNIIPMKHILGLDLGSNSIGWAFVQQDFENKQGKIIATGSRIIPMDQGILGDFERGNTVSQTAERTTYRSTRRLRERHLLRRERLHRVLHILGFLPPHYDAQIDFTKRYGKFIDNAEPKIAYNNGNFIFMNSFNEMVEDFKKHQPQLFYKKSNGEESKIPYDWTIYYLRKKALSQKITQQELAWLILHFNQKRGYYQLRGEEETENPNKEVAFHSLKVVDVEAEAPNKKGEIWYTIRLENGWIYRRTSKIPLDDWKGKTRDFIVTTDLNDDGTVKLDKEGKEKRSFRAPDENDWNLLKKKTEHDIDFSGKPVGTYIYDHLLQNPNQKIKGKLVRTIERKYYKDELKAILAKQIALQPELFTETLLADCIRELYRKNETQQQNLLSKDFLHLFVEDIIFYQRPLRSKKSTIANCTLEKGSYIDKETNERKDAPIKVCAKSNPYYQEFRVLQWLQNLRIYEIETDREVTAEFIETAEDYEALFNFLMSQKEIDNEGLLKYFLFAKNPQIKDKVAKSELKKWLTTYRWNYVYDAADNSSKKYPMNETGYELQRYLQKVEGLPANFLTFDTTYRLWHLLYSVKDKVEFEKALKKFAQEYQLDEASFVDSFKNFKPYPNEYGNFSEKAIKKLLPLMRFGNHWDFNRIDVSTQKRIDDLINGVANEDIRTIIREKAEKYQLNSESCFQGLPLWLAQYVVYNRHAEATDIEKWTSVNDLEAYLEDFKQHSLRNPIVEQVVTETLRVVRDVWQQYGGGQANFFDEIHIELGRELKKTSEERKRLSDKNQENENTNLRIKKLLAELKEDASIQNVRPYSLVQQELLKIYEEGVFSATDEVEEDIQKIRKKAEPSKADLQRYKLWLEQKYKSPYTGEVISLTKLFTEEYEIEHIIPQSRYYDDSLSNKVICESAVNKLKTNQLGLEFIQNHHGEKVRITGNKEVTIFTEEQYKEFVKKHYANNSAKQQKLLLNEIPEKMVARQLNDTRYISKYISEILSKIVRSDEKDEGVNSKNVIPCTGKITTALKQDWGLNDVWNDLILPRFERMNQLTQTQLFTSYNDRLQKNLPTVPIKYSQGFQKKRIDHRHHAMDALVIACVTREHINYMNNQHALDKSKDKKEKQQSRIDLRTILCEKKNNNWQFKKPWRTFTQEAKEALEHIVVSFKQNLRVINKATNYYEKWEEKNGVLVKKKVKQEGTNWAIRKPLHEETFSGKISLNREKVGKGNILTATRKAVDSSFDVKKISKITDTGIQKILLNYLKYKGSPEVAFSAEGLEELNKNIAQYNDGKKHQPIYKVRIYEKGSGRFVLGEKGTKSKKYVQGAPNLYFGVYQGKEKRTYATIPLNEVIERQKQGLPSVPEHNEKGEPLLFSLSPNDLVYVPMEGEATEAIDFSNLSKEQKERIYKTVSFTGNECHFVKSTIASLIKSYDAKSKIGELGSLNKLEVTISGDSRIKEVCIKLKVDRLGNITKA

SEQ ID NO: 16768 - protein, 1426 aa, unidentified
  REGION 1..1426: note = Cas Enzyme sequence
MKNILGLDLGTTSISFAHIVEDENKEKSEIKELGVRIVSLTTDEQSDFEKGKSITTNANRTLKHGARLNLDRYQQRRKYLIDLLQKANLITSSSILAENGKNTTHSTWQLRAKAVTERIEKEEFARVLLAINKKRGYKSSRKAKTEDEGQAIDGMAIAKRLYDENLTPGQLSLQLLQQNKKLLPDFYRSDLQREFDLVWNFQKQFYPDILTDSFYKELQGKGKDATSKAFSKRYHFDTAENKGSKESVRLQAYQWRAEAMSKQLSKEEVAYVLTEINNNLNNASGYLGAISDRSKELYFNRQTVGQYLYAQLQENRHNSLKNKVFYRQDYLDEFERIWETQASFHKELTDELKKQIRDVVIFYQRKLKSQKGLISFCEFESKEIEIEKDGKTITKSIGARVVPKSSPLFQEFKIWQILNNVTCKRKGIRKKKSSAKSTELDLFNESSQAIFSLDMECKQLLFDELNLKGDLKSDKVLKLLGYSPQEWEINYNQLEGNRTQKALYEAYLKIVEMEAHDVKNILQIKSAKDDWSLDESPLSASEIKEKVKDIFQALGICTKILYFDPLLPVKEFEKQDSYQLWHLLYSYESDDSTSGNETLYRILEKKYAFKREHARILANVALQDEYGSLSTKAIRKIYPNIKENQYSTACEMAGYKHSKLSLTTEELEARELKNIIPLLKKNALRNPVVEKILNQMINVVNALIEKNSERDAEGKITKYFHFDEIRIELARELKKNAQKRYEMTQNINKAKLEHQKISEILQKKFGIKNPTKSDIIRYRLYQELEHNGYKELYTNAPIARDMLFSKNIEIEHIVPKARVFDDSFSNKTLAFREFNIKKGESTAFDYITSLNSEEELNQYLTRVENAYKTKSISLTKYKNLLKKASEIGDGFINRDLRDTQYIAKKAKEILFQVTKNVLSTSGSITDRLREDWGLVDVMKELNMPKYQSLGLTEVEERKEGNKVTVIKNWTKRNDHRHHAMDALTVAFTKPSYIQYLNHLNARKDENNKNYSVILAIEEKETIKVPTNNGKNKRVFIEPIPNFRQVAKKHLEEIFISHKAKNKIVTKNVNKPAGTDKQQITLTPRGQLHKETIYGKYQYYVNKEEKIGVKFDKETIAKVSNPVYREALLKRLQANDNDPKKAFTGKNALSKKPIYLDEAKTKTLPEKVNLTYLEEDFSIRKDISPDNFKDLKSIEKVIDQGVKRILIKRLQAYGNDPKKAFVDLEKNPIWLNKEKGIAIKRVTISGVNNAQPLHIGKDHLGKTTLNKEGKEIPVDYVSTGNNHHVAIYRDKEGNLQEQIVSFFEAVVRTQQGLPIIDKTYKQEEGWQFLFTMKQNEMFVFPNATTGFNPAEIDLLDPKNKKQISPNLFRVQKIATKDYFFRHHLETNVETDNVLKNTTWKREGLSGLKDIVKVRINHLGDIVSIGEY

SEQ ID NO: 16769 - protein, 1510 aa, unidentified
  REGION 1..1510: note = Cas Enzyme sequence
VFSQRNNPYCELLSNSTAKVSIIFFISKFFLTFFVFISFLLSLPHQNVKRMKRILGLDLGSNSIGWAFVQQDFENKQGKIIAAGSRIIPMDQKMLSNFEEGTTVSQTAERTTYRSMRRLRERHLLRRERLHRVLHILGFLPPHYDSQIDFSKRYGKFIDDAEPKIAYNNRNFIFMDSFNEMIEDFRKHQPQLFYKKSNGEESKIPYDWTIYYLRKKALSQKITQQELAWLILHFNQKRGYYQLRGEEETEGNDMEIISSKVLSVIKKDKDKKYDKYWYDITLENGLVYKAAFYNDLVYSWIDQKREFVVKRALLKNGDEKIELSYLPTFDEIAKMDKKQQDKFYQKIKVKTESNIGNKTVGAYIYDHLLQNPNQKIKGKLVRTIERKYYKDELKAILAKQIALQPEFFTENLLADCIRELYRKNQTQQQKLLSKDFLHLFLEDIIFYQRPLRSKKSTIANCPLEKRSYIDKETNERKDVPIKVCAKSNPYYQEFRVLQWLQNLRIYEIETDREVTAEFIGTAQYYEALFNFLMSQKEIDNESLLKYFLLTKNPQIKDKAAKSELKKWLTTYRWNYVYDVADNSSKKYPMNETGYELQRYLQKIEGLPVNFLTFDITYRLWHLLYSVKDKVEFEKALKKFAQKYQLEEASFVDSFKDFKPYPNEYGSFSEKAIKKMLPLMRFGKHWNFKNIDVHTQKRIDDLINGVANEDIRTIIREKAEKYQLNSETCFQGLPLWLAQYIVYNRYAEATNIEKWTSVSDLETYLEDFKQHSLRNPIVEQVVTETLRVVRDIWQQYGGGQANFFDEIHIELGRELKNTSKERERLSKQNQENENTNLRIKKLLAELKEDANIQNVRPYSLVQQELLKIYEEGVFSSTDDIEEDIQKIRKKAEPTNLEIQRYKLWLEQKYKSPYTGEVISLTKLFTEEYEIEHIIPQSRYYDDSLSNKVICESAVNKLKTNQLGLEFIQNHHGEKVRIAGNKEVTIFTEEQYKEFVKKYYANNLAKQQKLLLNDIPEKMVARQLNDTRYISKYISEILSKIVRSDEKDEGVNSKNIIPCTGKITTALKQDWGLNDIWNELILPRFERMNQLTQTQLFTSYNDRLQKNLPTVPIKYSQGFQKKRIDHRHHAMDALVIACATREHINYMNNQHALDKSKDKKEKQQSRIVLRTILCEKKNNNWQFKKPWSTFTQEAKEALEHIVVSFKQNLRVINKATNYYEKWEEKDGILVKKKVKQEGTNWAIRKPLHKETVSGKIVLDKKIGKDKILTATRKTVDITFTEKVISSITDTGIQKILLNYLKYKGSPEVAFSAEGLEELNKNIAQYNDGKKHQPIYKVRIFEEGSKFPLGETGAKVTKYVEAAKGTNLFFGVYQGKEKRTYATIPLNEVIERQKQGLPSVPERNEKGEPLLFSLSPNDLVYVPMEGEAPEAIDFSNLSKEQKERIYKTVSFTGKECHFVKSTIASLIKSYDAKSKIGELGSLNKLEVTISGDSRIKEVCIKLKVDRLGNITKA

SEQ ID NO: 16770 - protein, 1506 aa, unidentified
  REGION 1..1506: note = Cas Enzyme sequence
MFSQRNNPYCELLSNSATKVSVIFFISKFFLIFFVFISFLLSLPHQNIKRMKNILGLDLGSNSIGWAFVQQDFENKQGRIIATGSRIIPMDQGILGDFEKGNTVSQTAERTTYRSMRRLRERHLLRRERLHRVLHILGFLPPHYDAQIDFTKRYGKFIDNAEPKIAYNNGNFIFMNSFNEMIEDFKKYQPQLFYKKSNGEESKIPYDWTIYYLRKKALSQKITQQELAWLILHFNQKRGYYQLRGEEETENPNKEVAFHSLKVVDVEAEAPNKKGEIWYTIRLENGWIYRRTSKNPLDDWKGKTRDFIVTTDLNDNGTIKLDKEGKEKRSFRAPDENDWNLLKKKTEHDIDFSGKPVGTYIYDHLLQNPNQKIKGKLVRTIERKYYKDELKAILAKQIALQPELFTEALLADCIRELYRKNETQQQNLLSKDFLHLFVEDIIFYQRPLRSKKSTIANCTLEKRSYIDKETNERKDTPIKVCAKSNPYYQEFRVLQWLQNLRIYEIETDREVTAGFIEPPQDYEALFNFLMSQKEIDNEGLLKYFLFAKNPQIKNKAAKSELKKWLTTYRWNYVYDAADNSSKKYPMNETGYELQRYLQKVEGLPANFLTFDITYQLWHLLYSVKDKVEFEKALKKFAQEYQLDEASFVDSFKNFKPYPNEYGSFSEKAIKKLLPLMRFGNHWDFNRIDVSTQKRIDDLINGVANEDIRTIIREKAEKYQLNSETCFQGLPLWLAQYVVYNRHAEATDIEKWTSVNDLEAYLEDFKQHSLRNPIVEQVVTETLRVVRDVWQQYGRGQANFFDEIHIELGRELKKTAEERKQLSDKNQQNENTNLRIKKLLAELKEDASIQNVRPYSLVQQELLKIYEEGVFSATDEVEEDIQKIRKKAEPTTPEIQRYKLWLEQKYKSPYTGEVISLTKLFTEEYEIEHIIPQSRYYDDSLSNKVICESAVNKLKTNQLGLEFIQNHHGEKVRITGNKEVTIFTEEQYKEFVKKHYANNSAKQQKLLLNEIPEKMVARQLNDTRYISKYISEILSKIVRSDEKDEGVNSKNVIPCTGKITTALKQDWGLNDVWNELILPRFERMNQLTQTQLFTSYNDRLQKNLPTVPIEYSQGFQKKRIDHRHHAMDALVIACATREHINYMNNQHALDKNKDKEEKQQSRIDLRTILCEKKNNNWQFKKPWSTFTQEAKEALEHIVVSFKQNLRVINKATNYYEKWEEKNGVLVKKKIKQEGTNWAIRKPLHKETVSGKIVLDRKIGKDKILTATRKAVDITFTEKIISSITDTGIQKILLNYLKYKGSPEVAFSAEGLEELNKNIAQYNDGKKHQPIYKVRIFEEGSKFPLGEKSAKATKYVEAAKGTNLFFGVYQGKGKRTYATIPLNEVIERQKQGLPSVPERNEKGEPLLFSLSPNDLVYVPMEGEIAETIDFNNLSKEQKERIYNINDFSSTTCYFTPNRVAKAICPKEIDKKGKDSGSFDTKTASIEGVQIKEVCIKLKVDRLGNIIKA

SEQ ID NO: 16771 - protein, 1411 aa, unidentified
  REGION 1..1411: note = Cas Enzyme sequence
MDQSILGDFEKGNTVSQTAERTAYRSIRRLRERHLLRRERLHRVLHILGFLPPHYDAQIDFSKRYGKFIDNAEPKIAYNNGNFIFTNSFNEMIEDFKKHQPQLFYKKSNGEESKIPYDWTIYYLRKKALSQKITQQELAWLILHFNQKRGYYQLRGEEETESPNKEVAFHSLKVVEVEAEAPNKKGEIWYTIRLENGWIYRRTSKIPLDDWKGKTRDFIVTTDLNDDGTIKLDKEGKEKRSFRAPDENDWNLLKKKTEHDIDFSGKTVGAYIYDHLLQDPNQKIKGKLVRTIERKYYKNELKAILTQQIALQPELFTKNLLADCIRELYRKNETQQQNLLSKDFLHLFVEDIIFYQRPLRSKKSTIANCTLEKRLYIDKESNERKDTPIKVCAKSNPYYQEFRALQWLQNLRIYEIETDREVTAEFIETPQDYEALFNFLMSQKEIDNESLLKYFLHAKNPQIKDKAAKSELKKWLTTYRWNYVYDVADNSSKKYPMNETGYDLQRYLQKVEGLPANFLTFDTTYRLWHLLYSVKDKVEFEKALKRFAKKKQLNETSFIESFKNFKPYPNEYGSFSEKAIKKLLPLMRFGNHWDFNRIDVSTQKRIDDLINGVANENIRTIIREKAEKYQLNSESCFQGLPLWLAQYVVYNRHAEATDIEKWTSVSDLEAYLEDFKQHSLRNPIVEQVVTETLRVVRDIWQQYGGGQANFFDEIHIELGRELKKTAEERKQLSDKNQQNENTNLRIKKLLAELKEDASIQNVRPYSPVQQELLKIYEEGVFSSTDEIEEDIQKIRKKTEPSKADLQRYKLWLEQKYKSPYTGEVISLTKLFTEEYEIEHIIPQSRYYDDSFSNKVICESAVNKLKTNLLGLEFIQKHHGEKVRITANKEVTIFTEEQYKEFVKKHYANNLAKQQKLLLNEIPEKMVARQLNDTRYISKYISEILSKIVRSDEKDEGVNSKNVIPCTGKITTALKQDWGLNDVWNELILPRFERMNQLTQTQLFTSYNDRLQKNLPTVPMEYSQGFQKKRIDHRHHAMDALVIACATRDHINYMNNQHALDKSKDKKEKQQSRIDLRTILCEKKNNNWQFKKPWSTFTQEAKEALEHIVVSFKQNLRVINKATNYYEKWEEKNGTLVKKKVKQEGANWAIRKPLHKETVSGKIVLDRKIGKDKILTATRKAVDITFTEKIISSITDTGIQKILLNYLKYKGSPEVAFSAEGLEELNKNIAQYNDGKKHQPIYKVRIFEEGSKFPLGETGAKATKYVEAAKGTNLFFGVYQGKEKRSYATIPLNEVIERQKQGLPSVPERNEKGEPLLFSLSPNDLVYVPMEGEIAETIDFNNLSKEQKERIYKTVSFTGNQCFFVQEAVASPIVNKMEYSPLNKMERSIVGIMIKEVCIKLKVDRLGNITKA

SEQ ID NO: 16772 - protein, 1457 aa, unidentified
  REGION 1..1457: note = Cas Enzyme sequence
MKRILGLDLGSNSIGWALVQQDFENKQGKIMATGSRIIPMDQSILGDFEKGNTVSQTAERTTYRSIRRLRERHLLRRERLHRVLHILGFLPPHYDAQIDFSKRYGKFIDNTEPKIAYNNGNFIFTNSFNEMIEDFKKHQPQLFYKKSNGEESKIPYDWTIYYLRKKALSQKITQQELAWLILHFNQKRGYYQLRGEEETESPNKEVAFHSLKVVEVEAEAPNKKGEIWYTIRLENGWIYRRTSKIPLDDWKGKTRDFIVTTDLNDDGTIKVDKEGKEKRSFRAPEENDWNLLKKKTEHDIDFSGKTVGAYIYDHLLQDPNQKIKGKLVRTIERKYYKNELKAILTKQIALQPELFTKNLLADCIRELYRKNETQQQNLLLKDFLHLFVEDIIFYQRPLRSKKSTIANCTLEKRSYIDKETNERKDTPIKVCAKSNPYYQEFRVLQWLQNLRIYEIGTDREVTAEFIETPQDYEALFNFLMSQKEIDNESLLKYFLLAKNPQIKDKAAKSELKKWITTYRWNYVYDVADNSSKKYPMNETGYDLQRYLQKVEGLPANFLTFDTTYRLWHLLYSVKDKVEFEKALKRFAKKKQLNETSFIESFKNFKPYPNEYGSFSEKAIKKLLPLMRFGNHWDFNRIDVSTQKRIDDLINGVANENIRTIIREKAEKYQLNSESCFQGLPLWLAQYVVYNRHAEATDIEKWTSVSDLEAYLEDFKQHSLRNPIVEQVVTETLRVVRDIWQQYGGGQANFFDEIHIELGRELKKTAEERKQLSNRNQENENTNLRIKKLLAELKEDASIQNVRPYSPVQQELLKIYEEGVFSSTDEIEEDIQKIRKKADPTTPEIQRYKLWLEQKYKSPYTGEVISLTKLFTEEYEIEHIIPQSRYYDDSFSNKVICESAVNKLKTNLLGLEFIQKHHGEKVRVAGNKEVTIFTEEQYKDFVKKHYANNLAKQQKLLLDEIPEKMVARQLNDTRYISKYISEILSKIVRSDEKDEGVNSKNVIPCTGKITTALKQDWGLNDVWNELILPRFERMNQLTQTQLFTSYNDRYQKNLPTVPIQYSQGFQKKRIDHRHHAMDALVIACATREHINYMNNQHALDKSKDKKEKQQSRIDLRTILCEKKNNNWQFKKPWSTFTQEAQEALEHIVVSFKQNLRVINKATNYYEKWEEKNGVLVKKKVKQEGTNWAIRKPLHKETVSGKIVLDRKIGKDKILTATRKAVDITFTEKIISSITDTGIQKILLNYLKYKGSPEVAFSAEGLEELNKNIAQYNEGKKHQPIYKVRIFEEGSKFPLGETSAKATKFVEAAKGTNLFFGVYQGKEKRSYATIPLNEVIERQKQGLPSVPERNEKGEPLLFSLSPNDLVYVPMEGEATETIDFNNLSKEQKERIYKTVSFTGNECHFVKSTIASLIKSYDAKSKIGELGSLNKLEVTISGDSRIKEVCIKLKVDRLGNITKA

SEQ ID NO: 16773 - protein, 1457 aa, unidentified
  REGION 1..1457: note = Cas Enzyme sequence
MKHILGLDLGSNSIGWAFVQQDFENKQGKIIATGSRIIPMDQGILGDFDKGNTVSQTAERTTYRSMRRLRERHLLRRERLHRVLHILGFLPPHYDAQIDFTKRYGKFIDNAEPKIAYNNGNFIFTNSFNEMIEDFKKHQPQLFYKKSNGEESKIPYDWTIYYLRKKALSQKITQQELAWLILHFNQKRGYYQLRGEEETESPNKEVAFHSLKVVEVEAEAPNKKGEIWYTIRLENGWIYRRTSKIPLDDWKGKTRDFIVTTDLNNDGTIKVDKEGKEKRSFRAPEENDWNLLKKKTEHDIDFSGKTVGAYIYDHLLQDPNQKIKGKLVRTIERKYYKNELKAILTKQIALQPELFTKNLLADCIRELYRKNETQQQNLLSKDFLHLFVEDIIFYQRPLRSKKSTIANCTLEKRSYIDKETNERKDTPIKVCAKSNPYYQEFRVLQWLQNLRIYEIETDREVTAQFIETPQDYEALFNFLMSQKEIDNESLLKYFLLAKNPQIKDKAAKSELKKWLTTYRWNYVYDVADNSSKKYPMNETGYDLQRYLQKVEGLPANFLTFDTTYQLWHLLYSVKDKVEFEKALKRFAKKKQLNETSFIESFKNFKPYPNEYGSFSEKAIKKLLPLMRFGNHWDFNRIDVSTQKRIDDLINGVANEDIRTIIREKAEKYQLNSESCFQGLPLWLAQYIVYNRHAEATDIEKWTSVNDLEAYLEDFKQHSLRNPIVEQVVTETLRVVRDIWQQYGGGQANFFDEIHIELGRELKKTAEERKQLSNRNQENENTNLRIKKLLAELKEDASIQNVRPYSPVQQELLKIYEEGVFSSTDEIDEEIQKIRKKAEPTTPEIQRYKLWLEQKYKSPYTGEVISLTKLFTEEYEIEHIIPQSRYYDDSLSNKVICESAVNKLKTNLLGLEFIQNHHGEKVRITANKEVTIFTEEQYKEFVKKHYANNLAKQQKLLLNEIPEKMVDRQLNDTRYISKYISEILSKIVRSDEKDEGVNSKNVIPCTGKITTALKQDWGLNDVWNELILPRFERMNQLTQTQLFTSYNDRLQKNLPTVPIEYSQGFQKKRIDHRHHAMDALVIACATREHINYMNNQHALDKSKDKKEKQQSRIDLRTILCEKKNNNWQFKKPWATFTQEAKESLEHIVVSFKQNLRVINKATNYYEKWEEKNGVLVKKKVKQEGTNWAIRKPLHKETVSGKIVLDRKIGKDKILTATRKAVDITFTEKIISSITDTGIQKILLNYLKYKGSPEVAFSAEGLEELNKNIAQYNDGKKHQPIYKVRIFEEGSKFPLGEIGAKATKFVEAAKGTNLFFGVYQGKEKRSYATIPFNKVIERQKQGLPSVPERNEKGEPLLFSLSPNDLVYVPMEGEIAETIDFNNLSKEQKERIYKTVSFTGNECHFVKSTIASLIKSYDAKSKIGELGSLNKLEVTISGDSRIKEVCIKLKVDRLGNITKA

SEQ ID NO: 16774 - protein, 1450 aa, unidentified
  REGION 1..1450: note = Cas Enzyme sequence
MKRILGLDLGSNSIGWALVQQDFENKQGKIMATGSRIIPMDQSILGDFEKGNTVSQTAERTAYRSIRRLRERHLLRRERLHRVLHILGFLPPHYDAQIDFSKRYGKFIDNAEPKIAYNNGNFIFTNSFNEMIEDFKKHQPQLFYKKSNGEESKIPYDWTIYYLRKKALSQKITQQELAWLILHFNQKRGYYQLRGEEETESPNKEVAFHSLKVVEVEAEAPNKKGEIWYTIRLENGWIYRRTSKIPLDDWKGKTRDFIVTTDLNDDGTIKLDKEGKEKRSFRAPDENDWNLLKKKTEHDIDFSGKTVGAYIYDHLLQDPNQKIKGKLVRTIERKYYKNELKAILTQQIALQPELFTKNLLADCIRELYRKNETQQQNLLSKDFLHLFVEDIIFYQRPLRSKKSTIANCTLEKRLYIDKESNERKDTPIKVCAKSNPYYQEFRALQWLQNLRIYEIETDREVTAEFIETPQDYEALFNFLMSQKEIDNESLLKYFLHAKNPQIKDKAAKSELKKWLTTYRWNYVYDVADNSSKKYPMNETGYDLQRYLQKVEGLPANFLTFDTTYRLWHLLYSVKDKVEFEKALKRFAKKKQLNETSFIESFKNFKPYPNEYGSFSEKAIKKLLPLMRFGNHWDFNRIDVSTQKRIDDLINGVANENIRTIIREKAEKYQLNSESCFQGLPLWLAQYVVYNRHAEATDIEKWTSVSDLEAYLEDFKQHSLRNPIVEQVVTETLRVVRDIWQQYGGGQANFFDEIHIELGRELKKTAEERKQLSNRNQENENTNLRIKKLLAELKEDASIQNVRPYSPVQQELLKIYEEGVFSSTDEIEEDIQKIRKKTEPSKADLQRYKLWLEQKYKSPYTGEVISLTKLFTEEYEIEHIIPQSRYYDDSFSNKVICESAVNKLKTNLLGLEFIQKHHGEKVRITANKEVTIFTEEQYKEFVKKHYANNLAKQQKLLLNEIPEKMVARQLNDTRYISKYISEILSKIVRSDEKDEGVNSKNVIPCTGKITTALKQDWGLNDVWNELILPRFERMNQLTQTQLFTSYNDRLQKNLPTVPMEYSQGFQKKRIDHRHHAMDALVIACATRDHINYMNNQHALDKSKDKKEKQQSRIDLRTILCEKKNNNWQFKKPWSTFTQEAKEALEHIVVSFKQNLRVINKATNYYEKWEEKNGTLVKKKVKQEGANWAIRKPLHKETVSGKIVLDRKIGKDKILTATRKAVDITFTEKIISSITDTGIQKILLNYLKYKGSPEVAFSAEGLEELNKNIAQYNDGKKHQPIYKVRIFEEGSKFPLGETGAKATKYVEAAKGTNLFFGVYQGKEKRSYATIPLNEVIERQKQGLPSVPERNEKGEPLLFSLSPNDLVYVPMEGEIAETIDFNNLSKEQKERIYKTVSFTGNQCFFVQEAVASPIVNKMEYSPLNKMERSIVGIMIKEVCIKLKVDRLGNITKA

SEQ ID NO: 16775 - protein, 1435 aa, unidentified
  REGION 1..1435: note = Cas Enzyme sequence
MKNILGLDLGTTSIGFAHIVEDENKEKSEIKELGVRIVSLTTDEQSDFEKGKSISTNANRTFKHGARLNLDRYQQRRKFLIDLLQKANLITSSSILAENGKNTTHSTWQLRAKAVTERIEKEEFARVLLAINKKRGYKSSRKAKTEDEGQAIDGMAIAKRLYDENLTPGQLSLQLLQQNKKLLPDFYRSDLQKEFDLVWNFQKQFYPDILTDSFYKELQGKGKDATSKAFSKRYHFDTAENKGSRESVRLQAYQWRAEAISKQLSKEEVAYVLTEINNNLNNASGYLGAISDRSKELYFNRQTVGQYLYAQLQENRHNSLKNKVFYRQDYLDEFERIWETQASFHKELTDELKKQIRDVVIFYQRKLKSQKGLVSFCEFESKEIEIEKDGKAITKNIGARVVPKSSPLFQEFKIWQILNNVTCKRKGIRKKKSSTNPTQLDLFNEPSQTIFSLDMECKQLLFEELNIKGDLKSDKVLKLLGYSPQEWEINYNQLEGNRTQKSLYEAYLKIIEIEGYEVKDILQIKSTKDDWSLDESPLSASEIRERVKAIFQTLGICTKILYFDPLLPIKEFEQQYSYQLWHLLYSYESDDSTSGNETLYRILEKKYAFKREHARILANVALQDDYGSLSTKAIRKIYPYIKENQYSKACELAAYKHSKLSLTTEELEARELKNIIPLLKKNALRNPVVEKILNQMINVVNALIEKNSERDAEGKITKYFHFDEIRIELARELKKNAQERYEMTQNINKAKLEHQKISEKLQKQFGIKNPTKSDIIRYRLYQELEHNGYKELYTNTYIAPDVLFSKNIDIEHIVPKARVFDDSFSNKTLAFKDFNIKKGESTAFDYITSLNCEGELNQYLTRVENAYKTKSISLTKYKNLLKKASEIGDGFINRDLRDTQYIAKKAKEILFQVTKNVLSTSGSITDRLREDWGLVDVMKELNMPKYQSLGLTEVEERKDGNKVTVIKDWTKRNDHRHHAMDALTVAFTKPSYIQYLNHLNARKDENNKNYSVILAIEKKETIKVLTNNGKNKRVFIEPIPNFRQVAKKHLEEIFISHKAKNKVVTKNINKPAGTDKQQITLTPRGQLHKETIYGKYQYYVNKEEKVGVKFDERTIIKVSNPLYREALLKRLQANDNDPKKAFTGKNALSKKPIYLDEAKTKTLPEKVNLTYLEEDFSIRKDISPDNFKDLKSIEKVIDQGVKRILIKRLQAYDNDPKKAFVDLEKNPIWLNKEKGIAIKRVTISGVSNAQPLHIGKNHLGKTTLNKEGKEITVDYVSTGNNHHVAIYRDKEGNLQEQIVSFFDAVVRAQQGLPIVDKTYKQAEGWQFLFTMKQNEMFVFPNEATGFNPAEIDLLDPKNKKLISPNLFRVQTISVVKYGNSVVRDFKFRHHLEATLQDDKILQGITFQQIKSLEPLRNIVKVRINHLGDIVNIGEY

SEQ ID NO: 16776 - protein, 945 aa, unidentified
  REGION 1..945: note = Cas Enzyme sequence
MKNILGLDLGTTSIGFAHIVEDENKEKSEIKELGVRIVSLTTDEQSDFEKGKSITTNANRTLKHGARLNLDRYQQRRKYLIDLLQKANLITSSSILAENGKNTTHSTWQLRAKAVTERIEKEEFARVLLAINKKRGYKSSRKAKTEDEGQAIDGMAIAKRLYDENLTLGQLSLQLLQQNKKLLPDFYRSDLQREFDLVWNFQKQFYPDILTDSFYKELQGKGKDATSKAFSKRYHFDTAENKGSKESVRLQAYQWRAEAMSKQLSKEEVAYVLTEINNNLNNASGYLGAISDRSKELYFNRQTVGQYLYAQLQENRHNSLKNKVFYRQDYLDEFERIWETQASFHKELTEELKKQIRDVVIFYQRKLKSQKGLISFCEFESKEIEIEKDGKTITKSIGARVVPKSSPLFQEFKIWQILNNVTCKRKGIRKKKSSAKSTELDLFNEPSQTIFSLDMECKQLLFEELNLKGDLKSDKVLKLLGYSPQEWEINYNQLEGNRTQKALYEAYLKIVEMEAHDVKDILQIKSAKDDWSLDESPLSASEIKEKIKDIFQALGICTKILYFDPLLPVKEFEKQDSYQLWHLLYSYESDDSTSGNETLYRILEKKYAFKREHARILANVALQDDYGSLSTKAIRKIYPYIKENQYSKACELAGYKHSKLSLTTEELEARELKNIIPLLKKNALRNPVVEKILNQMINVVNALIEKNSERDAEGKITKYFHFDEIRIELARELKKNAQKRYEMTQNINKAKLEHQKISEILQKQFGIKNPTKSDIIRYRLYQELEHNGYKELYTNAPIARDMLFSKNIEIEHIVPKARVFDDSFSNKTLTFHRINSDKGESTAFDYITSLNSEEELNQYLTRVENAYKTKSISPAKYKNLLKKASEIGDGFINRDLRDTQYIAKKAKEILFQVTKNVLSTSGSITDRLREDWGLVDVMKELNISR

SEQ ID NO: 16777 - protein, 1426 aa, unidentified
  REGION 1..1426: note = Cas Enzyme sequence
MKNILGLDLGTTSIGFAHIVEDENKEKSEIKELGVRIVSLTTDEQSDFEKGKSITTNANRTLKHGARLNLDRYQQRRKYLIDLLQKANLITSSSILAENGKNTTHSTWQLRAKAVTERIEKEEFARVLLAINKKRGYKSSRKAKTEDEGQAIDGMAIAKRLYDENLTLGQLSLQLLQQNKKLLPDFYRSDLQREFDLVWNFQKQFYPDILTDSFYKELQGKGKDATSKAFSKRYHFDTAENKGSKESVRLQAYQWRAEAMSKQLSKEEVAYVLTEINNNLNNASGYLGAISDRSKELYFNRQTVGQYLYAQLQENRHNSLKNKVFYRQDYLDEFERIWETQASFHKELTEELKKQIRDVVIFYQRKPKSQKGLISFCEFESKEIEIEKDGKTITKSIGARVVPKSSPLFQEFKIWQILNNVICKRKGIREKKISAKTTQLDLLNESSQTIFSLDMECKQLLFDELNLKGDLKSDKVLKLLGYSPQEWEINYNQLEGNRTQKALYEAYLKIVEMEAHDVKDILQIKSAKDDWSLDESPLSASEIRESVKAIFQALGICTKILYFDPLLPVKEFEEQDSYQLWHLLYSYESDDSTSGNETLYRILEKKYAFKREHARILANVALQDDYGSLSTKAIRKIYPYIKENQYSKACELAGYKHSKLSLTTEELEARELKNIIPLLKKNALRNPVVEKILNQMINVVNALIEKNSERDAEGKITKYFHFDEIRIELARELKKNAQKRYEMTQNINKAKLEHQKISEILQKQFGIKNPTKSDIIRYRLYQELEHNGYKELYTNAPIARDMLFSKNIEIEHIVPKARVFDDSFSNKTLTFHRINSDKGESTAFDYITSLNSEEELNQYLTRVENAYKTKSISPAKYKNLLKKASEIGDGFINRDLRDTQYIAKKAKEILFQVTKNVLSTSGSITDRLREDWGLVDVMKELNMPKYQSLGLTEVEERKDGNKVTVIKNWTKRNDHRHHAMDALTVAFTKPSYIQYLNHLNARKDENNKNYSVILAIEEKETIKVPTNNGKNKRVFIEPIPNFRQVAKKHLEEIFISHKAKNKVVTKNVNKPAGTDKQQITLTPRGQLHKETVYGKYQYYVNKEEKIGVKFDKETIAKVSNPLYREALLKRLQANDNDPKKAFTGKNALSKKPIYLDEAKTKTLPEKVNLTYLEEDFSIRKDISPDNFKDLKSIEKVIDQGVKRILIKRLQAYGNDPKKAFVDLEKNPIWLNKEKGIAIKRVTISGVNNAQPLHIGKDHLGKTTLNKEGKEIPVDYVSTGNNHHVAIYRDKEGNLQEQIVSFFEAVVRTQQGLPIIDKTYKQEEGWQFLFTMKQNEMFVFPNATTGFNPAEIDLLDPKNKKQISPNLFRVQKIATKDYFFRHHLETNVETDNVLKNTTWKREGLSGLKDIVKVRINHLGDIVSIGEY

SEQ ID NO: 16778 - protein, 1478 aa, unidentified
  REGION 1..1478: note = Cas Enzyme sequence
MCKYFYIKIFITFVLSKNIIPMKHILGLDLGSNSIGWAFVQQDFENKQGRIIATGSRIIPMDQGILGDFERGNTVSQTAERTTYRSTRRLRERHLLRRERLHRVLHILGFLPPHYDAQIDFTKRYGKFIDNAEPKIAYNNGKFIFMNSFNEMIEDFKKHQPQLFYKKSNGEESKIPYDWTIYYLRKKALSQKITQQELAWLILHFNQKRGYYQLRGEEETENPNKEVAFHSLKVVDVEAEAPNKKGEIWYTIRLENGWIYRRTSKIPLDDWKGKTRDFIVTTDLNDDGTIKLDKEGKEKRSFRAPDENDWNLLKKKTEHDIDFSGKTVGAYIYDHLLQNPNQKIKGKLVRTIERKYYKDELKAILAKQIALQPELFTETLLADCIRELYRKNETQQQNLLSKDFLHLFVEDIIFYQRPLRSKKSTIANCTLERRSYIDKETNERKNAPIKVCAKSNPYYQEFRVLQWLQNLRIYEIETDREVTAEFIETAQDNEALFNFLMSQKEIDNESLLKYFLFAKNPQIKDKVAKSELKKWLTTYRWNYVYDVADNSSKKYPMNETGYDLQRYLQKVEGLPANFLTFDTTYRLWHLLYSVKDKVEFEKALKKFAQEYQLDEASFVDSFKNFKPYPNEYGSFSEKAIKKLLPLMRFGNHWDFNRIDVSTQKRIDDLINGVANEDIRTIIREKAEKYQLNSESCFQGLPLWLAQYVVYNRHAEATDIEKWTSVNDLEAYLEDFKQHSLRNPIVEQVVTETLRVVRDVWQQYGRGQANFFDEIHIELGRELKKTAEERKQLSDKNQENENTNLRIKKLLAELKGDASIQNVRPYSLVQQELLKIYEEGVFSATDEVEEDIQKIRKKAEPTTPEIQRYKLWLEQKYKSPYTGEVISLTKLFTEEYEIEHIIPQSRYYDDSLSNKVICESAVNKLKTNQLGLEFIQNHHGEKVRITGNKEVTIFTEEQYKEFVKKHYANNSAKQQKLLLNEIPEKMVARQLNDTRYISKYVSEILSKIVRSDEKDEGVNSKNIIPCTGKITTALKQDWGLNDVWNELILPRFERMNQLTQTQLFTSYNDRLQKNLPTVPIEYSQGFQKKRIDHRHHAMDALVIACATKEHINYMNNQHALDKNKDKKEKQQSRIDLRTILCEKKNNNWQFKKPWSTFTQEAKEALEHIVVSFKQNLRVINKATNYYEKWEEKNGVLVKKKVKQEGTNWAIRKPLHKETVSGKIVLDRKIGKDKILTATRKAVDITFTEKIISSITDTGIQKILLNYLKYKGSPEVAFSAEGLEELNKNIAQYNNGKKHQPIYKVRIFEEGSKFPLGETGAKATKYVEAAKGTNLFFGVYQGKGKRTYATIPLNEVIERQKQGLSSVPERNEKGEPLLFTLSPNDLVYVPMEGEIAETIDFNNLSKEQKERIYKTVSFTGNECHFVKSTIASLIKSYDAKSKIGELGSLNKLEVTISGDSRIKEVCIKLKVDRLGNITKA

SEQ ID NO: 16779 - protein, 1450 aa, unidentified
  REGION 1..1450: note = Cas Enzyme sequence
MKHILGLDLGSNSIGWALVQQDFENKQGKIIAAGSRIIPMDQGVLGDFEKGNTVSQTAERTTYRSMRRLRERHLLRRERLHRVLHILGFLPPHYDAQIDFTKRYGKFIDNAEPKIAYNNGNFIFTNSFNEMIEDFKKHQPQLFYKKSNGEESKIPYDWTIYYLRKKALSQKITQQELAWLILHFNQKRGYYQLRGEEETESPNKEVAFHSLKVVEVEAEAPNKKGEIWYTIRLENGWIYRRTSKIPLDDWKGKTRDFIVTTDLNDDGTIKVDKEGKEKRSFRAPEENDWNLLKKKTEHDIDFSGKTVGAYIYDHLLQDPNQKIKGKLVRTIERKYYKNELKAILAKQIVLQPELFTENLLVDCIRELYRKNETQQQNLLSKDFLHLFVEDIIFYQRPLRSKKSTIANCTLEKRSYIDKETNERKDIPIKVCAKSNPYYQEFRVLQWLQNLRIYEIETNREVTAEFIETAEDYEALLNFLMSQKEIDNEGLLKYFLLTKNPQIKDKAAKSELKKWLTTYRWNYVYDVADNSSKKYPMNETGYDLQRYLQKVEGLPANFLTFDTTYRLWHLLYSVKDKVEFEKALKKFAQEYQLDEASFLDSFKNFKPYPNEYGSFSEKAIKKMLPLMRFGNHWDFNRIDVSTQKRIDDLINGVANEDIRTIIREKAEKYQLNSESCFQGLPLWLAQYVVYNRHTEATDVEKWTSVSDLEAYLEDFKQHSLRNPIVEQVVTETLRVVRDIWQQYGGGQANFFDEIHIELGRELKKTAEERKQLSNRNQENENTNLRIKKLLAELKEDASIENVRPYSPVQQELLKIYEEGVFSSTDEIEEDIRKIRKKADPTTPEIQRYKLWLEQKYKSPYTGEVISLTKLFTEEYEIEHIIPQSRYYDDSLSNKVICELAVNKLKTNLLGLEFIQKHHGEKVRVAGNKEVTIFTEEQYKEFVKKHYANNLAKQQKLLLNEIPEKMVARQLNDTRYISKYISEILSKIVRSDEKDEVVNSKNVIPCTGKITTALKQDWGLNDVWNELILPRFERMNQLTQTQLFTSYNDRLQKNLPTVPMEYSQGFQKKRIDHRHHAMDALVIACATRDHINYMNNQHALDKSKDKKEKQQSRIDLRTILCEKKNNNWQFKKPWSTFTQEAKEALEHIVVSFKQNLRVINKATNYYEKWEEKNGTLVKKKVKQEGTNWAIRKPLHKETVSGKIVLDRKIGKDKILTATRKAVDITFTEKIISSITDTGIQKILLNYLKYKGSPEVAFSAEGLEELNKNIAQYNDGKKHQPIYKVRIFEEGSKFPLGETGAKTTKYVEAAKGTNLFFGVYQGKEKRTYATIPLNEVIERQKQGLPSVPERNEKGEPLLFILSPNDLVYVPMEGEIAETIDFNNLSKDQKERIYKTVSFTGNQCFFVQEAVASPIVNKMEYSPLNKMERSIVGIMIKEVCIKLKVDRLGNITKA

SEQ ID NO: 16780 - protein, 1074 aa, unidentified
  REGION 1..1074: note = Cas Enzyme sequence
FYQRKLKSQKGLISFCEFESKEIEIEKDGKTITKSIGARVVPKSSPLFQEFKIWQILNNVTCKRKGIRKKKSSAKSTELDLFNEPSQTIFSLDMECKKLLFEELNLKGDLKSDKVLKLLGYSPQEWEINYNQLEGNRTQKALYEAYLKIVEMEAHDVKDILQIKSAKDDWSLNESPLSASEIKEKVKDIFQTLGICTKILYFDPFLPVKEFEEQDSYQLWHLLYSYESDDSTSGNETLYRILEKKYAFKREHATILANVALQDDYGNLSTKAIRKLYPYIKENQYSTACKKAGYKHSKLSLTTEELEARELKNIIPLLKKNALRNPVVEKILNQMINVVNALIEKNSERDAEGKITKYFHFDEIRIELARELKKNAQERYEMTQNINKAKLEHQKISEILQKQFGIKNPTKSDIIRYRLYQELEHNGYKELYTNAPIARDMLFSKNIEIEHIVPKARVFDDSFSNKTLAFREFNIKKGESTAFDYITSLNNEEELNQYLNRVENAYKTKNISPTKYKNLLKKASEIGDGFINRDLRDTQYIAKKAKEILFQVTKNVLSTSGSITDRLREDWGLVDVMKELNMPKYQSLGLTEVEERKDGNKVTVIKNWTKRNDHRHHAMDALTVAFTKPSYIQYLNHLNARKDKNNKNYSVILAIEEKETIKVPTNNGKNKRVFIEPIPNFRQVAKKHLEEIFISHKAKNKVVTKNVNKPAGTDKQQITLTPRGQLHKETVYGKYQYYVNKEEKIGVKFDERTITKISNPLYREALLKRLQANDNDPKKAFTGKNALSKKPIYLDEAKTKTLPEKVNLAYLEEDFSIRKDISPDNFKDLKSIEKVIDQGVKRILIKRLQDYDNDPKKAFVDLEKKPIWLNKEKGIAIKRVTISGVSNAQPLHIGKDHLGKTTLNKEGKEIPVDYVSTGNNHHVAIYRDKEGNLQEQIVSFFDAVVRAQQGLPIVDKTYKQAEGWQFLFTMKQNEMFVFPNEATGFNPAEIDLLDPKNKKLISPNLFRVQTISVVKYGNSVVRDFKFRHHLETTLQDDKILQGITFQQIKSLEPLRNIVKVRVNHLGDIISVGEY

SEQ ID NO: 16781 - protein, 1426 aa, unidentified
  REGION 1..1426: note = Cas Enzyme sequence
MKNILGLDLGTTSISFAHIVEDENKEKSEIKELGVRIVSLTTDEQSDFEKGKSITTNANRTLKHGARLNLDRYQQRRKYLIDLLQKANLITSSSILAENGKNTTHSTWQLRAKAVTERIEKEEFARVLLAINKKRGYKSSRKAKTEDEGQAIDGMAIAKRLYDENLTPGQLSLQLLQQNKKLLPDFYRSDLQREFDLVWNFQKQFYPDILTDTFYKELQGKGKDATSKAFSKRYHFDTAENKGSKESVRLQAYQWRAEAISKQLSKEEVAYVLTEINNNLNNASGYLGAISDRSKELYFNRQTVGQYLYAQLQENRHNSLKNKVFYRQDYLDEFERIWETQASFHKELTEELKKQIRDVVIFYQRKLKSQKGLISFCEFESKEIEIEKDGKTITKSIGARVVPKSSPLFQEFKIWQILNNVTCKRKGIRKKKSSAKSTELDLFNEPSQTIFSLDMECKQLLFEELNLKGDLKSDKVLKLLGYSPQEWEINYNQLEGNRTQKALYEAYLKIVEMEAHDVKDILQIKSAKDDWSLDESPLSASEIKEKIKDIFQALGICTKILYFDPLLPVKEFEKQDSYQLWHLLYSYESDDSTSGNETLYRILEKKYAFKREHARILANVALQDDYGSLSTKAIRKIYPNIKENQYSKACELAGYKHSKLSLTTEELEARELKNIIPLLKKNALRNPVVEKILNQMINVVNALIEKNSERDAEGKITKYFHFDEIRIELARELKKNAQERYEMTQNINKAKLEHQKISEILQKQFGIKNPTKSDIIRYRLYQELEHNGYKELYTNAPIARDMLFSKNIEIEHIVPKARVFDDSFSNKTLTFHRINSNKGEYTAFDYITSLNSQEELNQYLTRVENAYKTKSISLTKYKNLLKKASEIGDGFINRDLRDTQYIAKKAKEILFQVTKNVLSTSGSITDRLREDWGLVDVMKELNMPKYQSLGLTEVEERKEGNKVTVIKNWTKRNDHRHHAMDALTVAFTKPSYIQYLNHLNARKDENNKNYSVILAIEEKETIKVPTNNGKNKRVFIEPIPNFRQVAKKHLEEIFISHKAKNKVVTKNVNKPAGTDKQQITLTPRGQLHKETIYGKYQYYVNKEEKVGVKFDERTITKVSNPLYREALLKRLQANDNDPKKAFTGKNALSKNPIYLDETKTKTLPEKVNLTYLEEDFSIRKDISPDNFKDLKSIEKVIDQGVKRILIKRLQAYGNDPKKAFVDLEKNPIWLNKEKGIAIKRVTISGVNNAQPLHIGKDHLGKTTLNKEGKEIPVDYVSTGNNHHVAIYRDKEGNLQEQIVSFFEAVVRTQQGLPIIDKTYKQEEGWQFLFTMKQNEMFVFPNATTGFNPAEIDLLDPKNKKQISPNLFRVQKIATKDYFFRHHLETNVETDNVLKNTTWKREGLSGLKDIVKVRMNHLGDIVSIGEY

SEQ ID NO: 16782 - protein, 1435 aa, unidentified
  REGION 1..1435: note = Cas Enzyme sequence
MKNILGLDLGTTSIGFAHIVEDENKEKSEIKELGVRIVSLTTDEQSDFEKGKSITTNANRTLKHGARLNLDRYQQRRKFLIDLLQKANLITSSSILAENGKNTTHSTWQLRAKAVTERIEKEEFARVLLAINKKRGYKSSRKAKTEDEGQAIDGMAIAKRLYDENLTPGQLSLQLLQQNKKLLPDFYRSDLQREFDLVWNFQKQFYPDILTDSFYKELQGKGKDATSKAFSKRYHFDTAENKGSKESVRLQAYQWRAEAIFKQLSKEEVAYVLTEINNNLNNASGYLGAISDRSKELYFNRQTIGQYLYAQLQENRHNSLKNKVFYRQDYLDEFERIWETQASFHKELTEELKKQIRDVVIFYQRKLKSQKGLISFCEFESKEIEIEKDGKTITKSIGARVVPKSSPLFQEFKIWQILNNVTCKRKGIRKKKSSAKSTELDLFNEPSQTIFSLDMECKQLLFDELNLKGDLKSDKVLKLLGYSPQEWEINYNQLEGNRTQKALYEAYLKIVEMEAHDVKDILQIKSAKDDWSLDESPLSASEIKEKVKDIFQALGICTKILYFDPLLPVKEFEKQDSYQLWHLLYSYESDDSTSGNETLYRILEKKYAFKREHARILANVALQDDYGSLSTKAIRKIYPYIKENQYSTACEKAGYKHSKLSLTTEELEARELKNIIPLLKKNALRNPVVEKILNQMINVVNALIEKNSERDAEGKITKYFHFDEIRIELARELKKNAQERYEMTQNINKAKLEHQKISEILQKQFGIKNPTKSDIIRYRLYQELEHNGYKELYTNAPIARDMLFSKNIEIEHIVPKARVFDDSFSNKTLTFHRINSNKGEYTAFDYITSLNSQEELNQYLTRVENAYKTKSISPAKYKNLLKKASEIGDDFINRDLRDTQYIAKKAKEILFQVTKNVLSTSGSITDRLREDWGLVDVMKELNMPKYQSLGLTEVEERKDGNKVTVIKNWTKRNDHRHHAMDALTVAFTKPSYIQYLNHLNARKDKNNKNYSVILAIEEKETIKVPTNNGKNKRVFIEPIPNFRQVAKKHLEEIFISHKAKNKVVTKNVNKPAGTDKQQITLTPRGQLHKETVYGKYQYYVNKEEKIGVKFDERTITKISNPLYREALLKRLQANDNDPKKAFTGKNALSKKPIYLDEAKTKTLPEKVNLAYLEEDFSIRKDISPDNFKDLKSIEKVIDQGVKRILIKRLQDYDNDPKKAFVDLEKKPIWLNKEKGIAIKRVTISGVSNAQPLHIGKDHLGKTTLNKEGKEIPVDYVSTGNNHHVAIYRDKEGNLQEQIVSFFDAVVRAQQGLPIVDKTYKQAEGWQFLFTMKQNEMFVFPNEATGFNPAEIDLLDPKNKKLISPNLFRVQTKSVVKYGNSVVRDFKFRHHLETTLQDDKILQGITFQQIKSLEPLRNIVKVRVNHLGDIISVGEY

SEQ ID NO: 16783 - protein, 1393 aa, unidentified
  REGION 1..1393: note = Cas Enzyme sequence
MTNKTWYLGLDIGTASVGWAATDTEYKIIRKNKKRLWGVRLFEEAKTAEERRGYRSSRRRLARRKWRLNLLEELFTQEISKIDSNFFLRLKESQYHYEDKTHQVPYAIFNDKDYTDKDYYKEYPTIYHLRTKLMTEENPDIRKVFLAIHHILKNRGHFLLQGQSFKAGNLNNLIKELLELDILHVGFEVTEKVVDKIADISLEKKTSKDKLNDIKELYPKEKQLLEVFRLIFGGKPSLDKLFAIDEYKELDAAIKSVSFKEKIYEEVRHDYEQVLSNYIELLDLAKLVYDSIILSDIKKEGKTLSESKVDFYNKHRDDLTKLKNLVKNDSKLSEDKKVELYASIFKEDKDKGTNYVNYIRKSEEGKGCNYEDFKKFLVKELAKLEESSVKTEIIKDLELEQFLPLQRTKDNSVVPYQIHKEELVKILENAAKYHNFLDEKDESGYSIREKVIQLLEFRIPYYVGPLNSSKKAKEGGFAWSVRNKGYEDTPVTPWNYSKVIDESASAEKFITNLTNKCTYLKGEDVLPKSSLLYSEFALLNEMNALKYDGNRISLEARNTIIEKLFKQQGKKVTKTSIKNLLKAEGYIDGKGEITGIDITVKNDLKSYRDFKKILGNKFNSEHVENIILWITLYGESRKLIKAKIESVYGDIYSNDEITKMSRLVYKDWGRFSRKLLTELVSKKMYSEETGECLNIIGAMRQNNILFMELLADRFDYSKQIVEFNKELQEDVTEITPEILDDLYVSPAVKRSIWQTVRIVEELKKIIGCAPAKIFVETTRSNQEKKKPTDSRKKQLELAYKAVKKDVKELEKEIGTINFDVLNDRLSSVEPSKLKAKKLYLYYTQLGRCMYSEEPINISELFDNNKYDIDHIYPQSKIKDDSFTNTVLVKRESNAAKTDRYPLGSDIQKPSNRRFWKFLKEKGLISDEKYNRLVRTEEFSDEELSGFIARQLVETSQSVKAVASILGELNPETSICYSKAENVSSFRQNFGKIKDGNSKSNNNEQLVKVREINDFHHAKDAYLNIVVGNVYDTKFTRNVFNFIKDKKDGRKYSLNKVFYENVSDSKTVAWEMDKTIYQVEKVMNNNNILVTRRIAEKKGELYNATRHKAKKVKKAKGVGYVPFKSSDNVLKNILDYGGFNSINIAYFSIVRYLLINKQGEINIIRIVPIPVYIENSLQSKRDLFNYIKKQLDDIENEKVKNIEIMYEKLREKTLLRLNDFKYISGGKSGNRIYCDSALQILLSEETEKYIKTIIKFRNWKNENKNGNLWENVSKEENYKLYSKLLEKLNSGIFFNKKSNKFVELNEETTRNKFKQLKEEDQIKVLIEILNLLTCKKQPGKDLSLIGMTASRDLQNFDLSNLNQFSIIEQSVTGFYEKEITIIGDKGNDMENNNS

SEQ ID NO: 16784 - protein, 1473 aa, unidentified
  REGION 1..1473: note = Cas Enzyme sequence
MKKVLGLDLGTNSIGWALVDVENNKIDGMGSRIIPMTQDVLDIFSGGKPLETQTAARTGYRGIRRIRERHLLRRERLHRVLNVLGFLPGHYVKEIDFEKRYGQFINESEPKLTYNNREFIFTDSFHEMLNDFKQSQPQLFYTKSNGKETKLPYDWTIYYLRKKALSQKIEKEELAWIILNFNQKRGYYQLRGEEEDENPNKLVEFHSLKIIDVVADEKPNNKGELWYSLQLENGWVYRRSSKTPLSDWKDKVRDFIVTTDINDDGSIKTDKDGNEKRSFRAPNENDWTLLKKKTENDLERHIREYKTTHQCNFQGTVGTYIYENLLKNPSQKIRGKLVRTIERKFYKDELIAILKKQIEIQPELFTDDLYTDCVRELYRNNTAQQLVLSKRDFIHLFVEDIIFYQRPLRSQKSTIGNCTLEYRTYTNKDGNQVKEYLKAIPKSHPLYQEFRLWQWLTNLKIYRKDDDKDVTTDFIKNNEDVVNLFEFLMTQKEVGHKDILKHLITPTLKAKYPGAKPAAFNKELDKEIAIYRWNYVFDDSNEKEEDKSKKYPCNTTGYEIRRRLQKVEEVPTDFLSFEKELLLWHIIYSVTDKNEYISALKKFATKHSLNTDSFVANFEKFPPFKSEYGAYSEKAIKKLLPLMRSGKFWNWSSIDGNTQNRIENIITGEYDENIKTRVREKAIQLTTYTDFQGLPLWLASYIIYNRHSEAENSGKWDAVSDLEQYLDDFKQHSLRNPIVEQVITETLRVVRDIWKQYGKGDKNFFSEIHVELGRDMKNTAEDRKKLTTYITNNESTNLRIKALLAELKDNSDGSLPVENVRPYSPIQQDVLRIYEDGVLNSAIELPDDIIKISKMSQPSKSELHRYKLWLEQKYRSPYTGQMIPLGRLFTEDYQIEHIIPKSRYFDDSFNNKVICESAVNQLKDKQLGLEFIKKHPGEKVECGVGKVVEIFTEEAYITFVKDHYSKNKTKRQNLLLEEIPEQMIARQMNDTRYISKFISSLLSNIVRADKDDDGINSKNLIPGNGKITTILKRDWGMDAVWNDLILPRFERMNQITNSSAFTYWNEQHQKFLPIDYSPVDSKRIERKRIDHRHHAMDALVIACMTRDHVNLLNNQSAKSEVSRYDLQNKLRNKSKEIWVDRKTQKKVEKDVFKEFRKPWDSFTVDARNTLESVVVSFKQNLRVINKTTNNYQKWVDKNGVMAKEYVKQEGTNWAIRKPMHKETVSGKVELNHIKVPKGKILTATRKDLNTSFDLKTIDSITDTGIQKILKNYLAYKGNQPELAFSPEGIEEMNKNIKLYNDGKFHQPIQKVRVFELGSKFALGESGNKKDKYVEAAKGTNLYFAIYEKEDGKRTYETIPLNVVIERLKQGPSPVELKGENDFYLTPNDLVYLPTLEEQENIQNINPKGFDKEQKESIYKVVNFSGSRLYCIPHSVASYIANKQEYTQFNKIELTKEKESLIKLKIDRIGNISL

SEQ ID NO: 16785 - protein, 1507 aa, unidentified
  REGION 1..1507: note = Cas Enzyme sequence
MKTILGLDLGPNSIGWAKVEVDDKGNYLRNIKLGSRIIPMDQGILGKFDSGVTESQTAIRTNFRGVRRLRERHLQRRERLHRVLHALNFLPKHYEDAIGWDRNEPAIYGKFINNSEPKLAWERQEDGSMRFLFMESFYEMMADFAKMQPSLVSGEKKIPLDWTIYYLRKKALTQQIKKEELAWILLNFNQKRGYYQLRGEEEEDNPTKRKEYYKLKVIGVEADGAPKAGKIWYNIHLENGWTARCQSKVPLDNWVGNIKEYIVTTEYEADGETPKYDKEGKIKRSFKSPEKGDWQLIKTRTEKFIESSNKTVGTFIYDHLLKEPFDKIRGKYIRTIERKYYKNELYKILCEQAKYHKELDSLDTLNACAKELYKNNQQHQEYLLKKDMKYLLLDDLIFYQRPLKSKKSLIADCPYEVYKYNYKQTGKKEQKKIKCIAKSNPYYQEFRLWQFISNIHLFNVTDGKDVTSEYLKTKEDYVRLFTYLNDRKEIKQETLLKGFLKLKKETIGSEKIYPIRWNYIEDANKSYPCNTTRHELLLAFDRAGIQRELLNVEGREYRLWHLLYSIESKDKTESALRKLKSNKAFSDLNIDDAFVNSFLKIKPFKKEYGAYSEKAIKKLLAVMRRGSLWKEADICEATKQNIAKILQNDIDEKLKKKIEAAVSSFNKLSDFQGLPTWLACYVVYGRHSEAAQIQCWQSPEDLKTYINKFKQHSLRNPIVEQCLLETLRTVYDIWKDAGQIDEIHIELGRNMKSTAEQRARKTNEFLRNENTNLRIKNLLMELKNDDKIENVRPYSPSQQEILRIYEEGALQELSKEDEMYEDISKISKMAQPSPTELSRYKLWLEQKYRSPYTGRVIPLSKLFTTAYQIEHIIPQSRYFDDSFNNKVICESEVNSLKDNMLGYEFIKECGGQKVHCTLLEGNVEIFTEEEYKTFVTKHYVGNPRKKDNLLLEDIPQEFSARQLNDSRYISKMVQTVLSNIVRTKDEQEAISKFVVSCNGMITDRLKKDWGLNDVWNTIVCPRFKRLNEITKTNAFGHWEDKAGKHVFQTIVPLELQRGFSKKRIDHRHHAMDALVIACASRNIVNYLNNESANSPEKREDLRKKLCDEKRKIRKPWKTFTQDTREALSDVVVSFKNYVRVINKATNYYEHYSSSGNKVMISQKGNDMWAIRKPLHKESFFGHVNLRRKATVSLKKALENIPAICDKTLRDYINALVEKHFNTRQLLVHFKSINYRLNRKRVDKVEVWQFSDEKIEMVARRKPLDTSFDAKQISFITDTGIQKILLNYLQSKEGNAEIAFTPEGIEEMNKNISIYNDGKAHQPILNVRVATPKGMKYPVGQTGNKATKFVVAEKGTNLYFAIYENELGERSYDTIPLDIVIKRLKEGQSPVPQINKVGIPLKFYLSPNDLVYVPTKENEDELCRDRIYKFVDSSGTTANFVPHTSANTIYNVDKEYAKKYCNGAVILNEYGLGSPQSKNQKDLDGEMIKEICWKLKVDRLGNIIKVIK

SEQ ID NO: 16786 - protein, 1509 aa, unidentified
  REGION 1..1509: note = Cas Enzyme sequence
MKTILGLDLGTNSVGWAVINSVIKEQAERIWIEMAGSRIIPMDAAVLGDFDKGNSISQTSERTRLRGARRLRERQLLRRERLHKVLNILGFLPNHYLEYIDFEKHPGKFLADAEPKLAWVKDEQGKYTFLFQAAFDEMLADFAIHQPSLVSGDKKIPYDWTIYYLRKKALTEMISKEELAWILLNFNQKRGYYQLRGEEEEDNAGKSVEFYALKVLTVEATDEKKGRDVWYNVHLENGWIYRRSSSVPLDWEGQVKEFIVTTDLNPDGTPKLDKYGEVKRSFRAPKEDDWMLIKKRTEADIANTHKTVGAYIYDTLLQKPQQKIIGKLVKTVERKLYRDELSLILQKQCAFHAELQDRALYARCVEALYPSNEVRRKNIANRDFVYLLMDDILFYQRPLKTKKSLIANCPYEENEYVDRETGEIKKAPLKCIAKSHPLFQEFRLWNFLSNIRIYQKEKEINGTLHLDVDVTAEFLKTEDDYVALFDWLNSRKEIEQKTFLKYPKFGLKKEISNYRWNYVEDKQYPCNETRHAILSSLEKANVCIDFLSNEKEVALWHILYSVSDKQEIEKALRTFAAKNGLDESFVEAFKKFPPFKSEYGAYSAKAIKKMLPLMRCGKYWDVSSIDDTTKERIKKIVTGEYDERISVKVRDKVMNLSDISCFRRLPLWLACYIVYNRHSEDKEAVKWESPADIDAYLASFKQHSLRNPIVEQVITETLRVVRDIWKQVGRIDEIHIELGREMKNPADKRKRMTAQILENENANLRIKALLAEFMNPEYEIENVRPYSPSQQEILRIYEDTVLHAEDQLPEEIDAILKKFNSSKVPTKSEFLRYKLWLEQKYRSPYTGELIPLGKLFTAAYEIEHVIPQSRYFDDSFSNKVICESAVNKLKDNQLGYEFIKNHHGQKVEVGFGKSVEIFSVDSYERFVKEQYAKSAVKMKKLLMDDIPEQFIERQLNDSRYISKVIKGLLSNIVREKNDSGEYEPEAVSKNIVVCTGSVTDRLKRDWGMNDVWNSIVYPRFERLNSLTDTQSFGHWENKSGKKVFQTELPLEYQKGFSKKRIDHRHHAMDAIVIACATRNHVNYLSNESASRNAKISRYDLQRLLCDKNRTDDNGNYKWVIKKPWDTFTQDAREVLSKIVVSLKQNLRIINKTTNVYRHFDATVNRVYQKQKTGDSWAIRKPMHKDTVFGAVNLRKVKVVRLSVALDTPAMIVDKRVKNKVFELLSYKYDKKRIEKYFKENAFLWKELDLAKVAVYYFTEATTEPLVAVRKPLDSTFNEKKIKESVTDTGIQKILLNHLCTKEGKPDLAFSAEGIEEMNRNLLQLNNGKSHQPIYKVRVYEPRGNKFSVGVLGNKGTKWVEAAKGTNLFFAIYITEDGKRTYETIPLNVVIEREKQGLVPVPDRNKKGDKLLFWLSPNDLVYLPTEEEREFGRINEPIDRGRIYKMVSCTGNEGHFIPANVANPIVPVIELGSNNKAQRAWTNEMIKDICIPIKVDRLGHIIEVKYRIDE

SEQ ID NO: 16787 - protein, 1509 aa, unidentified
  REGION 1..1509: note = Cas Enzyme sequence
MKTILGLDLGTNSVGWAVINSVIKEQAERIWIEMAGSRIIPMDAAVLGDFDKGNSISQTSERTRLRGARRLRERQLLRRERLHKVLNILGFLPNHYLEYIDFEKHPGKFLADAEPKLAWVKDEQGKYTFLFQAAFDEMLADFAIHQPSLVSGDKKIPYDWTIYYLRKKALTEMISKEELAWILLNFNQKRGYYQLRGEEEEDNAGKSVEFYALKVLTVEATDEKKGRDVWYNVHLENGWIYRRSSSVPLDWEGQVKEFIVTTDLNPDGTPKLDKYGEVKRSFRAPKEDDWMLIKKRTEADIANTHKTVGAYIYDTLLQKPQQKIIGKLVKTVERKLYRDELSLILQKQCAFHAELQDRALYARCVEALYPSNEVRRKNIANRDFVYLLMDDILFYQRPLKTKKSLIANCPYEENEYVDRETGEIKKAPLKCIAKSHPLFQEFRLWNFLSNIRIYQKEKEINGTLHLDVDVTAEFLKTEDDYVALFDWLNSRKEIEQKTFLKYPKFGLKKEISNYRWNYVEDKQYPCNETRHAILSSLEKANVCIDFLSNEKEVALWHILYSVSDKQEIEKALRTFAAKNGLDESFVEAFKKFPPFKSEYGAYSAKAIKKMLPLMRCGKYWDVSSIDDTTKERIKKIVTGEYDERISVKVRDKVMNLSDISCFRRLPLWLACYIVYNRHSEDKEAVKWESPADIDAYLASFKQHSLRNPIVEQVITETLRVVRDIWKQVGRIDEIHIELGREMKNPADKRKRMTAQILENENANLRIKALLAEFMNPEYEIENVRPYSPSQQEILRIYEDTVLHAEDQLPEEIDAILKKFNSSKVPTKSEFLRYKLWLEQKYRSPYTGELIPLGKLFTAAYEIEHVIPQSRYFDDSFSNKVICESAVNKLKDNQLGYEFIKNHHGQKVEVGFGKSVEIFSVDSYERFVKEQYAKSAVKMKKLLMDDIPEQFIERQLNDSRYISKVIKGLLSNIVREKNDSGEYEPEAVSKNIVVCTGSVTDRLKRDWGMNDVWNSIVYPRFERLNSLTDTQSFGHWENKSGKKVFQTELPLEYQKGFSKKRIDHRHHAMDAIVIACATRNHVNYLSNESASRNAKISRYDLQRLLCDKNRTDDNGNYKWVIKKPWDTFTQDAREVLSKIVVSLKQNLRIINKTTNVYRHFDATVNRVYQKQKTGDSWAIRKPMHKDTVFGAVNLRKVKVVRLSVALDTPAMIVDKRVKNKVFELLSYKYDKKRIEKYFKENAFLWKELDLAKVAVYYFTEATTEPLVAVRKPLDSTFNEKKIKESVTDTGIQKILLNHLCTKEGKPDLAFSAEGIEEMNRNLLQLNNGKSHQPIYKVRVYEPRGNKFSVGVLGNKGTKWVEAAKGTNLFFAIYITEDGKRTYETIPLNVVIEREKQGLVPVPDRNEKGDKLLFWLSPNDLVYLPTEEEREFGRINEPIDRGRIYKMVSCTGNEGHFIPANVANPIVPVIELGSNNKAQRAWTNEMIKDICIPIKVDRLGHIIEVKYRIDE

SEQ ID NO: 16788 - protein, 1509 aa, unidentified
  REGION 1..1509: note = Cas Enzyme sequence
MKTILGLDLGTNSVGWAVINSVIKEQAERIWIEMAGSRIIPMDAAVLGDFDKGNSISQTSERTRLRGARRLRERQLLRRERLHKVLNILGFLPNHYLEYIDFEKHPGKFLADAEPKLAWVKDEQGKYTFLFQAAFDEMLADFAIHQPSLVSGDKKIPYDWTIYYLRKKALTEMISKEELAWILLNFNQKRGYYQLRGEEEEDNAGKSVEFYALKVLTVEATDEKKGRDVWYNVHLENGWIYRRSSSVPLDWEGQVKEFIVTTDLNPDGTPKLDKYGEVKRSFRAPKEDDWMLIKKRTEADIANTHKTVGAYIYDTLLQKPQQKIIGKLVKTVERKLYRDELSLILQKQCAFHAELQDRALYARCVEALYPSNEVRRKNIANRDFVYLLMDDILFYQRPLKTKKSLIANCPYEENEYVDRETGEIKKTPLKCIAKSHPLFQEFRLWNFLSNIRIYQKEKEINGTLHLDVDVTAEFLKTEDDYVALFDWLNSRKEIEQKTFLKYPKFGLKKEISNYRWNYVEDKQYPCNETRHAILSSLEKANVCIDFLSNEKEVALWHILYSVSDKQEIEKALRTFAAKNGLDESFVEAFKKFPPFKSEYGAYSAKAIKKMLPLMRCGKYWDVSSIDDTTKERIKKIVTGEYDERISVKVRDKVMNLSDISCFRRLPLWLACYIVYNRHSEDKEAVKWESPADIDAYLASFKQHSLRNPIVEQVITETLRVVRDIWKQVGRIDEIHIELGREMKNPADKRKRMTAQILENENANLRIKALLAEFMNPEYEIENVRPYSPSQQEILRIYEDTVLHAEDQLPEEIDAILKKFNSSKVPTKSEFLRYKLWLEQKYRSPYTGELIPLGKLFTAAYEIEHIIPQSRYFDDSFSNKVICESAVNKLKDNQLGYEFIKNHHGQKVEVGFGKSVEIFSVDSYERFVKEQYAKSAVKMKKLLMDDIPEQFIERQLNDSRYISKVIKGLLSNIVREKNDSGEYEPEAVSKNIVVCTGSVTDRLKRDWGMNDVWNSIVYPRFERLNSLTDTQSFGHWENKSGKKVFQTELPLEYQKGFSKKRIDHRHHAMDAIVIACATRNHVNYLSNESASRNAKISRYDLQRLLCDKNRTDDNGNYKWVIKKPWDTFTQDAREVLSKIVVSLKQNLRVINKTTNVYRHFDATVNRVYQKQKTGDSWAIRKPMHKDTVFGAVNLRKVKVVRLSVALDTPAMIVDKRVKNKVFELLSYKYDKKRIEKYFKENAFLWKELDLAKVAVYYFTEATTEPLVAVRKPLDSTFNEKKIKESVTDTGIQKILLNHLCTKEGKPDLAFSAEGIEEMNRNLLQLNNGKSHQPIYKVRVYEPRGNKFSVGVLGNKGTKWVEAAKGTNLFFAIYITEDGKRTYETIPLNVVIEREKQGLVPVPDRNEKGDKLLFWLSPNDLVYLPTEEEREFGRINEPIDRGRIYKMVSCTGNEGHFIPATVANPIVPVIELGSNNKAQRAWTNEMIKDICIPIKVDRLGHIIEVKYRIDE

SEQ ID NO: 16789 - protein, 1502 aa, unidentified
  REGION 1..1502: note = Cas Enzyme sequence
DLGTNSIGWAVINSVIKEQAERIWIEMAGSRIIPMDAAVLGDFDKGNSISQTSERTRLRGARRLRERQLLRRERLHKVLNILGFLPNHYLEYIDFEKHPGKFLADAEPKLAWVKDEQGKYTFLFQAAFDEMLADFAIHQPSLVSGDKKIPYDWTIYYLRKKALTEMISKEELAWILLNFNQKRGYYQLRGEEEEDNAGKSVEFYALKVLTVEATDEKKGRDVWYNVHLENGWIYRRSSSVPLDWEGQVKEFIVTTDLNPDGTPKLDKYGEVKRSFRAPKEDDWMLIKKRTEADIANTHKTVGAYIYDTLLQKPQQKIIGKLVKTVERKLYRDELSLILQKQCAFHAELQDRALYARCVEALYPSNEVRRKNIANRDFVYLLMDDILFYQRPLKTKKSLIANCPYEENEYVDRETGEIKKTPLKCIAKSHPLFQEFRLWNFLSNIRIYQKEKEINGTLHLDVDVTAEFLKTEDDYVALFDWLNSRKEIEQKTFLKYPKFGLKKEISNYRWNYVEDKQYPCNETRHAILSSLEKANVCIDFLSNEKEVALWHILYSVSDKQEIEKALRTFAAKNGLDESFVEAFKKFPPFKSEYGAYSAKAIKKMLPLMRCGKYWDVSSIDDTTKERIKKIVTGEYDERISVKVRDKVMNLSDISCFRRLPLWLACYIVYNRHSEDKEAVKWESPADIDAYLASFKQHSLRNPIVEQVITETLRVVRDIWKQVGRIDEIHIELGREMKNPADKRKRMTAQILENENANLRIKALLAEFMNPEYEIENVRPYSPSQQEILRIYEDTVLHAEDQLPEEIDAILKKFNSSKVPTKSEFLRYKLWLEQKYRSPYTGELIPLGKLFTAAYEIEHVIPQSRYFDDSFSNKVICESAVNKLKDNQLGYEFIKNHHGQKVEVGFGKSVEIFSVDSYERFVKEQYAKSAVKMKKLLMDDIPEQFIERQLNDSRYISKVIKGLLSNIVREKNDSGEYEPEAVSKNIVVCTGSVTDRLKRDWGMNDVWNSIVYPRFERLNSLTDTQSFGHWENKSGKKVFQTELPLEYQKGFSKKRIDHRHHAMDAIVIACATRNHVNYLSNESASRNAKISRYDLQRLLCDKNRTDDNGNYKWVIKKPWDTFTQDAREVLSKIVVSLKQNLRIINKTTNVYRHLDATGNRVYEKQKTGDSWAIRKPMHKDTVFGAVNLRKVKVVRLSVALDTPAMIVDKRVKNKVFELLSYKYDKKRIEKYFKENAFLWKELDLAKVAVYYFTEATTEPLVAVRKPLDSTFNEKKIKESVTDTGIQKILLNHLCTKEGKPDLAFSAEGIEEMNRNLLQLNNGKSHQPIYKVRVYEPRGNKFSVGVLGNKGTKWVEAAKGTNLFFAIYITEDGKRTYETIPLNVVIEREKQGLVPVPDRNKKGDKLLFWLSPNDLVYLPTEEEREFGRINEPIDRGRIYKMVSCTGNEGHFIPANVANPIVPVIELGSNNKAQRAWTNEMIKDICIPIKVDRLGHIIEVKYRIDE

SEQ ID NO: 16790 - protein, 1128 aa, unidentified
  REGION 1..1128: note = Cas Enzyme sequence
MATHDLPYFLINDVLFYQRPLKSKKSLIDNCSFEGHEYIDRETNERKFSPIKCIAKSHPLFQEFRLWQFVSNLRIYQKEKEIDGRLMTDVDVTQEFLRDEEDYVALFDWLNGKKEIKQEQFLKYPTFGLKKKANQYRWNYVEDKPYCCNETRSLMLVRLEQAGIPLTFLTREREEALWHILYSVSNKQELKQALASFAGKNGLNKNFVEIFVNTPAFEKSYGSYSAKAIKKLLPLMRMGHYWKEENIDVHTLERINKILSGEYDENIKNRVREKAIHLEDLSSFRGLPLWLASYIVYDRHSEVKEACQWKSPQDIDEYLKAFKQYSLRNPIVEQVVLETLRTVRDIWKQIGTIDEIHVELGREMKNPAEKRKKMAQKMLENENTNLRIKALLVEFMNPELGIENVRPYSPSQQDLLRIYEEGAWNASNADDKMHDEMLSILKKFNESDSKKRPTSSDIKRYRLWLEQKYRSPYTGAVIPLSKLFTPAYQIEHVIPKALYFDDSFSNKVICESEVNKLKDKQLGYEFIKKHHGEKVQLSLGGVVEIFSVDAYEQFIKENYSQNSAKMKKLLMDEIPEQFTERQMNDSRYISKLVVSLLSNIVRNEEEQETQSKNVVVCTGGVTDRLKKDWGVNDVWNKIILPRFERMNQQTGTSDFTSVNSNGHTIPAMPLDLQKGFNKKRIDHRHHAMDAIVIACASRNIVNYLNNQSAGEHGKISRYDLQHLLCTKVQDGNGYQWVINKPWKTFTQDVYETLRNVIVSFKQNLRVINKTSNYYQRKENGRTILSKQDKGDNWAIRKSLHKETVFGEVNLRKTGSTSLKVVLTNPKVVVDKDLKNKLIELIQQGFNEKQIKNYFEEHKDSWQDVNLKKIPVYFFTKDTQEHYFASRKLLDDTFKQDSIKESITDTGIQTILLKHLKEEGNDPKVAFSPEGIERMNKNIVHLNNGHQHQPIYKVRKYEKGDKFAVGARGNKSSKFVEAAKGTNLFFAIYEQEQVEKSNGEIVKKRTFATIPLNVVISRQKQGKSSAPADENGNLPLFVLSPNDLVYVPTREELKNGQLPDNPHPDRIYKMVSSSGNQCFFIQYGVSSMLWDKNEFSALNKMERAITGEMIKEICIPLNINRLGHITYRL

SEQ ID NO: 16791 - protein, 989 aa, unidentified
  REGION 1..989: note = Cas Enzyme sequence
MYLDESFHTPCSSNEQGFIVTPRNKAKDYKHTIYRSMLVDEVHVLFDAQRKLGNTKATETLESEYLEIMTRQRSYDLGPGLQADGTKSPFTMDGYKSNAGKCTFYKNETRAAKGTYTAELSMTLQKINNLKLVDRYGDGRFLTDEEKQKILEYISKHKTMKYKTVKILLDIDPMIRFNLLNYGKKKKTKKESEDKTKDDSTKKKGTKKSKTKAETGEKTDKDSNKEETELERINRIEDTVFVSMEFTLSYTDCLKTRIKTLSETEKRDLFDEVGELLTSYKTDEARIEKLSNLGLTSEEIDHLLDLNPKGYARLSHKAMKEIEPYLVQGLTYDKACTAAGLDFQVTYTGEKMKYLKGPEINNIINNIQSPVVRRSVAQTVRIINAIIRKYGSPQAVNVELSREMSKSFLERKKAETAMELRHKENVKFCEEIKKLGINSPNGEDITRYRLWKDQNGICLYSGEKIPTRAMFTREYEIDHIIPYSISLDDRYQNKVLVKAKENQTKGNRLPYEYFGHDKTRWTAYENRVESLIKSDGKKAHLLKKNYTKEDQREFTERNLNDTRYATTVVYNMILQYLYLEPYNCDGKTKQVYAVNGAVTAYLRKRWGLNKKDRTNDRHHAMDAVVIACCTDEMIAKVTKYMQDRETAYSKNFRIADEETGEILTRSNFTREQYDEAYGVRFPVPWETFREEIDLRIFNDDPFGYLMKDRNLQIKIDYPDWMYGEEESPVAKGKYINYIRPMFVSVACSHKATGRAHEETIRSAKYHDSDSLVISKKALKDLKLDKDNEIKDYYNKECDPLLYEALRNRLLEYNGDGKKAFAEEFHKPKADGSDGPVVKSVKVIEKKTTGVQINHGLAGNGNMVRVDLYQKEGKYYAVPIYISDMVKKEIPRKAATGGKQYKDWRVMNPDDFLFSVYPRDLLHLKKWKPFNDGLSNDIYMYFAGLDPASASFAVTAHDSSISLRGIGIQNLELIEKCQVDMLGEIHVCRQ

SEQ ID NO: 16792 - protein, 1346 aa, unidentified
  REGION 1..1346: note = Cas Enzyme sequence
MKQANKYYLGLDIGTDSVGYATTDEEYGLLKHKGEPMWGVHLFEEASQSQERRGYRTARRRLDRRQQRVKLAQELFAAEIAKVDPYFYRRIGESALWREDAKDAYTLFADADYTDVDYHKEYPTIHHLIFDLMENKKPHDVRLVYLACAWLLAHRGHFFSDVSKDHIEDILSIEASYRHLEELFEGGLPWDCRAEEFGKILKKRLGVNAKYKELCQLLYHTPKAPKDQKAEDETYYSTDGVLKLLCGGKVSPKDLLGKEEYGEIPSFSLDKADEDLAQIVSALGDDGELVVRLKALFDWAVLADILSDAKCISEKKVVIYQQHKADLQLLKRLVRRYLPQKYDEVFRSESVAGYATYSKKGKTEDFCKYLKALFAGITPDEEDKADFADMLAKLENHNFCPMQVTSDNRVIPYQVYFVELKQILENASAYLPFLNEADGDGYITKDKLLSIMEFRVPYYVGPLNRQSNFSWFVRKGEGRILPWTFETLVDLDLSEQAFIDRMTNACTYLPYAKVMPKSALLHEKFQVLNEINTLTVCGKRISVELKQKIYTDLFAKKKKVTLKSIRSYLLREGYYTADELTTLCGADETIKSSLSATLAFRRLLTLGQLTEADAEEIVKRSSYTEDRLRFAKWIDATYPALSEEDRKYLSKLKFKDFARLSKELLCDTYGTEVNSQTGEALSIIERMWTENLNLMEILSDRFTYRAYIEEQNEAYYREHPKSLDERMTEMCLPSAVKRSIIRTMDIVADVVKANGKAPDKIFIEMARGGKPEEKGKRTKSRYEQLKELYAKCDREEVRELSARLDAMGDERDRKLQSEKLFLYYLQLGKSMYSDTPIDIERLSDKSYDVDHIYPQSKVKDDSLLNNKVLVLSSENGAKSDRYPIDASIRQNMQSWWKLLLDHQLITPEKYKRLTRHTPFDEEEEWGFINRQLVETRQSTKAVATLLKEKYPQTEIVYVKAGLVSEFRQEFDMLKSRAVNDLHHAKDAYLNIVVGNVYNMQFTRKWFMANRDEYNLKVSTLFSRRVTVNGNLIWNGEISLGKVKHTVQNKNAIHLTRYAFCRKGGLFDQQPVKADAGLVSLKKHLPTEQYGGYKRTTASFYVIAKYRVGKKAEVMLVPVELLASARFAADQAFARQYIQEAIEKIIGKPVNVVELPMGMRQIKINTVFAFDGMRMCLAGKSNGGKSIIPSLLMPLLLGYSWEKYVKHLERFVEKKKEHPNMVYSQQYDKISAEDNVKLYDILVDKLYRSYAKRPANPIETLQKGRDKFMKADVYEQAKCLMQILMVFGRVSGGCDLQLVGGAGKAAAMSGFSASMSNWKKYYSDVRIIDQSASGLFESRSDNLLDLL

SEQ ID NO: 16793 - protein, 1070 aa, unidentified
  REGION 1..1070: note = Cas Enzyme sequence
MAAIAIDDDGKPTEILSAISLIHDSGVDPDSAKSAATRLATSGIARRTRRLYRRKRKRLAKLDKFIRSQGWPLKEFEEYEDPFYPWRVRAELATTPITDKQELGEKLSIALRHIARHRGWRNPYSKVTALYTVTEPSDALVSIQEQCATELGRPIPPTTTVGQLIASMNLGKTRLRGEDSLLAARPRQSDNANEIHAIAKVQGLSNELVKQIIDHVFAAESPKGSAAERVGKDPLQPTKKRALKASDAFQLYRIAALIGNLRIRGGKKNRRLTAEETRLVFDYLRSLPAKQEPTWQLVAEQLKIDRGNLVGTAIMTDDGERAGAKPPVHETNRLMESTKIKPLATWWKSADADARAAMVKALSNAEVDDFDSQAGTQVQEFFFGISDKDHEELDKLHLPIGRAAYSEDTLVRLTKRMIGEGMDLYEARQAEFKIPNDWAPPAPEIGEQVGNPAVDRVLKATARWLNAAERQWGAPKSVNIEHVRDAFMSESSARELDRDNQQRAKRNAKVVAEMQEKLGIEGRPSRADVWRFQSIQRQNGKCAYCEAQISFKNSEMDHIVPQAGEGSTNTRDNLVAVCHECNSSKSNIAFAVWAENTSRPGVSVQKAVEQTRHWVTDSGLRESEFKKFRKQVCDRLQRKATDEPIDARSLESVAWMANELRSRIAQKFKDGDTKVRVYKGTLTAEARRASGISGKLEFVDGKGKSRLDRRHHAVDAAVVAFTSNYVAETLALRSNMKFDQELRRKAPQWREFTGSDHVHQVEWTKWKYRMQALVELLNNALAQDRIVIMHNLRLRLGNGAAHEDTIGKLTRLKVGDAISTTDIDRASSEALWCALTRDPDFDPKTGLPENPNRTIRIHGTHLTASDEITVFPVAAASVPIRDGFAKLGSNYHHVRLFRVPSGKKYNYFLMRVYTIDLLKFRKEDLFTVELKPQTISVRKCSSKLREALANGTAEYLGWLVNDDELLIRASSASTEKPIAKLQEQYGPTKRWRFAGTDSESRILLRPLQLSAEGLPSDVEKDIREIVEKRGWRISINSLFNGARVTIIRRDALGRPRLYSAAHLPICWEVK

SEQ ID NO: 16794 - protein, 1149 aa, unidentified
  REGION 1..1149: note = Cas Enzyme sequence
MRGKRYRIGIDVGLNSVGLAAVEVSDENSPVRLLNAQSVIHDGGVDPQKNKEAITRKNMSGVARRTRRMRRRKRERLHKLDMLLGKFGYPVIEPESLDKPFEEWHVRAELATRYIEDDELRRESISIALRHMARHRGWRNPYRQVDSLISDNPYSKQYGELKEKAKAYNDDATAAEEESTPAQLVVAMLDAGYAEAPRLRWRTGSKKPDAEGYLPVRLMQEDNANELKQIFRVQRVPADEWKPLFRSVFYAVSPKGSAEQRVGQDPLAPEQARALKASLAFQEYRIANVITNLRIKDASAELRKLTVDEKQSIYDQLVSPSSEDITWSDLCDFLGFKRSQLKGVGSLTEDGEERISSRPPRLTSVQRIYESDNKIRKPLVAWWKSASDNEHEAMIRLLSNTVDIDKVREDVAYASEFIDGLDDDALTKLDSVDLPSGRAAYSVETLQKLTRQMLTTDDDLHEARKTLFNVTDSWRPPADPIGEPLGNPSVDRVLKNVNRYLMNCQQRWGNPVSVNIEHVRSSFSSVAFARKDKREYEKNNEKRSIFRSSLSEQLRADEQMEKVRESDLRRLEAIQRQNGQCLYCGRTITFRTCEMDHIVPRKGVGSTNTRTNFAAVCAECNRMKSNTPFAIWARSEDAQTRGVSLAEAKKRVTMFTFNPKSYAPREVKAFKQAVIARLQQTEDDAAIDNRSIESVAWMADELHRRIDWYFNAKQYVNSASIDDAEAETMKTTVSVFQGRVTASARRAAGIEGKIHFIGQQSKTRLDRRHHAVDASVIAMMNTAAAQTLMERESLRESQRLIGLMPGERSWKEYPYEGTSRYESFHLWLDNMDVLLELLNDALDNDRIAVMQSQRYVLGNSIAHDATIHPLEKVPLGSAMSADLIRRASTPALWCALTRLPDYDEKEGLPEDSHREIRVHDTRYSADDEMGFFASQAAQIAVQEGSADIGSAIHHARVYRCWKTNAKGVRKYFYGMIRVFQTDLLRACHDDLFTVPLPPQSISMRYGEPRVVQALQSGNAQYLGSLVVGDEIEMDFSSLDVDGQIGEYLQFFSQFSGGNLAWKHWVVDGFFNQTQLRIRPRYLAAEGLAKAFSDDVVPDGVQKIVTKQGWLPPVNTASKTAVRIVRRNAFGEPRLSSAHHMPCSWQWRHE

SEQ ID NO: 16795 - protein, 1151 aa, unidentified
  REGION 1..1151: note = Cas Enzyme sequence
MRGKRYRIGIDVGLNSVGLAAVEVSDENSPVRLLNAQSVIHDGGVDPQKNKEAITRKNMSGVARRTRRMRRRKRERLHKLDMLLGKFGYPVIEPESLDKPFEEWHVRAELATRYIEDDELRRESISIALRHMARHRGWRNPYRQVDSLISDNPYSKQYGELKEKAKAYNDDATAAEEESTPAQLVVAMLDAGYAEAPRLRWRTGSKKPDAEGYLPVRLMQEDNANELKQIFRVQRVPADEWKPLFRSVFYAVSPKGSAEQRVGQDPLAPEQARALKASLAFQEYRIANVITNLRIKDASAELRKLTVDEKQSIYDQLVSPSSEDITWSDLCDFLGFKRSQLKGVGSLTEDGEERISSRPPRLTSVQRIYESDNKIRKPLVAWWKSASDNEHEAMIRLLSNTVDIDKVREDVAYASAIEFIDGLDDDALTKLDSVDLPSGRAAYSVETLQKLTRQMLTTDDDLHEARKTLFNVTDSWRPPADPIGEPLGNPSVDRVLKNVNRYLMNCQQRWGNPVSVNIEHVRSSFSSVAFARKDKREYEKNNEKRSIFRSSLSEQLRADEQMEKVRESDLRRLEAIQRQNGQCLYCGRTITFRTCEMDHIVPRKGVGSTNTRTNFAAVCAECNRMKSNTPFAIWARSEDAQTRGVSLAEAKKRVTMFTFNPKSYAPREVKAFKQAVIARLQQTEDDAAIDNRSIESVAWMADELHRRIDWYFNAKQYVNSASIDDAEAETMKTTVSVFQGRVTASARRAAGIEGKIHFIGQQSKTRLDRRHHAVDASVIAMMNTAAAQTLMERESLRESQRLIGLMPGERSWKEYPYEGTSRYESFHLWLDNMDVLLELLNDALDNDRIAVMQSQRYVLGNSIAHDATIHPLEKVPLGSAMSADLIRRASTPALWCALTRLPDYDEKEGLPEDSHREIRVHDTRYSADDEMGFFASQAAQIAVQEGSADIGSAIHHARVYRCWKTNAKGVRKYFYGMIRVFQTDLLRACHDDLFTVPLPPQSISMRYGEPRVVQALQSGNAQYLGSLVVGDEIEMDFSSLDVDGQIGEYLQFFSQFSGGNLAWKHWVVDGFFNQTQLRIRPRYLAAEGLAKAFSDDVVPDGVQKIVTKQGWLPPVNTASKTAVRIVRRNAFGEPRLSSAHHMPCSWQWRHE

SEQ ID NO: 16796 - protein, 1020 aa, unidentified
  REGION 1..1020: note = Cas Enzyme sequence
MARHRGWRNPYRQVDSLISDNPYSKQYGELKEKAKAYNDDATAAEEESTPAQLVVAMLDAGYAEAPRLRWRTGSKKPDAEGYLPVRLMQEDNANELKQIFRVQRVPADEWKPLFRSVFYAVSPKGSAEQRVGQDPLAPEQARALKASLAFQEYRIANVITNLRIKDASAELRKLTVDEKQSIYDQLVSPSSEDITWSDLCDFLGFKRSQLKGVGSLTEDGEERISSRPPRLTSVQRIYESDNKIRKPLVAWWKSASDNEHEAMIRLLSNTVDIDKVREDVAYASAIEFIDGLDDDALTKLDSVDLPSGRAAYSVETLQKLTRQMLTTDDDLHEARKTLFNVTDSWRPPADPIGEPLGNPSVDRVLKNVNRYLMNCQQRWGNPVSVNIEHVRSSFSSVAFARKDKREYEKNNEKRSIFRSSLSEQLRADEQMEKVRESDLRRLEAIQRQNGQCLYCGRTITFRTCEMDHIVPRKGVGSTNTRTNFAAVCAECNRMKSNTPFAIWARSEDAQTRGVSLAEAKKRVTMFTFNPKSYAPREVKAFKQAVIARLQQTEDDAAIDNRSIESVAFMADELHRRIDWYFNAKQYVNSASIDDAEAETMKTTVSVFQGRVTASARRAAGIEGKIHFIGQQSKTRLDRRHHAVDASVIAMMNTAAAQTLMERESLRESQRLIGLMPGERSWKEYPYEGTSRYESFHLWLDNMDVLLELLNDALDNDRIAVMQSQRYVLGNSIAHDATIHPLEKVPLGSAMSADLIRRASTPALWCALTRLPDYDEKEGLPEDSHREIRVHDTRYSADDEMGFFASQAAQIAVQEGSADIGSAIHHARVYRCWKTNAKGVRKYFYGMIRVFQTDLLRACHDDLFTVPLPPQSISMRYGEPRVVQALQSGNAQYLGSLVVGDEIEMDFSSLDVDGQIGEYLQFFSQFSGGNLAWKHWVVDGFFNQTQLRIRPRYLAAEGLAKAFSDDVVPDGVQKIVTKQGWLPPVNTASKTAVRIVRRNAFGEPRLSSAHHMPCSWQWRHE

SEQ ID NO: 16797 - protein, 1187 aa, unidentified
  REGION 1..1187: note = Cas Enzyme sequence
MLSRQLLGGSHLARPVSYSYNVQDNDVHCSYGERCFMRGKRYRIGIDVGLNSVGLAAVEVSDENSPVRLLNAQSVIHDGGVDPQKNKEAITRKNMSGVARRTRRMRRRKRERLHKLDMLLGKFGYPVIEPESLDKPFEEWHVRAELATRYIEDDELRRESISIALRHMARHRGWRNPYRQVDSLISDNPYSKQYGELKEKAKAYNDDATAAEEESTPAQLVVAMLDAGYAEAPRLRWRTGSKKPDAEGYLPVRLMQEDNANELKQIFRVQRVPADEWKPLFRSVFYAVSPKGSAEQRVGQDPLAPEQARALKASLAFQEYRIANVITNLRIKDASAELRKLTVDEKQSIYDQLVSPSSEDITWSDLCDFLGFKRSQLKGVGSLTEDGEERISSRPPRLTSVQRIYESDNKIRKPLVAWWKSASDNEHEAMIRLLSNTVDIDKVREDVAYASAIEFIDGLDDDALTKLDSVDLPSGRAAYSVETLQKLTRQMLTTDDDLHEARKTLFNVTDSWRPPADPIGEPLGNPSVDRVLKNVNRYLMNCQQRWGNPVSVNIEHVRSSFSSVAFARKDKREYEKNNEKRSIFRSSLSEQLRADEQMEKVRESDLRRLEAIQRQNGQCLYCGRTITFRTCEMDHIVPRKGVGSTNTRTNFAAVCAECNRMKSNTPFAIWARSEDAQTRGVSLAEAKKRVTMFTFNPKSYAPREVKAFKQAVIARLQQTEDDAAIDNRSIESVAWMADELHRRIDWYFNAKQYVNSASIDDAEAETMKTTVSVFQGRVTASARRAAGIEGKIHFIGQQSKTRLDRRHHAVDASVIAMMNTAAAQTLMERESLRESQRLIGLMPGERSWKEYPYEGTSRYESFHLWLDNMDVLLELLNDALDNDRIAVMQSQRYVLGNSIAHDATIHPLEKVPLGSAMSADLIRRASTPALWCALTRLPDYDEKEGLPEDSHREIRVHDTRYSADDEMGFFASQAAQIAVQEGSADIGSAIHHARVYRCWKTNAKGVRKYFYGMIRVFQTDLLRACHDDLFTVPLPPQSISMRYGEPRVVQALQSGNAQYLGSLVVGDEIEMDFSSLDVDGQIGEYLQFFSQFSGGNLAWKHWVVDGFFNQTQLRIRPRYLAAEGLAKAFSDDVVPDGVQKIVTKQGWLPPVNTASKTAVRIVRRNAFGEPRLSSAHHMPCSWQWRHE

SEQ ID NO: 16798 - protein, 1187 aa, unidentified
  REGION 1..1187: note = Cas Enzyme sequence
MLSRQLLGASHLARPVSYSYNVQDNDVHCSYGERCFMRGKRYRIGIDVGLNSVGLAAVEVSDENSPVRLLNAQSVIHDGGVDPQKNKEAITRKNMSGVARRTRRMRRRKRERLHKLDMLLGKFGYPVIEPESLDKPFEEWHVRAELATRYIEDDELRRESISIALRHMARHRGWRNPYRQVDSLISDNPYSKQYGELKEKAKAYNDDATAAEEESTPAQLVVAMLDAGYAEAPRLRWRTGSKKPDAEGYLPVRLMQEDNANELKQIFRVQRVPADEWKPLFRSVFYAVSPKGSAEQRVGQDPLAPEQARALKASLAFQEYRIANVITNLRIKDASAELRKLTVDEKQSIYDQLVSPSSEDITWSDLCDFLGFKRSQLKGVGSLTEDGEERISSRPPRLTSVQRIYESDNKIRKPLVAWWKSASDNEHEAMIRLLSNTVDIDKVREDVAYASAIEFIDGLDDDALTKLDSVDLPSGRAAYSVETLQKLTRQMLTTDDDLHEARKTLFNVTDSWRPPADPIGEPLGNPSVDRVLKNVNRYLMNCQQRWGNPVSVNIEHVRSSFSSVAFARKDKREYEKNNEKRSIFRSSLSEQLRADEQMEKVRESDLRRLEAIQRQNGQCLYCGRTITFRTCEMDHIVPRKGVGSTNTRTNFAAVCAECNRMKSNTPFAIWARSEDAQTRGVSLAEAKKRVTMFTFNPKSYAPREVKAFKQAVIARLQQTEDDAAIDNRSIESVAWMADELHRRIDWYFNAKQYVNSASIDDAEAETMKTTVSVFQGRVTASARRAAGIEGKIHFIGQQSKTRLDRRHHAVDASVIAMMNTAAAQTLMERESLRESQRLIGLMPGERSWKEYPYEGTSRYESFHLWLDNMDVLLELLNDALDNDRIAVMQSQRYVLGNSIAHDATIHPLEKVPLGSAMSADLIRRASTPALWCALTRLPDYDEKEGLPEDSHREIRVHDTRYSADDEMGFFASQAAQIAVQEGSADIGSAIHHARVYRCWKTNAKGVRKYFYGMIRVFQTDLLRACHDDLFTVPLPPQSISMRYGEPRVVQALQSGNAQYLGSLVVGDEIEMDFSSLDVDGQIGEYLQFFSQFSGGNLAWKHWVVDGFFNQTQLRIRPRYLAAEGLAKAFSDDVVPDGVQKIVTKQGWLPPVNTASKTAVRIVRRNAFGEPRLSSAHHMPCSWQWRHE

SEQ ID NO: 16799 - protein, 1109 aa, unidentified
  REGION 1..1109: note = Cas Enzyme sequence
  REGION 1088..1091: note = misc_feature - Xaa can be any naturally occurring amino acid
MRGKRYRIGIDVGLNSVGLAAVEVSDENSPVRLLNAQSVIHDGGVDPQKNKEAITRKNMSGVARRTRRMRRRKRERLHKLDMLLGKFGYPVIEPESLDKPFEEWHVRAELATRYIEDDELRRESISIALRHMARHRGWRNPYRQVDSLISDNPYSKQYGELKEKAKAYNDDATAAEEESTPAQLVVAMLDAGYAEAPRLRWRTGSKKPDAEGYLPVRLMQEDNANELKQIFRVQRVPADEWKPLFRSVFYAVSPKGSAEQRVGQDPLAPEQARALKASLAFQEYRIANVITNLRIKDASAELRKLTVDEKQSIYDQLVSPSSEDITWSDLCDFLGFKRSQLKGVGSLTEDGEERISSRPPRLTSVQRIYESDNKIRKPLVAWWKSASDNEHEAMIRLLSNTVDIDKVREDVAYASAIEFIDGLDDDALTKLDSVDLPSGRAAYSVETLQKLTRQMLTTDDDLHEARKTLFNVTDSWRPPADPIGEPLGNPSVDRVLKNVNRYLMNCQQRWGNPVSVNIEHVRSSFSSVAFARKDKREYEKNNEKRSIFRSSLSEQLRADEQMEKVRESDLRRLEAIQRQNGQCLYCGRTITFRTCEMDHIVPRKGVGSTNTRTNFAAVCAECNRMKSNTPFAIWARSEDAQTRGVSLAEAKKRVTMFTFNPKSYAPREVKAFKQAVIARLQQTEDDAAIDNRSIESVAWMADELHRRIDWYFNAKQYVNSASIDDAEAETMKTTVSVFQGRVTASARRAAGIEGKIHFIGQQSKTRLDRRHHAVDASVIAMMNTAAAQTLMERESLRESQRLIGLMPGERSWKEYPYEGTSRYESFHLWLDNMDVLLELLNDALDNDRIAVMQSQRYVLGNSIAHDATIHPLEKVPLGSAMSADLIRRASTPALWCALTRLPDYDEKEGLPEDSHREIRVHDTRYSADDEMGFFASQAAQIAVQEGSADIGSAIHHARVYRCWKTNAKGVRKYFYGMIRVFQTDLLRACHDDLFTVPLPPQSISMRYGEPRVVQALQSGNAQYLGSLVVGDEIEMDFSSLDVDGQIGEYLQFFSQFSGGNLAWKHWVVDGFFNQTQLRIRPRYLAAEXXXXCSRWGPENCDKTRMATSG

SEQ ID NO: 16800 - protein, 1151 aa, unidentified
  REGION 1..1151: note = Cas Enzyme sequence
MRGKRYRIGIDVGLNSVGLAAVEVSDENSPVRLLNAQSVIHDGGVDPQKNKEAITRKNMSGVARRTRRMRRRKRERLHKLDMLLGKFGYPVIEPESLDKPFEEWHVRAELATRYIEDDELRRESISIALRHMARHRGWRNPYRQVDSLISDNPYSKQYGELKEKAKAYNDDATAAEEESTPAQLVVAMLDAGYAEAPRLRWRTGSKKPDAEGYLPVRLMQEDNANELKQIFRVQRVPADEWKPLFRSVFYAVSPKGSAEQRVGQDPLAPEQARALKASLAFQEYRIANVITNLRIKDASAELRKLTVDEKQSIYDQLVSPSSEDITWSDLCDFLGFKRSQLKGVGSLTEDGEERISSRPPRLTSVQRIYESDNKIRKPLVAWWKSASDNEHEAMIRLLSNTVDIDKVREDVAYASAIEFIDGLDDDALTKLDSVDLPSGRAAYSVETLQKLTRQMLTTDDDLHEARKTLFNVTDSWRPPADPIGEPLGNPSVDRVLKNVNRYLMNCQQRWGNPVSVNIEHVRSSFSSVAFARKDKREYEKNNEKRSIFRSSLSEQLRADEQMEKVRESDLRRLEAIQRQNGQCLYCGRTITFRTCEMDHIVPRKGVGSTNTRTNFAAVCAECNRMKSNTPFAIWARSEDAQTRGVSLAEAKKRVTMFTFNPKSYAPREVKAFKQAVIARLQQTEDDAAIDNRSIESVAWMADELHRRIDWYFNAKQYVNSASIDDAEAETMKTTVSVFQGRVTASARRAAGIEGKIHFIGQQSKTRLDRRHHAVDASVIAMMNTAAAQTLMERGSLRESQRLIGLMPGERSWKEYPYEGTSRYESFHLWLDNMDVLLELLNDALDNDRIAVMQSQRYVLGNSIAHDATIHPLEKVPLGSAMSADLIRRASTPALWCALTRLPDYDEKEGLPEDSHREIRVHDTRYSADDEMGFFASQAAQIAVQEGSADIGSAIHHARVYRCWKTNAKGVRKYFYGMIRVFQTDLLRACHDDLFTVPLPPQSISMRYGEPRVVQALQSGNAQYLGSLVVGDEIEMDFSSLDVDGQIGEYLQFFSQFSGGNLAWKHWVVDGFFNQTQLRIRPRYLAAEGLAKAFSDDVVPDGVQKIVTKQGWLPPVNTASKTAVRIVRRNAFGEPRLSSAHHMPCSWQWRHE

SEQ ID NO: 16801 - protein, 1151 aa, unidentified
  REGION 1..1151: note = Cas Enzyme sequence
MRGKRYRIGLDVGLNSVGLAAVEVTDENSPVRLLNAQSVIHDGGVDPQKNKEAITRKNMSGVARRTRRMRRRKRERLHKLDMLLGKFGYPVIEPESLDKPFEEWHVRAELATRYIEDDELRRESISIALRHMARHRGWRNPYRQVDSLISDNPYSKQYGELKEKAKAYNDDATAAEEESTPAQLVVAMLDAGYAEAPRLRWRTGSKKPDAEGYLPVRLMQEDNANELKQIFRVQRVPADEWKPLFRSVFYAVSPKGSAEQRVGQDPLAPEQARALKASLAFQEYRIANVITNLRIKDASAELRKLTVDEKQSIYDQLVSPSSEDITWSDLCDFLGFKRSQLKGVGSLTEDGEERISSRPPRLTSVQRIYESDNKIRKPLVAWWKSASDNEHEAMIRLLSNTVDIDKVREDVAYASAIEFIDGLDDDALTKLDSVDLPSGRAAYSVETLQKLTRQMLTTDDDLHEARKTLFNVTDSWRPPADPIGEPLGNPSVDRVLKNVNRYLMNCQQRWGNPVSVNIEHVRSSFSSVAFARKDKREYEKNNEKRSIFRSSLSEQLRADEQMEKVRESDLRRLEAIQRQNGQCLYCGRTITFRTCEMDHIVPRKGVGSTNTRTNFAAVCAECNRMKSNTPFAIWARSEDAQTRGVSLAEAKKRVTMFTFNPKSYAPREVKAFKQAVIARLQQTEDDAAIDNRSIESVAWMADELHRRIDWYFNAKQYVNSASIDDAEAETMKTTVSVFQGRVTASARRAAGIEGKIHFIGQQSKTRLDRRHHAVDASVIAMMNTAAAQTLMERESLRESQRLIGLMPGERSWKEYPYEGTSRYESFHLWLDNMDVLLELLNDALDNDRIAVMQSQRYVLGNSIAHDATIHPLEKVPLGSAMSADLIRRASTPALWCALTRLPDYDEKEGLPEDSHREIRVHDTRYSADDEMGFFASQAAQIAVQEGSADIGSAIHHARVYRCWKTNAKGVRKYFYGMIRVFQTDLLRACHDDLFTVPLPPQSISMRYGEPRVVQALQSGNAQYLGSLVVGDEIEMDFSSLDVDGQIGEYLQFFSQFSGGNLAWKHWVVDGFFNQTQLRIRPRYLAAEGLAKAFSDDVVPDGVQKIVTKQGWLPPVNTASKTAVRIVRRNAFGEPRLSSAHHMPCSWQWRHE

SEQ ID NO: 16802 - protein, 1084 aa, unidentified
  REGION 1..1084: note = Cas Enzyme sequence
RMRRRKRERLHKLDMLLGKFGYPVIEPESLDKPFEEWHVRAELATRYIEDDELRRESISIALRHMARHRGWRNPYRQVDSLISDNPYSKQYGELKEKAKAYNDDATAAEEESTPAQLVVAMLDAGYAEAPRLRWRTGSKKPDAEGYLPVRLMQEDNANELKQIFRVQRVPADEWKPLFRSVFYAVSPKGSAEQRVGQDPLAPEQARALKASLAFQEYRIANVITNLRIKDASAELRKLTVDEKQSIYDQLVSPSSEDITWSDLCDFLGFKRSQLKGVGSLTEDGEERISSRPPRLTSVQRIYESDNKIRKPLVAWWKSASDNEHEAMIRLLSNTVDIDKVREDVAYASAIEFIDGLDDDALTKLDSVDLPSGRAAYSVETLQKLTRQMLTTDDDLHEARKTLFNVTDSWRPPADPIGEPLGNPSVDRVLKNVNRYLMNCQQRWGNPVSVNIEHVRSSFSSVAFARKDKREYEKNNEKRSIFRSSLSEQLRADEQMEKVRESDLRRLEAIQRQNGQCLYCGRTITFRTCEMDHIVPRKGVGSTNTRTNFAAVCAECNRMKSNTPFAIWARSEDAQTRGVSLAEAKKRVTMFTFNPKSYAPREVKAFKQAVIARLQQTEDDAAIDNRSIESVAWMADELHRRIDWYFNAKQYVNSASIDDAEAETMKTTVSVFQGRVTASARRAAGIEGKIHFIGQQSKTRLDRRHHAVDASVIAMMNTAAAQTLMERESLRESQRLIGLMPGERSWKEYPYEGTSRYESFHLWLDNMDVLLELLNDALDNDRIAVMQSQRYVLGNSIAHDATIHPLEKVPLGSAMSADLIRRASTPALWCALTRLPDYDEKEGLPEDSHREIRVHDTRYSADDEMGFFASQAAQIAVQEGSADIGSAIHHARVYRCWKTNAKGVRKYFYGMIRVFQTDLLRACHDDLFTVPLPPQSISMRYGEPRVVQALQSGNAQYLGSLVVGDEIEMDFSSLDVDGQIGEYLQFFSQFSGGNLAWKHWVVDGFFNQTQLRIRPRYLAAEGLAKAFSDDVVPDGVQKIVTKQGWLPPVNTASKTAVRIVRRNAFGEPRLSSAHHMPCSWQWRHE

SEQ ID NO: 16803 - protein, 1145 aa, unidentified
  REGION 1..1145: note = Cas Enzyme sequence
MSTYSANVQYRRYRIGIDVGLKSIGFCAIEVDERGTPIKLLNSTVHLHDGGAEPGDRKEASRKKTAGLARRARRRGRSNKRRLKELDSYLSEQLGWPLPDLEEFTDQHEPWHVRAELLDSYVSDPAERAEMLAIAVRHIARHRGWRNSYTSVASLARATYPSKALIKVNERVCEALGTTIGADATQGQLASAYVTDERYTLQALRGTQGLFQGRQYQSDTYHELTRILELQQIDHAQINELTDIVFRVTHPRNGARRNMRVGHDQLPGQESKWRAEIAHPAFQKFRIVAALANLRVRSGRQERKLSADELQRVTHYVLDSALKVEDVEWFDIAEQLGIERDCLTGTAKAVFEGEPALRRPPTDSVSVIIMSSKLTKLKRWWKSANEEDRADLVKFMANSTLAEGEEFENDEVDGFLASLTDDDLVKLEELALPSGRAAYSLDSLQRLTDRMLADGCDLHEARKREFGVGDSWAPTPDPIGDPVGNPAVDRVMKEVNRWLKMVVDRWGVPEAVNIEHTRSGMMSAEKARELDNANTNRQRRIEELAQELGAQACAGGKLNQVTKIRLLAIQRQGCKCLYCGDAISFETAEMDHIIPRSGLGSTNDRNNLVAVCRECNESKGKKLFSEWAKSGGRKDKVLIDDVIERVWSWERDPGVSPKQQKKFQAAVVARLKSKAPDQEFDARSMESVAWMAVELGKRIRGYFASAYSEDEEAVVPSVGLYRGRITAAARIVSGFEGCVRLTGGNGKTRLDRRHHAMDALVIALLDDRIAQLLALRENLRFTQLLTSGVDEWRLYLQSHPSENTLMHSWSQRMRVAAGKFNEALATGKVRFTTNLRLSLGSSRAHMDSVTSFEHAYLDRDSDRKPKVDKNGVRKVKEHGEFRLLSDPLPVDLIDRAETPALWAALVKDEQFDPQNGLPADPKRTIMIHGRRIGPMERIRFFGATPAGKWSAAIAVRGGYVSISNTIHHVRIFKLAEKPAKYGMLRVFQVDLRHARGADLFSFSIPASSISMRTADKAIREALRDGSKEPLAWLVAGDELRVNPKFYDTDKIGEFFKKYREAVEWRVVGFEGPTKLNLRPIRISEEGFDEETPKEIRDIAGSSGSWRVAISALLEPGGVAVIRRNVLGEERWKSKDDRLPCSKVFE

SEQ ID NO: 16804 - protein, 1107 aa, unidentified
  REGION 1..1107: note = Cas Enzyme sequence
LTSANVNYRVGIDVGSYSIGMAAIAIDDDGKPTEILSAISLIHDSGVDPDSAKSAATRLATSGIARRTRRLYRRKRKRLAKLDKFISSQGWPLKEFEEYEDPFYPWRVRAELATTPITDQQELGEKLSIALRHIARHRGWRNPYSKITALYTVAEPSDAFLAIQGECAKKLGRSIPQTTTVGQLVASMNLGKTRLRGKANPHGKEAGLFTANKLQQSDYANEIHTIAKVQGFSNELVKQIIDHVFAAESPKGSAAERVGKDPLQPTKKRALKASDAFQRYRIAALIGNLRIRNSKGNRRLTAEDTRLVFDYLRSLPPKQEPTWQLVAEQLKIDRGNLVGTAIMTDDGERAGAKPPVHETNRLMESTKIKPLAVWWKSADADARAAMVKALSNAEVDDFDSQAGAQVQEFFFGISDKDHEELDKLHLPIGRAAYSEGTLVRLTKRMIDEGMDLYEARQAEFKIPNDWAPPAPEIGEQVGNPAVDRVLKATARWLNAAERQWGTPKSVNIEHVRDAFMSESSARKLDQDNQRRAKRNEEIVAKMQEILGIEGRPSRADVWRFQSVERQNCQCAYCGTQISYKNSEMDHIVPRAGEGSTNTRDNLVAVCRECNSSKSNIAFAVWAENTSRPGVSVQKAVERTRHWVTDAGLRESEFKKFRKQVCDRLRRKATDEPIDARSLESVAWMANELRSRITQKFKDGDTKVRVYNGTLTAKARRASGISGKLEFVDGKGKSRLDRRHHVVDAAVVAFMSNYVAETLALRSNMKFDYELRSGKKSKQKLEHKKPKYKTFTGPTPAHQTEWVKWNIRMQALAELLNNALAQDRIVVMHNLRLRLGNGAAHEDTIGKLTRIKVGDAISTTDIDRASSEALWCALTRDPDFDPKTGLPENPNRTIRIHGTHLTASDEITVFPVTAASIPIRDGFAKLGSNYHHVRLFRVPNGKKYKYCLMQVYTVDLLKFRKEDLFTVELKPQTISVRTCEAPLRKALANGTAEYLGWLVSDDELFVNISSFDTPGIVKLREEYGPVNRWRLAGFNSNTQMVLRPLYLSKEGLKPDVDPEIKKIIDNRGWFITVNKLFSTGHVTVVRRDALGRPRLHSAAHLPICWEVK

SEQ ID NO: 16805 - protein, 1093 aa, unidentified
  REGION 1..1093: note = Cas Enzyme sequence
MAAIAIDDDGKPTEILSAISLIHDSGVDPDSAKSAATRLATSGIARRTRRLYRRKRKRLAKLDKFISSQGWPLKEFEEYEDPFYPWRVRAELATTPITDQQELGEKLSIALRHIARHRGWRNPYSKITALYTVAEPSDAFLAIQGECAKKLGRSIPQTTTVGQLVASMNLGKTRLRGKAKLANKANPHGKEAGLFTANKLQQSDYANEIHTIAKVQGFSNELVKQIIDHVFAAESPKGSAAERVGKDPLQPTKKRALKASDAFQRYRIAALIGNLRIRNSKGNRRLTAEDTRLVFDYLRSLPPKQEPTWQLVAEQLKIDRGNLVGTAIMTDDGERAGAKPPVHETNRLMESTKIKPLAVWWKSADADARAAMVKALSNAEVDDFDSQAGAQVQEFFFGISDKDHEELDKLHLPIGRAAYSEDTLVRLTKRMIDEGMDLYEARQAEFKIPNDWAPPAPEIGEQVGNPAVDRVLKATARWLNAAERQWGTPKSVNIEHVRDAFMSESSARKLDQDNQRRAKRNEEIVAKMQEILGIEGRPSRADVWRFQSVERQNCQCAYCGTQISYKNSEMDHIVPRAGEGSTNTRDNLVAVCRECNSSKSNIAFAVWAENTSRPGVSVQKAVERTRHWVTDAGLRESEFKKFRKQVCDRLRRKATDEPIDARSLESVAWMANELRSRITQKFKDGDTKVRVYNGTLTAKARRASGISGKLEFVDGKGKSRLDRRHHVVDAAVVAFMSNYVAETLALRSNMKFDYELRSGKKSKQKLEHKKPKYKTFTGPTPAHQTEWVKWNIRMQALAELLNNALAQDRIVVMHNLRLRLGNGAAHEDTIGKLTRIKVGDAISTTDIDRASSEALWCALTRDPDFDPKTGLPENPNRTIRIHGTHLTASDEITVFPVTAASIPIRDGFAKLGSNYHHVRLFRVPNGKKYKYCLMQVYTVDLLKFRKEDLFTVELKPQTISVRTCEAPLRKALANGTAEYLGWLVSDDELFVNISSFDTPGIVKLREEYGPVNRWRLAGFNSNTQMVLRPLYLSKEGLKPDVDPEIKKIIDNRGWFITVNKLFSTGHVTVVRRDALGRPRLHSAAHLPICWEVK

SEQ ID NO: 16806 - protein, 1070 aa, unidentified
  REGION 1..1070: note = Cas Enzyme sequence
MAAIAIDDDGKPTEILSAISLIHDSGVDPDSAKSAATRLATSGVARRTRRLYRRKRKRLAKLDKFISSQGWPLKEFEEYEDPFYPWRVRAELATTPITDKQELGEKLSIALRHIARHRGWRNPYSKVTALYTVTEPSDALMSIQEQCATELGRPIPPTTTAGQLIASMNLGKTRLRGEDSLLAARPRQSDNANEIHAIAKVQGLSNELVKQIIDHVFAAESPKGSAAERVGKDPLQPTKKRALKASDAFQQYRIAALIGNLRIRGGKENRRLTAEETRLIFDYLRSLPAKQEPTWQLVAEQLKIDRGNLVGTAIMTDDGERAGAKPPVHETNRLMESTKIKPLAAWWKSADTDARAAMVKALSNAEVDDFDSQAGAQVQEFFFGISDEDQEKLDGLHLPIGRAAYSEDTLDRLTKRMIGEGMDLYEARQAEFKIPNDWAPPAPEIGERVGNPAVDRVLKATARWLNAAERQWGAPKSVNIEHVRDAFMSESSARELDRDNQQRAKRNVKVVAEMQEKLGIEGRPSRADVWRFQSIQRQNGKCAYCEAQISFKNSEMDHIVPQAGEGSTNTRDNLVAICHECNSSKSNIAFAVWAENTSRPGVSVQNAVEQTRHWVTDSGLRESEFKKFRKQVCDRLQRKATDEPIDARSLESVAWMANELRSRIAQKFKDGDTKVRVYKGTLTAEARRASGISGKLEFVDGKGKSRLDRRHHAVDAAVVAFTSNYVAETLALRSNMKFDQELRRKAPQWREFTGSDHVHQVEWTKWKYRMQALAELLNNALVQDRIVVMHNLRLRLGNGAAHEDTIGKLTRIKVGDAISTTDIDRASSEALWCALTRDPDFDPKTGLPENPNRTIRIHGTHLTASDEITVFPVAAASVPIRDGFAKLGGNYHHVRLFRVPSGKKYNYFLMRVYTIDLLKFRKEDLFTVELKPQTISVRKCLPKLREALANGTAEYLGWLVNDDELLIRASSASTEKPIAKLQEHYGATKRWRFAGTDSESKILLRPLQLSAEGLPSDVEKDIREIVEKRGWRISINSLFNGARVTIIRRDALGRPRLYSAAHLPICWEVK

SEQ ID NO: 16807 - protein, 1070 aa, unidentified
  REGION 1..1070: note = Cas Enzyme sequence
MAAIAIDDDGKPTEILSAISLIHDSGVDPDSAKSAATRLATSGIARRTRRLYRRKRKRLAKLDKFISSQGWPLKEFEKYEDPFYPWRVRAELATTAITDQQELGEKLSIALRHIARHRGWRNPYSKVTALYTVTEPSDAFLAMQEECAKQLGRTIPETITVGQLVTGMNLGKTRLRGENSLLAARPRQSDNANEIHAIAKVQGLSNELVKQIIDHVFAAESPKGSAAEQVGKDPLQPTKKRALKASDAFQQYRIAALIGNLRIRGGKGNRRLTTEETRLVFDYLRSLPAKQEPTWQLVAEQLKIDRGNLVGTAIMTDDGERAGAKPPVHDTNRIMENTKIKPLATWWKSADADARAAMVKALSNAEVDDFDSQAGAQVQEFFFGISDEDQEKLDGLHLPIGRAAYSEDTLDRLTKRMIGEGMDLYEARQAEFKISNDWAPPAPEIGERVGNPAVDRVLKATARWLNAAERQWGAPKSVNIEHVRDAFMSESSARELDRDNQQRAKRNVKVVAEMQEKLGIEGRPSRADVWRFQSIQRQNGKCAYCEAQISFKNSEMDHIVPQAGEGSTNTRDNLVAVCHECNSSKSNIAFAVWAENTSRPGVSVQNAVEQTRHWVTDSGLRESEFKKFRKQVCDRLQRKATDEPIDARSLESVAWMANELRSRIAQKFKDGDTKVRVYKGTLTAEARRASGISGKLEFVDGKGKSRLDRRHHAVDAAVVAFTSNYVAETLALRSNMKFDQELRRKAPQWREFTGSDHVHQVEWTKWKYRMQALAELLNNALVQDRIVVMHNLRLRLGNGAAHEDTIGKLTRIKVGDAISTTDIDRASSEALWCALTRDPDFDPKTGLPENPNRTIRIHGTHLTASDEITVFPVAAASVPIRDGFAKLGGNYHHVRLFRVPSGKKYNYFLMRVYTIDLLKFRKEDLFTVELKPQTISVRKCLPKLREALANGTAEYLGWLVNDDELLIRASSASTEKPIAKLQEHYGATKRWRFAGTDSESKILLRPLQLSAEGLPSDVEKDIREIVEKRGWRISINSLFNGARVTIIRRDALGRPRLYSAAHLPICWEVK

SEQ ID NO: 16808 - protein, 1070 aa, unidentified
  REGION 1..1070: note = Cas Enzyme sequence
MAAIAIDDDGKPTEILSAISLIHDSGVDPDSAKSAATRLATSGIARRTRRLYRRKRKRLAKLDKFIRSQGWPLKEFEEYEDPFYPWRVRAELATTPITDKQELGEKLSIALRHIARHRGWRNPYSKVTALYTVTEPSDALMSIQEQCATELGRPIPPTTTAGQLIASMNLGKTRLRGEDSLLAARPRQSDNANEIHAIAKVQGLSNELVKQIIDHVFAAESPKGSAAERVGKDPLQPTKKRALKASDAFQQYRIAALIGNLRIRGGKENRRLTAEETRLIFDYLRSLPAKQEPTWQLVAEQLKIDRGNLVGTAIMTDDGERAGAKPPVHETNRLMESTKIKPLAAWWKSADTDARAAMVKALSNAEVDDFDSQAGAQVQEFFFGISDEDQEKLDGLHLPIGRAAYSEDTLDRLTKRMIGEGMDLYEARQAEFKIPNDWAPPAPEIGERVGNPAVDRVLKATARWLNAAERQWGAPKSVNIEHVRDAFMSESSARELDRDNQQRAKRNVKVVAEMQEKLGIEGRPSRADVWRFQSIQRQNGKCAYCEAQISFKNSEMDHIVPQAGEGSTNTRDNLVAVCHECNSSKSNIAFAVWAENTSRPGVSVQNAVEQTRHWVTDSGLRESEFKKFRKQVCDRLQRKATDEPIDARSLESVAWMANELRSRIAQKFKDGDTKVRVYKGTLTAEARRASGISGKLEFVDGKGKSRLDRRHHAVDAAVVAFTSNYVAETLALRSNMKFDQELRRKAPQWREFTGSDHVHQVEWTKWKYRMQALAELLNNALVQDRIVVMHNLRLRLGNGAAHEDTIGKLTRIKVGDAISTTDIDRASSEALWCALTRDPDFDPKTGLPENPNRTIRIHGTHLTASDEITVFPVAAASVPIRDGFAKLGGNYHHVRLFRVPSGKKYNYFLMRVYTIDLLKFRKEDLFTVELKPQTISVRKCLPKLREALANGTAEYLGWLVNDDELLIRASSASTEKPIAKLQEHYGATKRWRFAGTDSESKILLRPLQLSAEGLPSDVEKDIREIVEKRGWRISINSLFNGARVTIIRRDALGRPRLYSAAHLPICWEVK

SEQ ID NO: 16809 - protein, 1069 aa, unidentified
  REGION 1..1069: note = Cas Enzyme sequence
MAAIAIDDDGKPTEILSAISLIHDSGVDPDSAKSAATRLATSGIARRTRRLYRRKRKRLAKLDKFISSQGWPLKEFEKYEDPFYPWRVRAELATTAITDQQELGEKLSIALRHIARHRGWRNPYSKVTALYTVTEPSDAFLAMQEECAKQLGRTIPETITVGQLVTGMNLGKTRLRGENSLLAARPRQSDNANEIHTIAKVQGLSNKLVRQIIDHVFAAESPKGSAAEQVGKDPLQPTKKRALKASDAFQQYRIAALIGNLRIRGGKGNRRLTTEETRLVFDYLRSLPAKQEPTWQLVAEQLKIDRGNLVGTAIMTDDGERAGAKPPVHDTNRIMENTKIKPLATWWKSADTDARAAMVKALSNAEVDDFDSQAGAQVQEFFFGISDEDQEKLDGLHLPIGRAAYSEDTLDRLTKRMIGEGMDLYEARQAEFKISNDWAPPAPEIGERVGNPAVDRVLKATARWLNAAERQWGAPKSVNIEHVRAAFMSESSARELDRDNQQRAKRNVKVVAEMQEKLGIEGRPSRADVWRFQSIQRQNGKCAYCGAEISFKNSEMDHIIPQAGEGSTNTRDNLVAVCRECNSSKSNIAFAVWAENTSRPGVSVQKAIERTHHWVTDSGLRKPEFDKFRKQVCDRLRRKATDEPIDARSLESVAWMANELRSRIAQKFKDRDTKVRVYKGALTAEARRASGISGKLEFVDGKGKSRLDRRHHAVDAAVVAFMSHYVAETLALRSNMKFDQELRRKAPQWREFTGSDHVHQVEWTKWKYRMQALVELLNNALAQDRIVVMHNLRLRLGNGAAHEDTIGKLTRIKVGDAISTTDIDRASSEALWCALTRDPDFDPKTGLPENPNRTIRIHGTHLTASDEITVFPVTAASIPIRDGFAKLGSNYHHVRLFRVPNGKKYKYCLMQVYTVDLLKFRKEDLFTVELKPQTISVRTCEAPLRKALANGTAEYLGWLVSDDELFVNISSFDTPGIVKLREEYGPVNRWRLAGFNSNTQMVLRPLYLSKEGLKPDVDPEIKKIIDNRGWFVTVNKLFSTGHVTVVRRDTLGRPRLYSAAHLPICWEVK

SEQ ID NO: 16810 - protein, 1050 aa, unidentified
  REGION 1..1050: note = Cas Enzyme sequence
YARRTRRLYRRKRKRLAKLDKFISSQGWPLKEFEEYEDPFYPWRVRAELATTPITDKQELGEKLSIALRHIARHRGWRNPYSKVTALYTVAEPSDAFLAIQGECAKKLGRSIPQTTTVGQLVASMNLGKTRLRGKAKLANKANPHGKEAGLFTANKLQQSDYANEIHTIAKVQGFSNELVKQIIDHVFAAESPKGSAAERVGKDPLQPTKKRALKASDAFQRYRIAALIGNLRIRNSKGNRRLTAEDTRLVFDYLRSLPPKQEPTWQLVAEQLKIDRGNLVGTAIMTDDGERAGAKPPVHETNRLMESTKIKLLATWWKSADADARAAMVKALSNAEVDDFDSQAGAQVQEFFFGISDKDHEELDKLHLPIGRAAYSEDTLVRLTKRMIDEGMDLYEARQAEFKIPNDWAPPAPEIGEQVGNPAVDRVLKATARWLNAAERQWGTPKSVNIEHVRDAFMSESSARKLDQDNQRRAKRNEEIVAKMQEILGIEGRPSRADVWRFQSVERQNCQCAYCGTQISYKNSEMDHIVPRAGEGSTNTRDNLVAVCRECNSSKSNIAFAVWAENTSRPGVSVQKAVERTRHWVTDSGLRESEFKKFRKQVCDRLRRKATDEPIDARSLESVAWMANELRSRITQKFKDGDTKVRVYNGTLTAKARRASGISGKLEFVDGKGKSRLDRRHHVVDAAVVAFMSNYVAETLALRSNMKFDYELRSGKKSKQKLEHKKPKYKTFTGPTPAHQTEWVKWNIRMQALAELLNNALAQDRIVVMHNLRLRLGNGAAHEDTIGKLTRIKVGDAISTTDIDRASSEALWCALTRDPDFDPKTGLPENPNRTIRIHGTHLTASDEITVFPVTAASIPIRDGFAKLGSNYHHVRLFRVPNGKKYKYCLMQVYTVDLLKFRKEDLFTVELKPQTISVRTCEAPLRKALANGTAEYLGWLVSDDELFVNISSFDTPGIVKLREEYGPVNRWRLAGFNSNTQMVLRPLYLSKEGLKPDVDPEIKKIIDNRGWFITVNKLFSTGHVTVVRRDALGRPRLHSAAHLPICWEVK

SEQ ID NO: 16811 - protein, 1087 aa, unidentified
  REGION 1..1087: note = Cas Enzyme sequence
MAASSTRYVVGIDVGNFSVGMAAIKVDDDGMPQEILSAVSHIHDSGLDPDNIKSAITRLAVSGVARRTRRLFRRRRRRLIQLDAFIQSKGWGLPQNDESDDPYLPWRVRAELASRPIPTEEELGAKLSIAIRHIARHRGWRNPYSRVSSLMADVPPSDAFKAIQEEFSKILGRSLADDTTLGQMVAACNLTNTKLRGEGGAISARLQQSDLAREIRKICSMQEIDENTVREIIEYVFVAESPKGANAARAGKDPLQPGEPRALKATDAFQQYRIAALIGNLRIREGRERRELSLDERRLVFDYLVHLKPKVEPDWSAVADTLKIDRGDLLGTATTTDDGERAGARPPVHETNRRILTCSVKPLVKWWQEAGDAERRAMLMALGNGSVEDYDSAEGAKVQAFFTDLSDEDMEKLDKLQLPVGRAAYSEDTLTKLTKAMLSSGVDLYTARRQVFGISEDWAPPAPEIGEPVGNPAVDRVLKVVARWLRAAENVWGAPESINIEHVRAGFMSESKSRELDRDNERRAKRNLELFTQMQQKFGQDIKPSGADLWRYQSVQRQNGQCCYCGTTITYQNCEMDHIVPRAGRGSTNTRDNLVAVCHDCNLSKGNIPFAVWAEKSTKPGVSVAAAQERLRHWVCDPGLKTPQFKRFVKSVNDRLSRKTIDEELDARSIESVAWMANELRGRIAHKYQDIKVRVFRGQLTAEARNASGISKKIAFIDGPGKSRLDRRHHAVDAAVIALMSAKVAETLAIRSNLKFDQELRKDAPQWKEFTGSTDAHKIIWSKWRSRMTALAGLLQTALDEDRIVVMSNLRLRLGNGTAHEATIGKLKKLKVGDPISAVDVDRASTEALWCALTRHPDFDSKEGLPADPDRTIRVQGRHLSADDAIEVFPIGAGSIAVRGGYAELGSSFHHARIYKIVGGKKPVFSMMRVYTVDLLKYENEDLFAVELKPQTMTIRQCEPKLRKALAAGQAEYLGWLVVDDELLLDTSKFNTGQIANVQAELGKISRWRVDGFNHFAKLRLRPLQMSAEGINEEMSVDVKKILDTTGWRPSVNKLFNLGKVTVIRRDALGRVRLSSNAHLPITWAVG

SEQ ID NO: 16812 - protein, 1069 aa, unidentified
  REGION 1..1069: note = Cas Enzyme sequence
MAAIAIDDDGKPTEILSAISLIHDSGVDPDSAKSAATRLATSGVARRTRRLYRRKRKRLAKLDKFISSQGWPLKEFEEYEDPFYPWRVRAELATTAITNQQELGEKLSIALRHIARHRGWRNPYSKVTALYTVAEPSDALVSIQEQCATELGRPIPPTTTVGQLIASMNLGKTRLRGEDSLLAARPRQSDNANEIHAIAKVQGLSNELVKQIIDHVFAAESPKGSAAERVGKDPLQPTKKRALKASDAFQQYRIAALIGNLRIRSGKENRRLTTEETKLVFDYLRSLPAKQEPTWQLVAEQLKIDRGNLVGTAIMTDDGERAGAKPPVHETNRLMESTKIKPLATWWKSADADARAAMVKALSNAEVDDFDSQAGAQVQEFFFGISDEDQEKLDGLHLPIGRAAYSEDTLVRLTKRMIGEGMDLYEARQAEFKIPNDWAPPAPEIGEQVGNPAVDRVLKATARWLNAAERQWGAPKSINIEHVRAAFMSESSARELDRDNQQRAKRNVKVVAEMQEKLGIEGRPSRADVWRFQSVERQNCQCAYCGTQISYMNSEMDHIVPQAGEGSTNTRDNLVAVCRECNSSKSNIAFAVWAENTSRPGVSVQKAVERTRHWVTDSGLRKPEFDKFRKQVCDRLRRKATDEPIDARSLESVAWMANELRSRIAQKFKDGDTKVRVYKGALTAEARRASGISGKLEFVDGKGKSRLDRRHHAVDAAVVAFMSHYVAETLALRSNMKFDQELRRKAPQWREFTGSDHVHQVEWTKWKYRMQALAELLNNALAQDRIVVMHNLRLRLGNGAAHEDTIGKLTRIKVGDAISTTDIDRASSEALWCALTCDPDFDPKTGLPENPNRTIRIHGTHLTASDEITVFPVTAASIPIRDGFAKLGSNYHHVRLFRVPNGKKYKYCLMQVYTVDLLKFRKEDLFTVELKPQTISVRTCEAPLRKALANGTAEYLGWLVSDDELLIDTSSFKTTGIVKLQEEYGQIKRWRLAGLNSVSGMKLRPLYLSKEGLKPNVDPEIKKIVGDRTWIVAVHKLFDTGHVKIIRRDALGRPRFHNAAHLPICWEVK

SEQ ID NO: 16813 - protein, 1093 aa, unidentified
  REGION 1..1093: note = Cas Enzyme sequence
MAAIAIDDDGKPTEILSAISLIHDSGVDPDNAKSAYTRLKTSGIARRTRRLYRRKRKRLAKLDKFISSQGWQLKEFEEYEDPFYPWRVRAELATIPITDQQELGEKLSIALRHIARHRGWRNPYSKVTALYAVAEPSDAFLAMQGECAKQLGHPIPPTTTVGQLVAGMNLGKTRLRGKEKPPNKANPHGKEAGLFTANKLQQSDYANEIHTIAKVQGLSNELVKQIIDHVFAAESPKGSAAERVGKDPLQPTKKRALKASDAFQQYRIAALIGNLRIRDGKGNRRLTAEDTRLVFDYLRSLPAKQEPTWQLVAEQLKIDRGNLVGTAIMTDDGERAGAKPPVHETNRLMESTKIKPLATWWKSADADARAAMVKALSNAEVDDFDSQAGVQVQEFFFGISDKDHEELDKLHLPIGRAAYSEDTLVRLTKRMIDKGMDLYEARQAEFKIPNDWAPPAPEIGERVGNPAVDRVLKATARWLNAAERQWGTPKSVNIEHVRDAFMSESSARKLDQDNQQRAKRNVKVVAEMQEKLGIEGRPSRADVWRFQSVQRQNCQCAYCGTQISFKNSEMDHIVPRAGEGSTNTRDNLVAVCHDCNSSKSNIAFAVWAENTSRPGVSVKEAVERIRHWVTDSGLRKPEFDKFRKQVCDRLRRKATDEPIDARSLESVAWMANELRSRIAQKFKDGETKVRVYNGTLTAKARKASGISGKLEFVDGKGKSRLDRRHHVVDAAVVAFTSNYVAETLALQSNMKFDYELRLNEKSKQELERKKPKYKTFTGPTPAHQAEWVKWKDRMQDLAELLNNALMQDRIVVMHNLRLRLGNGAAHEDTIGKLTRIKVGDAISTTDIDRASSEALWCALTRDPDFDPKTGLPENPNRTIRIHGTHLTASDEITVFPVAAASIPIRDGFAKLGSNYHHVRLFRVPNGKKYKYCLMQVYTVDLLKFRKEDLFTVELKPQTISVRTCEAPLRKALANGTAEYLGWLVSDDELLIDTSSFKTTGIVKLQEEYGQIKRWRLAGLNSVSGMKLRPLYLSKEGLKPNVDPEIKKIVGDRTWIVAVHKLFDTGHVKIIRRDALGRPRFHNAAHLPICWEVK

SEQ ID NO: 16814 - protein, 1154 aa, unidentified
  REGION 1..1154: note = Cas Enzyme sequence
VCALCHYVCMSDYSANVQRRRYRIGIDVGLKSIGFCAIEVDERGIPVKLLNSTVHLHDGGAEPGDGKDLSRKKVSGIARRTRRRRRSNEKRLADLDSYLSQQLGWPLPNLEEFDDPHEPWHVRAELLDSYVSDPAERAEMLAIAVRHIARHRGWRNSYTSVASLARASYPSKALITVNERVCEALGTNIVAEATQGQLASAYVADERYAFQALRGTQGLFRGRQYQSDTYHELSRILELQHIDLAQIKELTEIVFRVTHPRNGARRNMRVGRDQLPGQESKWRAEIAHPMFQKFRIVAVLANLRICSGRQARKLSADELRRVTQYILDSSIMLEDIDWSDIAEQLGIERNSLTGTAKAVFEGEPALRRPPTDAVSVIVMSSKLTKLKRWWKSANDEDRADLVKFMANSTLAEGEEFESDEVDGFLGSLTDDDLAKLEELALPSGRAAYSLDSLQRLTDRMLADGCDLHEARKREFGVSDSWAPKPDPIGAPVGNPAVDRVMKEVNRWLKMAVDRWGVPEVVNIEHTRSGMMSAEKARELMDSNAARQKRIEALAQELGAQACGRGKLNQVTKIRLLAVQRQGCKCLYCGNAISFETADMDHIVPRSGLGSTNDRNNLVAVCRECNESKRNQLFSEWAKSGGRKDKVSIDDVIERVWSWKRDPGVSLKQHKKFQTAVVARLKSKKPDQEFDARSMESVAWMAVELGKRIRGYFASASSANEGAVVPSVGLYRGRITAAARIVSGFEGCVRLTGGNGKTRLDRRHHAMDALVIALLDDRIARLLALRDDLRFAQLLTSGADEWRLYLQSHPSENALMYDWSQYMQVAAKKFNDALESGMVRFTMNQRLRLGSSRAHMDSVTSFEHAYLDRNGDRVPKLDKNGMRKVKEHGEFRLLSDPLPVDLIDRAETPALWAALVKDEQFDPQTGLPADPKRTITIHGRRIGPMERIRFFGATPAGKWSAAIAVRGGYVSISNTIHHVRIYKIAEKSPKYAMLRVYQVDLRHAHGKDLFSFSIPASSISMRTADKALREALRDGTKQPIAWLVAGDELRVNPKFYDEGKIGEFFKKYREAVEWRVVGFEGPTKLNLRPIRISEEGFDEETPKEIRDIAGSSGSWRVAISALLEPGGVAVISRNVLGEERWKSKDDRLPCSKVFE

SEQ ID NO: 16815 - protein, 1140 aa, unidentified
  REGION 1..1140: note = Cas Enzyme sequence
VLVLYRIRKRYLIGIDVGLMSVGLAAIEVDESGFPIRILNLQSVIHDGGIDPQAGKKKSISRKAVSGIARRTRRMRNKKVARLRQLDLLLEELGFPIVEPDSLDARDAWRVRAKLVDSYILDDEIRKEDVSIALRHIARHRGWRNPYSSVESLLIDTVPSKQYEELRSKAEQKLGRKFLGNPTPAEIVCRVWEEQGETARLRTSRHKDKNGKVVAREGLLPVKLMQSDNAKEIRRIFETQRIDDATGRRLLKAVFKASSPKGSAAQRTGRDALAPELPRALKASMAFQEYRIANVLTNLVISVKGVERKLTVEEKRRVFALLSSDKRNDVTWIDVAEELGVERNQIQGVGRLTADGEERISSMPPRNVTVSRIRSVKLVRKKLAAWWKSASVAERETMVEILSSAVDIDRVREHMDYASASTFIDSLDDEELVALDSMNLPSGRAAYSIQTLKCLTERMLNTDDDLHEARKSVFGVGDDWKPPVDAIGVPVGNPSVDRVLKIVNRYLLACQRRWGNPQSVQIEHVREGFSSVAKAKKTEKAQAERAQYRNDLKEQIRREKLAKIRESDIRRWEAVQRQNGECLYCGRPIDFNTCEMDHIIPRKGAGSTNTRVNLAAVCAVCNKLKDNTAFSVWARTQEAIAQDTSGYKVSLRDAIERVKVFNFDQSVPSPRDQRVFRQAMISRLKQTESDPAIDNRSIESVAWMADELHRRIEAYFNRDADTSKNTIKTKVWVFRGRLTALARKACGIEGRIHFAGKQRKTRLDRRHHAVDAAVIAMLNHSVAQTLVERDSLCLSQWITRRPETWTEYPFVEGQKKTRFEEWLCRMDGLLDLLNNALDADCVHVIRNQRLALGNSQAHDAIIRKMEHVELLSSMDSDLIRRASTPALYCALTRLPDYSPENGLPENHNREIVLNGRRIRSTEMVDFFASGAAQIAVRNGSTEIGNAIHHMRIYRYRKNGKSTQEYTYGMIRVFQVDLIHASSKDLFTVQLPPQSVSMRYGDRNTVQAIQEKRAEYLGYVVPNDEIVINFEGVQMKDSEKIGAYARDFSGTASELAQRRHWVVVGSDVSKLALRPAYLAEEGLENLESDRFSEQTRKVIGKGWVVAINVLAKYRPVVIRRNALGEPRFRSNSGMPISWRWN

SEQ ID NO: 16816 - protein, 1122 aa, unidentified
  REGION 1..1122: note = Cas Enzyme sequence
MSVGLAAIEVDESGFPIRILNLQSVIHDGGIDPQAGKKKSISRKAVSGIARRTRRMRNKKVARLRQLDLLLEELGFPIVEPDSLDARDAWRVRAKLVDSYILDDEIRKEDVSIALRHIARHRGWRNPYSSVESLLIDTVPSKQYEELRSKAEQKLGRKFLGNPTPAEIVCRVWEEQGETARLRTSRHKDKNGKVVAREGLLPVKLMQSDNAKEIRRIFETQRIDDATGRRLLKAVFKASSPKGSAAQRTGRDALAPELPRALKASMAFQEYRIANVLTNLVISVKGVERKLTVEEKRRVFALLSSDKRNDVTWIDVAEELGVERNQIQGVGRLTADGEERISSMPPRNVTVSRIRSVKLVRKKLAAWWKSASVAERETMVEILSSAVDIDRVREHMDYASASTFIDSLDDEELVALDSMNLPSGRAAYSIQTLKCLTERMLNTDDDLHEARKSVFGVGDDWKPPVDAIGVPVGNPSVDRVLKIVNRYLLACQRRWGNPQSVQIEHVREGFSSVAKAKKTEKAQAERAQYRNDLKEQIRREKLAKIRESDIRRWEAVQRQNGECLYCGRPIDFNTCEMDHIIPRKGAGSTNTRVNLAAVCAVCNKLKDNTAFSVWARTQEAIAQDTSGYKVSLRDAIERVKVFNFDQSVPSPRDQRVFRQAMISRLKQTESDPAIDNRSIESVAWMADELHRRIEAYFNRDADTSKNTIKTKVWVFRGRLTALARKACGIEGRIHFAGKQRKTRLDRRHHAVDAAVIAMLNHSVAQTLVERDSLCLSQWITRRPETWTEYPFVEGQKKTRFEEWLCRMDGLLDLLNNALDADCVHVIRNQRLALGNSQAHDAIIRKMEHVELLSSMDSDLIRRASTPALYCALTRLPDYSPENGLPENHNREIVLNGRRIRSTEMVDFFASGAAQIAVRNGSTEIGNAIHHMRIYRYRKNGKSTQEYTYGMIRVFQVDLIHASSKDLFTVQLPPQSVSMRYGDRNTVQAIQEKRAEYLGYVVPNDEIVIDFEGVQMKDSEKIGAYARDFSGTASELAQRRHWVVVGSDVSKLALRPAYLAEEGLENLESDRFSEQTRKVIGKGWVVAINVLAKYRPVVIRRNALGEPRFRSNSGMPISWRWNG

SEQ ID NO: 16817 - protein, 1140 aa, unidentified
  REGION 1..1140: note = Cas Enzyme sequence
VLVLYRIRKRYLIGIDVGLMSVGLAAIEVDESGFPIRILNLQSVIHDGGIDPQAGKKKSISRKAVSGIARRTRRMRNKKVARLRQLDLLLEELGFPIVEPDSLDARDAWRVRAKLVDSYILDDEIRKEDVSIALRHIARHRGWRNPYSSVESLLIDTVPSKQYEELRSKAEQKLGRKFLGNPTPAEIVCRVWEEQGETARLRTSRHKDKNGKVVAREGLLPVKLMQSDNAKEIRRIFETQRIDDATGRRLLKAVFKASSPKGSAAQRTGRDALAPELPRALKASMAFQEYRIANVLTNLVISVKGVERKLTVEEKRRVFALLSSDKRNDVTWIDVAEELGVERNQIQGVGRLTADGEERISSMPPRNVTVSRIRSVKLVRKKLAAWWKSASVAERETMVEILSSAVDIDRVREHMDYASASTFIDSLDDEELVALDSMNLPSGRAAYSIQTLKCLTERMLNTDDDLHEARKSVFGVGDDWKPPVDAIGVPVGNPSVDRVLKIVNRYLLACQRRWGNPQSVQIEHVREGFSSVAKAKKTEKAQAERAQYRNDLKEQIRREKLAKIRESDIRRWEAVQRQNGECLYCGRPIDFNTCEMDHIIPRKGAGSTNTRVNLAAVCAVCNKLKDNTAFSVWARTQEAIAQDTSGYKVSLRDAIERVKVFNFDQSVPSPRDQRVFRQAMISRLKQTESDPAIDNRSIESVAWMADELHRRIEAYFNRDADTSKNTIKTKVWVFRGRLTALARKACGIEGRIHFAGKQRKTRLDRRHHAVDAAVIAMLNHSVAQTLVERDSLCLSQWITRRPETWTEYPFVEGQKKTRFEEWLCRMDGLLDLLNNALDADCVHVIRNQRLALGNSQAHDAIIRKMEHVELLSSMDSDLIRRASTPALYCALTRLPDYSPENGLPENHNREIVLNGRRIRSTEMVDFFASGAAQIAVRNGSTEIGNAIHHMRIYRYRKNGKSTQEYTYGMIRVFQVDLIHASSKDLFTVQLPPQSVSMRYGDRNTVQAIQEKRAEYLGYVVPNDEIVIDFEGVQMKDSEKIGAYARDFSGTASELAQRRHWVVVGSDVSKLALRPAYLAEEGLENLESDRFSEQTRKVIGKGWVVAINVLAKYRPVVIRRNALGEPRFRSNSGMPISWRWN

SEQ ID NO: 16818 - protein, 1067 aa, unidentified
  REGION 1..1067: note = Cas Enzyme sequence
MRNKKVARLRQLDLLLEELGFPIVEPDSLDARDAWRVRAKLVDSYILDDEIRKEDVSIALRHIARHRGWRNPYSSVESLLIDTVPSKQYEELRSKAEQKLGRKFLGNPTPAEIVCRVWEEQGETARLRTSRHKDKNGKVVAREGLLPVKLMQSDNAKEIRRIFETQRIDDATGRRLLKAVFKASSPKGSAAQRTGRDALAPELPRALKASMAFQEYRIANVLTNLVISVKGVERKLTVEEKRRVFALLSSDKRNDVTWIDVAEELGVERNQIQGVGRLTADGEERISSMPPRNVTVSRIRSVKLVRKKLAAWWKSASVAERETMVEILSSAVDIDRVREHMDYASASTFIDSLDDEELVALDSMNLPSGRAAYSIQTLKCLTERMLNTDDDLHEARKSVFGVGDDWKPPVDAIGVPVGNPSVDRVLKIVNRYLLACQRRWGNPQSVQIEHVREGFSSVAKAKKTEKAQAERAQYRNDLKEQIRREKLAKIRESDIRRWEAVQRQNGECLYCGRPIDFNTCEMDHIIPRKGAGSTNTRVNLAAVCAVCNKLKDNTAFSVWARTQEAIAQDTSGYKVSLRDAIERVKVFNFDQSVPSPRDQRVFRQAMISRLKQTESDPAIDNRSIESVAWMADELHRRIEAYFNRDADTSKNTIKTKVWVFRGRLTALARKACGIEGRIHFAGKQRKTRLDRRHHAVDAAVIAMLNHSVAQTLVERDSLCLSQWITRRPETWTEYPFVEGQKKTRFEEWLCRMDGLLDLLNNALDADCVHVIRNQRLALGNSQAHDAIIRKMEHVELLSSMDSDLIRRASTPALYCALTRLPDYSPENGLPENHNREIVLNGRRIRSTEMVDFFASGAAQIAVRNGSTEIGNAIHHMRIYRYRKNGKSTQEYTYGMIRVFQVDLIHASSKDLFTVQLPPQSVSMRYGDRNTVQAIQEKRAEYLGYVVPNDEIVIDFEGVQMKDSEKIGAYARDFSGTASELAQRRHWVVVGSDVSKLALRPAYLAEEGLENLESDRFSEQTRKVIGKGWVVAINVLAKYRPVVIRRNALGEPRFRSNSGMPISWRWNG

SEQ ID NO: 16819 - protein, 1509 aa, unidentified
  REGION 1..1509: note = Cas Enzyme sequence
MKTILGLDLGTNSVGWAVINSVIKEQAERIWIEMAGSRIIPMDAAVLGDFDKGNSISQTSERTRLRGARRLRERQLLRRERLHKVLNILGFLPNHYLEYIDFEKHPGKFLADAEPKLAWVKDEQGKYTFLFQAAFDEMLADFAIHQPSLVSGDKKIPYDWTIYYLRKKALTEMISKEELAWILLNFNQKRGYYQLRGEEEEDNAGKSVEFYALKVLTVEATDEKKGRDVWYNVHLENGWIYRRSSSVPLDWEGQVKEFIVTTDLNPDGTPKLDKYGEVKRSFRAPKEDDWMLIKKRTEADIANTHKTVGAYIYDTLLQKPQQKIIGKLVKTVERKLYRDELSLILQKQCAFHAELQDRALYARCVEALYPSNEVRRKNIANRDFVYLLMDDILFYQRPLKTKKSLIANCPYEENEYVDRETGEIKKAPLKCIAKSHPLFQEFRLWNFLSNIRIYQKEKEINGTLHLDVDVTAEFLKTEDDYVALFDWLNSRKEIEQKTFLKYPKFGLKKEISNYRWNYVEDKQYPCNETRHAILSRLEKANVCIDFLSNEKEVALWHILYSVSDKQEIEKALRTFAAKNGLDESFVEAFKKFPPFKSEYGAYSAKAIKKMLPLMRCGKYWDVSSIDDTTKERIKKIVTGEYDERISVKVRDKVMNLSDISCFRRLPLWLACYIVYNRHSEDKEAVKWESPADIDAYLASFKQHSLRNPIVEQVITETLRVVRDIWKQVGRIDEIHIELGREMKNPADKRKRMTAQILENENANLRIKALLAEFMNPEYEIENVRPYSPSQQEILRIYEDTVLHAEDQLPEEIDAILKKFNSSKVPTKSEFLRYKLWLEQKYRSPYTGELIPLGKLFTAAYEIEHVIPQSRYFDDSFSNKVICESAVNKLKDNQLGYEFIKNHHGQKVEVGFGKSVEIFSVDSYERFVKEQYAKSAVKMKKLLMDDIPEQFIERQLNDSRYISKVIKGLLSNIVREKNDSGEYEPEAVSKNIVVCTGSVTDRLKRDWGMNDVWNSIVYPRFERLNSLTDTQSFGHWENKSGKKVFQTELPLEYQKGFSKKRIDHRHHAMDAIVIACATRNHVNYLSNESASRNAKISRYDLQRLLCDKNRTDDNGNYKWVIKKPWDTFTQDAREVLSKIVVSLKQNLRIINKTTNVYRHFDATVNRVYEKQKTGDSWAIRKPMHKDTVFGAVNLRKVKVVRLSVALDTPAMIVDKRVKNKVFELLSYKYDKKRIEKYFKENAFLWKELDLAKVAVYYFTEATTEPLVAVRKPLDSTFNEKKIKESVTDTGIQKILLNHLCTKEGKPDLAFSAEGIEEMNRNLLQLNNGKSHQPIYKVRVYEPRGNKFSVGVLGNKGTKWVEAAKGTNLFFAIYITEDGKRTYETIPLNVVIEREKQGLVPVPDRNEKGDKLLFWLSPNDLVYLPTEEEREFGRINEPIDRGRIYKMVSCTGNEGHFIPANVANPIVPVIELGSNNKAQRAWTNEMIKDICIPIKVDRLGHIIEVKYRIDE

SEQ ID NO: 16820 - protein, 1190 aa, unidentified
  REGION 1..1190: note = Cas Enzyme sequence
MILYMEGNISYAIGIDVGLNSVGLAAIRLDDNGEPIRILKVISVIHDAGIDPNGAKESDTRKAISGVARRVRRLCRQRRRRLQKLDFLLQSLGWPVVENKDLEFSNSFIPWIFRAKLADEYIEDEEQRKQMLSVAIRHIARHRGWRNPYQSIKSMMQETEYSEFYNELLKNIEKFAPGVGCEGSTPAQLVRDYLLSQQGKPSRRLRITTDDKKKNHPNSLDPVLPRKLMQSDSMLEILNIFNVQHIDDKYVREQIINAVFYEKSPRGSAENRVGKDAITGKGKRALKASLAFQKYRIISTISNLSIRENSKERCLTIEEKQNVYKLLTTSTDESSKKKSAEVPLYTWIDVADCLGIERYKLRGVGSQIGDGESVGNRPPMLNSELAIIYANNKSLRQSLLTWWLDANRTQEDKEALIEILSNTVDIEAIHDNPEYQDKYGSAIAFIDSMDETEIAALENISLPNGRAAYSLEILDKLNKQMLETDDDLFKARKKLFNLPNNWRPSEAPIAEPTGNPSVDRVLKIVHRFLISAKNRWGNPVRINIEHVRSGFQSKKMANSYKELLDKRTKGKENLKAMMRNSLHLGMSDSISDADIRRYEAVQRQNGQCLYCGYEITYHTCELDHIVPRKGPGSTNTRENLVATCLSCNAQKCNTPFATWCEQSTYCKNHDISVDSAINRVRAFIFPPKSYDKRGANQFKKEVISRLKQKVGDEAFDNRSIESVAWMANELHRRIDWYYNSQNYQTNNGISDISNKAQTNVGVYAGSLTAIARRMSGIDGKLEFFDGRRKTRFDRRHHAVDASVIAMMTPGMARILAIKCNLRETQLLQGNKVVPGGIDWREYPTANDQGYQQYANWSVRMNALLKLLNEEMRADRIAVVNSIRLRYSNSSVHKDDVHALLKLHVGDEIDSETIRRASTPALYCALTRNPDYDVNNGLPENPDRTILLHNKKLNAYDSITFFKAQAAQLFVREGSVEIGNSIHHLRIYEYFEKLKSGKIKKSYGMIRVFQNDLHKHIHEDLFSCDLPEQSISMRYADTEVTHAVQTGNANYLGYLVPGDEIIVDFSHAKLSGYIGDFVEFLNKIGADCTAYKHWVVVGTDDKTTLILKPSMISSEGIDKLYSNCKRNNFDYTSYEESINKILAGKGWRVSVNVLAKYNVATIRRNALGEVRWVSRSHLPISWRWDTGENRE

SEQ ID NO: 16821 - protein, 1457 aa, unidentified
  REGION 1..1457: note = Cas Enzyme sequence
MKNILGLDLGSNSIGWALVQQNFENKQGQIMAAGSRIIPMDQSILGDFEKGNTISQTAERTAYRSTRRLRERHLLRRERLHRVLHILGFLPPHYDSQIDFNKRYGKFIDDAEPKIAYNKGNFIFMNSFNEMIEDFRKHQPQLFYKKSNGEESKIPYDWTIYYLRKKALSQKITQQELAWLILHFNQKRGYYQLRGEEETENPNKEVAFHSLKVVDVEAEAPNKKGEIWYTIRLENGWIYRRTSKIPLDDWKGKTHDFIVTTDLNDDGTIKLDKEGKEKRSFRAPDENDWNLLKKKTEHDIDFSGKTVGAYIYDHLLQNPNQKIKGKLVRTIERKYYKDELKAILAKQIALQPEFFTENLLADCIRELYHKNETQQQNLLSKDFLHLFVEDIIFYQRPLRSKKSTIANCTLEKRSYIDKETNERKDVPIKVCAKSNPYYQEFRVLQWLQNLRIYEIETDREVTAEFIETAQDYEALFNFLMSQKEIDNESLLKYFLLAKNPQIKDKAAKSELKKWLTTYRWNYVYDAADNSSKKYPMNETGYELQRYLQKVEGLPANFLTFDITYQLWHLLYSVKDKVEFEKALKKFANKNQLDETSFVESFKNFKPYPNEYGSFSEKAIKKMLPLMRFGKHWNFKNIDVHTQKRIDDIINGMANEDIRTIIREKAEKYQLNSETCFQGLPLWLAQYIVYNHHAEATDIEKWTSVSDLEAYLEDFKQYSLRNPIVEQVVTETLRVVRDVWQQYGGGQANFFDEIHIELGRELKNTSKERERLSKQNQENENTNLRIKKLLAELKEDTNIQNVRPYSLVQQELLKIYEEGVFSSTDEIEEDIQKIRKKAEPTTPEIRRYKLWLEQKYKSPYTGEVISLTKLFTEEYEIEHIIPQSRYYDDSLSNKVICESAVNKLKTNQLGLEFIQNHHGEKVRIAGNKEVTIFTEEQYKEFVKKYYANNSAKQQKLLLNEIPEKMVARQLNDTRYISKYISEILSKIVRSDEKDEGVNSKNIIPCTGKITTALKQDWGLNDVWNELILPRFERMNQLTQTQLFTSYNDRLQKNLPTVPIKYSQGFQKKRIDHRHHAMDALVIACVTREHINYMNNQHALDKSKDKKEKQQSRIDLRTILCEKKNNNWQFKKPWRTFTQEAKEALEHIVVSFKQNLRVINKATNYYEKWEEKNGVLVKKKVKQEGTNWAIRKPLHEETFSGKISLNREKVGKGNILTATRKAVDSSFDVKKISKITDTGIQKILLNYLKYKGSPEVAFSAEGLEELNKNIAQYNDGKKHQPIYKVRIYEKGSGRFVLGEKGTKSKKYVQGAPNLYFGVYQGKEKRTYATIPLNEVIERQKQGLPSVPERNEKGEPLLFSLSPNDLVYVPMEGEAPEAIDFSNLSKEQKERIYKIVSFTGKECHFVKSTIASLIKSYDAKSKIGELGSLNKLEVTISRDSRIKEVCIKLKVDRLGNITKA

SEQ ID NO: 16822 - protein, 1142 aa, unidentified
  REGION 1..1142: note = Cas Enzyme sequence
MVPERYKVGIDVGSHSAGLAAIEVDDDDIPIRFLNCEVVIHDAGVDPTANKTAGTRRAVSGQVRRMRRLIRHRRQRLYHLDQVIQGLGWPIVNLESVHDPYHPWRVRSSLLTVPVEDQEELKKQLSVAVRHMARHRGWRNPYASVPSLLAATEPSKEFRAFIKTLEDKPGVGEVNDQMAVSEIVCDALCSDLTCRVRGIRKSVVPLLESKVHQSDNVRELRRIWDMQRLPTDQLHTIVNAVFAQRSPKGSAAGRVGRDPLPGMGDELRAEKASLAFQRFRIVDKVANLRVRDGLSREGRVLTPAERRTITDFLWQADDATWDEVAAQIGIKRGDLVGTAKVTELGERGGGKPPINVTDRRIRESKIKPLVQRWDEEDEAGKEALLVVISNGSGSGDKSEAALDAQARAEEFIASLPDEVYGSLDNLKLPEGRAAYSAKSIRMITERMTESADDLHAARKYCFPTIDDYWKPPADPIGLPVGNPAVDRVLKIVARYLAACESQWGVPESVNVEHTRDGLMSEVMARKEARERNKNAEENEKARQEISIEFLAASRDASADDFEEESGPARFGARQSDVYRWRAIQRQKSRCLYCGTTLDYGTFEMDHIVPRAGQGSTNTQTNLAAVCRECNHSKGKLPFAVWANSEAAKARGVSLADAIARVEDFFDVDAKRDSDRRKPRTQEGRFIKAARDRLKRTDLDEEIDNRSIESVGWMANELHHRIEAHYRDELKTDTTVGVFRGWITSEARKAAGIEGRLMLVGGKAGKNRLDRRHHAVDAATIALLRPGVAQVLAVRDNLRRTAQIQGPRTEIRWKDYRGTDTALFNEWQVQMQRLADLVQDELETDRVPVFEFLRLKLGSSQGHEDTVRPLSKARVGDQWSMEQIDRSATPAQWVALTRHPDFKPGFGLLANPTRRIRIHGTWYEADDEIGYFPTGAGCVAVRGGYAELGASFHHARISRCTKTSKSGVTKTFYAMMRIYQVDLLKHAHEDLFAVDIPPQAISRRAAEQRLRDALDTDEAEYIGWIVPGDELLLDMDSQRGKGQVGELLSLYPNTNRWVCDGFFTESRLRLRPRVLAGEGLPDDSPDGVLTIIVRVGWRPSVDVVFGACSASVIRRDILGRPRLRSAKGLPVSWTASGGDLPKE

SEQ ID NO: 16823 - protein, 1483 aa, unidentified
  REGION 1..1483: note = Cas Enzyme sequence
MKTILGLDLGTNSIGWAKVTVDDNENYLRDIQLGSRIIPMSQDVLGKFDKGVTESQTAIRTSFRGIRRLRERSLQRRERLHRVLHTLHYLPPHYDSAIGWDRKTPTTYGKFLNHGEPKLAWERREDGTMQFLFMDAFHEMIADFAKYQPALVADGKKVPLDWTIYYLRKKALTQPIKKEELAWILLNFNQKRGYYQLRGEEDEENVAKHEEYHELKVVGVEADEAGKGDNTWYNVKLENGWIYHRQSKIPLDNWVGKVRAFIVTTEYEKDGATPKKDKEGNVKRSFRSPDEKDWGLRKKQTEHSLEASGTPVGAFIYDHLLKEPSDKIRGKFIHTIERKYYKQELAAILREQSKHHEELCSKDMLKACIEELYPNNPLHRESLLKKDMTYLLIEDLIFYQRPLKSKKSLIAECPYEAYSYVDKETGEMKRQGIKCIAKSNPYYQEFRLWQFIANLRLRNRADERDVTAEYLPHQEDYVRLFTYLNDRKEINQEALLKDFFKLKKVTIGGEKVFPIRWNYIEEKEKKYPCNATRHELLLALDRAGIEHDWLDDRDLAYRLWHLLYSVDSKDETERALRKLKDDDAFVESFLKIKPFEKEYGSYSEKAIKKLLPVMRRGSLWNEADLCPSTKERIANILQGSIDEKLKKKIGAFISSCQQVSDFQGLPEWLACYVVYGRHSEATDIQRWETPEQLLDHIHRFKQYSLRNPVVEQCILETLRTVYDIWKEAGQIDEIHVELGREMKQTAEQRAHLTENVLRNENTNLRIKSLLMELKNDADIKDVRPHSPMQQEILRIYEEGALQTLSKDDTAFTEIMKISKMAQPSASELQRYRLWLEQKYRSPYTGKPISLSKLFTSAYQIEHIIPKKRYFDDSFSNKVICEAEVNREKGSMLAYEFIKDCGGNVIHCTALGDVTILSEAEYKALVTELYANNNSKKKKLLMEDIPQEFVNRQLNDSRYISRVVMTLLSNIVRIEGEEEATSKFVIPCSGGITDKLKKDWGLNDVWNNIVYPRFERLNALTNTTDFGQWENKEGKRVFQTSVPLELQRGYQKKRIDHRHHAMDALVIACASRNIISYLNNQEANDPTKQENARKQLCIKNRIIRKPWETFTQDAYKALDNIVVSFKNYVRVINKATNYYERYNADGKKVVDEQKGEAMWAIRKPMHKDTVFGHVNLRRKAVVKLKDTLENIPAICDKTLRHYIQDLQKKHFNTKQLLAHFKSINYRLNKQAVDKVEVWQYSDDKKQLAATRKPLDTSFDAKHIATITDTGIQKILLNYLQAKGGDPAIAFTPEGIAEMNQNIAVYNGGKQHQPILKVRIAEPMGAKYPVGETGNKGAKYVEAQKGTNLYFAIYEDEEGNRTYDTVALNVVAERLKQGLTPVPEKNEKGVALKFYLSPNDLVYVPTADELLSKACSLDKNRIYKMVSATKSQCFFLSHRVAKTIYDKVEFEALNKMERALTGEMIKSVCWKIEVDRLGHIVNIIK

SEQ ID NO: 16824 - protein, 1487 aa, unidentified
  REGION 1..1487: note = Cas Enzyme sequence
MKNVLGLDLGSNSVGWALVKTEDNGNPIGSIKMGSRIIPMSQDILGSFEKGDTVSQTAQRTLYRGKRRLTERHVLRRERLCRVLHIMNFLPDHFDKLLGWDKTDNKTYGKFIDDSEPKLAWRQNKNEMGKMEFVFMDSFHEMLSDFARHQPQLIANGKKVPLDWTIYYLRKKALTQLISKEELAWILLNFNKKRGYYQLRGEEEEEQPTKKEEYKVLKVISVDADEGQKGNGIWYNIHLEDGGIYKRKSDIPLYDWVGKTLQLIVVTIYEKDGKTPKIFDSGKQNPSYRLPKEDDWGLIKKRTESQIQSSGKTVGAFIYDNILSKPADKIRGNLVRTIERKYYKKELIEILQQQAKYHDELHNQHLLESCAKELYAHNDVRYNEVVKSNMIHLLVDDIIFYQRPLKSKKSLIDNCKYESYEYVDKETGEVKEMPIKCIAKSNPYYQEFRLWQFIHNLRLSDVVTREDVTAQYLSTPQDYCNLFTYLNDRKEIKQDILLKDFFQIKKVQIDKEKVFPIEWNYIKDATKTYPCNETRYELLSALKRAGMDKQWLDDTPNMQYRLWHLLYSVEEKEESAKALRKLYDDDNFVLSFLKIKPFEKCYGAYSEKAIKRLLTLMRMGKAWDEQAIDAKTLKCIQQIITGNIDSKLKEKIDDSRYVLHHVSDFQGLPTYLASYVIYGRHSEVTDIRCWDTPEDLLKFIYSFPQHSLRNPIVEQVILETLRVVYDIWKAEKHIDEIHVEVAREMKLTAQQRNEANLRNLNNEATNLRIKYLLEELKNDTFIKDVRPLSPMHQEKMRIYEQAVLGSLNKQDKDYDDIIKISKKERPTSAELIRYKLWLEQKYCSPYTGKAISLSKLFTTAYQIEHVIPQSRYFDNSFNNKVICESEVNKEKDKMLGYEFIKGRGGDRIYCTAHGKEVTILKEEEYKQFVNEHYAHNKRKRDNLLAENIPESFSSRQLNDTRYITKTIMSLLSNVVRQQGEEEATAKNLLPSSGAVTDKLKNDWGLKDVWNTIVTPRFERLNKLSGTNDFGEMKEENGSRYFQTNVPSEYEKGFKKKRIDHRHHAMDALVIACTTRNMVNYISNVNANSPKQREDLRQLLCDKNRIINKPWNTFTQDALKALNDIVVSFKNNVRIINRATNRYQRYDKNGKKMICSQKGDDMWAIRKSMHKEIVFGRVNLIRKEVLPIAKALDNISAICNAQLRAYVNDLVDKHFNKKQLVAHFKSLDYKWNRQDVSKVEVWISSDDKTPMVAVRKPLDTSFDKKKIASITDTGIQAILLNYLESKGGDALVAFAPEGIQEMNSNIELYNNGKAHKPIKNVRLSELLGAKYQVGERGAKTKKYVEAAKGTNLFFAIYEDEEGKRYYYSVPLREAIERQKQKLSPVPEYNEKGVALKFYLSPNDLVYVPTEEERTMGICHIDKTRIYKMVSSTGNRSFFVPSTIAKVIADKVEFQSLNKMEKAITDECIKEVCWKLKVDRLGNILNVIK

SEQ ID NO: 16825 - protein, 1345 aa, unidentified
  REGION 1..1345: note = Cas Enzyme sequence
VNKRRWIEFERYIQMKKEWYLGLDIGTNSIGWAATDPNYKVLRKSKRKLIGVELFDAADTAEERRLARNSRRVLGKRKWRLSLLKSLFEDEIKKVDSDFFLRLEESKYHLDDKRVNSKYVLFNDKNYTDIEYNKEYPTIFHLRAALMTEENPDIRKVYLALHNIMKSRGHFLFDGLSVDTGSFDSTLGTLLTKLGVEGIDITKVKAICTSKGNTTAKVKDFKELTNNVRVQEIFRLLFGGSVALEKIYGVEEYKELDSNVKTISFKNKVYDEVRSDYEAVLGTDIELLDNIKRVYDSLILMGIKQEGMSLSQSKMVVYDKHKSDKALLKEVIRLDNKLSDKDKKELIIKVFSKDEKGLDNYVAYTRNSGINKSCSGDAFRTFVNKVLDELQETETIKSIKEELTLGLFLPLQKVKDNSVIPNQLHREELIAILENASKYNSFFTDELKTKVIELFDFKVPYFVGPLNATSKYAWAVRNEGYENVKVTPWNYKEVINESKSAAKFIDNLVGKCTYLEGELVLPDNSLLYSEYKVLNELNALKVDGDRVSIETRNLIIEELYLNSVGVVTKAKIKKLLVAKGIIDKGAELTGISNVLGSKLKSRVDFTNILGANFDEADVEKMIYWLTVYGDAKYLIRDRIIEAFGSKYTEQEITAILKLNYKDWGRLSEKFLKGIYSKCFVDTTTGEMLNIIDIMRSQTIILMEILGNAYDLTEAVEALNSKVVGNVVEITPALVENLYVSPSVKRAIWQTIKLVERLKKLIGCEPKKIFIETTRTNQAPKVETDSRYKALVKKYSALKSKDFEKFDIDVESLYEMLKNEDPSALKSKRLYHYYSQLGKCLYTGKTIERSQVDSIALYDLDHIYPQSKVKDDSLDNMVLVCRVANGYKSDTYPLSEDIQKEHKALWSVLKANKMISDTKYERLVRVDGFTTDELTGFIARQLVETSQSVKTISKLLGKLNTTSRVVYSKAENVDQFKHNFGKIKDGNRKSTSKEKILKVRELNDLHHAYDAYLNIVVGNVYDVRFTANPRNFVSNKENRNYSLNTLFYYDVKGAWVMGETVKMVESVLNNPYVQVNKMAVRKTGKLYDATIYKANKAKPESYHPLKTKDGRMLDVTKYGGYSSVSISHYVFVGYTLVKPKESISSTYLVPIRICDVARLKTDSVILDYAKKVIPCKAKESIEDLHIIKDNITTYTKVKLGNIPVYLGGKTGNYITYRSALQIRFDVESTEYMKILTNYNGWRIANRSCEVWKSITLEKNLKFYDKILEKMQTKVIHELNPKKFDALLDNKYRELFAALDLLNQTKVLLELVNLITQRLVPNADVLKLIDFKASVGKISLVNPGIKV

SEQ ID NO: 16826 - protein, 1134 aa, unidentified
  REGION 1..1134: note = Cas Enzyme sequence
LPENQQTRIQVGRAFFTLPLPSNVPNSQHMFSYPRAPVSFSFDIGHASIGWAVKAESSGSKAEPAPILGCGALIFPKDDCQNHERAAFRRQRRHIAATRNRVKRLREHLTQMGALSLGDAKAQREAASGVMAPWLLAARALNGCRLSWLELWQVLRWYAHNRGYDGNAAWAGAEAEIDPEDTEKVKQANRLMEEAPRTETMAETICKVLGVALESDSPPMGKYFKGENAAFPREVVVGEVARILQIQGHLPGCDADFRRRLLDDLSEEEKRHFRLPQRYHGGLLFGQMIPRFDNRIISKCAISGKKAPLKHCPEYYRFRWGLLLANLRVETPREGVRALLPRERADLHERMKAKGFFTKSELKKAVEEVTGCSAAPLDAHFFTREAEDALVLDPVHRELSAAKWAPLWASLPARERRIFANQLFKSGRATPKQWREALSPEAKAEFDRSVDKGLEAANKHRRKKAPLSREEFLATPIQLATKATGRAPYSRDLLKQAFAEVMEGMHPHARTDKQPPSAAELRDGCLSRTPEVLNRERERKLDEMTNNHLVRQRILLFRRLLEQLYERFADREIERVQFTTIEVARDLVEYSGMNAKEKAALFSSKAKPFQEAEKVLRKGFAELGIGDRITYSLIRKARIAIAQNWTCPYTGRRFGPLELRDGTVDVDHIIPRSRRPSDSLDNLVVAFSEANKRKGNRLPLELIQADGGEGVATGGSATNGQIVYESRFREIVDGFAPKRDPRSLNYANDEDFIRWRRKQNLLLERYDERDADFTPAALTVTSHLNKLAALEARKFFHAEAEKAGLEEKGSAEHRVGHVQGSVTHYFRTRWGLLHALGEVCPEVIDKANGDSRLLPKGEIRTITHLHHAVDAIALALVRTALGGVVEKQLCEAILRRRARPEERLRLEATGLFDFDAKGKHHPKDLPGALFDSIKAALGEKRIVQHVPANMAGMLTEQTQWRVLQVRDDGKAVIQQYGPRDPKTHKRSKKQDTENPKRLLGFDPRIENGKESKLKPRQAAIVIKGNYGIALLPEPEVIPFHCVWKRLDEIAARNDGKRPEILRAGQIIHVPKAGIYQGRWRIHSVKDNTAGVAVDMARPELVKAENRKDGCKMNVLVASLIKAGMMIENSSMIGV

SEQ ID NO: 16827 - protein, 1072 aa, unidentified
  REGION 1..1072: note = Cas Enzyme sequence
MPFSRGATENRYRLGIDLGSGSIGWAAVVDADGPSPQILGMGVRRFEAGVTGSADEIEAGKDKSRATVRRDARGPRRQTWRRQYRIRKVFHLLQRLGLLPDSDDDSHDTRNRVIADLDRQLRAEYLTGADHPAQQVLPYRLRAAALDEQVSRFALGRALYHLAQRRGFLSNRKAGKKDEDAGAVKAGIRGLSDEIERNGCRTLGEYFASLDPDQQKIRGRWTARQMYLDEFEKIWAAQSQHYDDLNDETHDLLFEAIFHQRKLKSQKGLIGACELEPGKRRAPAASLEYQEFRLLQRVNDLVMIDPANRKFSLIEREDLQTLRDAPQKRAALIAALQEAESLSFAKISRILGLKAEKHGRASVKWTFNFEEGGEKRMRGNTTAAKLVGVLGDRWTRFSEEEKPRLVDEILSFETEEVLVRRLIRGWAIPENEAKQAADIHFEQGYGALSRKAIRTILPYLERGIPYATARRQAYGEDATVGTPEDSLPANRNCKLLRDVRNPAVERALSELRLVVNALIRKYGKPESIRVELTRELKHSRDRRKRITERNRKNEKFRSDARAKILEEMGHERYCSVYNILKVRLAEECNWECPYTGRSIAMAQLVGDHPQFEVEHIVPFSRCFDNSFANKTLCHHEENRKKGNRTPFEAYGHTESWAAILTRVGRFRSERSLVSRKLDLFKREKLDDTEEFTSRQLTDTAYMSRLAAEYLGLLYGGRTDPEGTMRVRVSPGRVTSYLRREWDLNKILGISDEKQRGDHRHHAIDALVVALTGANEIQALSRAAEKAEAQQQHRLFVAVDQPWEGFLGDVFTAVETINVSSRVSRKLNGQLHDATILSPPKPAISKDGKPVKVHHVRKKLELLTKTMVDDIVDDRVRELVKEKLDAFGGDPRKAFQDSANHPYFRSKDGRVIPIHKVRIRTGLRGIQIGKGSRARYVAPRANHHMEIVARLDARGNEKAWEGHIVSRLEATRRHREGLPIVLRDHGDGKTFKFSLAMGEHVIMEHEEEIPQLYRVESISEKVLEFRLHVDARPSTVLRKMSKARITRSPRALLSAKARKVTVDPLGNILPAND

SEQ ID NO: 16828 - protein, 1148 aa, unidentified
  REGION 1..1148: note = Cas Enzyme sequence
MTYAANDKAIRYRVGIDVGLRSIGFCAVEVDDEDHPIRILNSVVHVHDAGTGAPGETESLRKRSGVAARVRRRGRAKKQRLKKLDVLLEELGWGVSSNELLDSHAPWHIRKRLVSEYIEDETERRQCLSVAMAHIARHRGWRNSFSKVDTLLLERAPSDRMQGLKQRVEDRTGLRFSDEVTQGELIATLLEHDPDVTIRGFVRKGGKATKVHGVLEGKYMQSDLVAELRQICRTQRVSETTFEKLVFSIFHSKQPAPSAARQRNRVGLDELQLALDPAAEQPRAERAHPAFQKFKVVATLANMRIREQSTSERSLTSEELNRVARYLLNHTESEAPTWDDVARKLEVPRHRLRGSSRASLETGGGLTYPPVDDTTVRVMSAEVDWLADWWDCANEESRGHMIDAISNGCGSEPDDLEDEEVNELISSATAEDMLKLELLAKKLPSGRAAYSLKTLREVTASILETGDDLSQVITRLYGVDRGWVPTPAPIEAPVGNPSVDRVLKQVARWLKFASKRWGVPQTVNIEHTREGLKSASLLEEERERWEEFEARREIRQKEMYKRLGISGPFRRSDQVRYEILDLQDCACLYCGNEINFQTFEVDHIIPRVDASSDSRRTNLAAVCHSCNSAKGGLAFGQWVKLGDCPSGVSLEGAIKRVRSWSKDRLGLTEKAMGKRKSEVISRLKTEMPYEEFDGRSMESVAWMAIELKKRIEGYFNSDRPEGCAAVQVNAYSGRLTACARRAAHVDKRVRLIRLKGDDGHHKNRFDRRNHAMDALVIALMTPAIARTIAVREDRREAQQLTRAFESWKNFLGSEERMQGRWESWIGDVEYACDRLNELIDADKIPVTENLRLRNSGKLHADQPESLKKARRGSKRPRPQRYVLGDALPADVINRVTDPGLWTALVRAPGFDSQLGLPADLNRGLKLRGKRILADFPIDYFPTDSPALAVQGGYVGLEFHHARLYRIIGPKEKVKYALLRVCAIDLCGIDCDDLFEVELKPSSISMRTADAKLKEAMGNGSAKQIGWLVLGDEIQIDPTKFPKQSIGKFLKECGPVSSWRVSALDTPSKITLKPRLLSNEPLLKTSRVGGHESDLVVAECVEKIMKKTGWVVEINALCQSGLIRVIRRNALGEVRTSPKSGLPISLNLR

SEQ ID NO: 16829 - protein, 1128 aa, unidentified
  REGION 1..1128: note = Cas Enzyme sequence
MIDSSENVQGLRYRVGIDVGLKSIGFCAVEVDRNDQPVRLLNSMVFIHDAGVDPNARKSMETRKLTGGVARRTRRLYQTRRHRLANLDRVLSKEFGWPLTDFASFKDPLEPWHVRSGLLEGYIAEEAKRFEALSIALRHIARHRGWRNPYAKVETLLQPAEPSDFLNGLNERISNALGRTFLADATPGQLVDAYLAHPDYVKAPGTPKLRGPEGILAGKLHQSDNAEEIRRICDAQKIAPSERDRLIRAVFEAKSPKGSAKERGLVGYDELPGQGKHVRAEKAHPAFQKFRIVSVLANLRIREGREERPLTPDELAGLVDFIDQVSLKQEVTWQDLADNLGIERSDLRGTAKASFDGGPVLRNPPTDVTTEKIMACKIKWLKEWWKNADDEQRGYFVDAFSNSGGSEDGTDVNDEVAELLEQATEEDQLEFEKISLPQGRAAYSLDSLRRLTDRMLSGGVDLHTARRLEFKVGDDWKPAVEPIGAPTGNPAVDRVLKQVSRWLHAATERWGEPTVINIEHARDGLGSELVAYKLMKANEKRRKANAAAVADMAQQLGLSGKVHRSDQIRYFALQRQNCQCLYCGAPITYATAEMDHIVPRADGSSTNDRSNLAAVCRTCNHMKGKIPFAAWASSDKANTGVSLQGALDRVKMWERDNGISPKQFKQFQREVSARLKSKKPDEDFDGRSMESVAWMAVELRTRIEGFYRSRNEELVPSVGVYRGQLTAEARKASGFENRVNLIGGRGKTRFDRRHHAMDALVIALMNPSVSRTLALRLNMRDAQRLKGVEETWKNFYGKPGEASQRFEAWRESMLRGVELFNIALSGNAIPFLENKRLSMNSSAVHEDTLFSFSHARPVEKGSKTLKEKGQQRELGSAISVELIDRAETSALWTALTRCPDFDPKKGLPENPSRSISVNGTRVGSTELVNFFGTSSACLKVRGGYVKLANSIHHARIYRIDGKKTSYAMVRVFQVDLLRLKHQDLFTTPLKPSTISIRTAEAKIRRALADGTATQIGWLVEGDELRIDTSKYRGGFIGEVLAKYPEAVNWRVAGFADKAQLRLRPYLLAGEGLESDAMQGMKELLEGKGWRPSVNVLFAPGSVEVVRRNCLGEERKVLGRGLPASALMR

SEQ ID NO: 16830 - protein, 1148 aa, unidentified
  REGION 1..1148: note = Cas Enzyme sequence
MTNSLENIPGIRYRVGIDVGLRSIGFCAVEVDDEDHPIQILNSVVHVHDAGTGGPGETDSLRKRSGIAARARRRGRAQKKRLKRLDALLEDLGWGVVSNELLESHAPWHVRKRLLNEYITDDVERRQCLSTAAAHIARHRGWRNPYSKVDTLMLEHEPSDRMRGLKNRVEEQTGLCFSDQATQGELIATLLEHDKDVTVRGFVRKGGKATKELGVLQGKYMQYDLVAELRQICVKQKVSDEVFKQLVSTIFYSKEPQSDKKNQRKRVGIDELQLAVDPQAVELRAERAHPAFQKFKIVATLANMRIQEDGVGERALRPDELHAVTAYLLDESGVGIPAWEEVAGQLGVPRHRLRGASKASLETGGGLRYPPFDETTARVAESEIDWLVDWWMQADDESRGHMIDEISNGCGSETNDIEDEEVIELISSATAEDAAKLELLAKKLPSGRAAYSLKTLREVTSSILETGDDLSRVIERLYGVEPGWAPTPAPIEDPVGNPSVDRVVKQVARWLKFAEKRWGIPQAVNIEHTREGLKSASLLEEEKENRIKYEERREERLKKMYAQLGISGPFRRSEQTRYEILYLQDCACLYCGCKIGFETFEIDHIIPRVDASSDSRRENLAAVCHSCNSAKGGMPFGQWAKLGDCPSGVSLKDALKRVGRWDKDRAGLTDKAMRKRKAEVKSRLKTETPYEEFDGRSMESVAWMAIELKRRIEGYFNSDRSKVCAAVQVNAYSGRLTACARRAAHVDKRVRLIRLKGDNDHHKNRFDRRNHAMDALVIALMTPAIARTIAVREDRREAQQLTHAFLSWKNFLGSEERMQERWESWIGDVEYACDRLNELIDANKIPVTENLRLRNSGKLHADQPESLKKARKGSKRSRPQRYVLGDALPVDVINRVTDPGLWTALVRAPEFDAETGLPANPARSLSLRGSRISADFPVSYFPTDSPALAVQGGYVGLEFHHARLYRIMGPKEKVTYALLRVCAIDLCGIERSNLFAVELKESSISMRTADPKLKEAMKEGTATQIGWLVLGDEIQIDPSKFPKQSIGKFLDECGPISSWRVSALNTPSKITLKPRLLSNEPLLKERNGARKSDLVVSECVEKIMKKTGWVVEINALLKSGSIRVIRRNALGEVRTSAKSGLPISLNLR

SEQ ID NO: 16831 - protein, 1148 aa, unidentified
  REGION 1..1148: note = Cas Enzyme sequence
MTNTLENIPGIRYRVGIDVGLRSIGFCAIEVDDEDHPIQILNSVVHVHDAGTGGPGETDSLRKRSGIAARARRRGRAQKKRLKRLDVLLEDLGWGVVSNEMLESHAPWHVRKRLLNEYITDDVERRQCLSTAAAHIARHRGWRNPYSKVDTLMLEHEPSDRMRGLKNRVEEQTGLCFSDQATQGELIATLLEHDKDVTVRGFVRKGGKATKELGVLQGKYMQYDLVAELRQICVKQKVSDEVFKQLVSTIFYSKEPQSDKKNQRKRVGIDELQLAVDPQAVELRAERAHPAFQKFKIVATLANMRIQEDGVGERALRPDELHAVTAYLLDESGVGIPAWEEVAGQLGVPRHRLRGASKASLETGGGLRYPPFDETTARVAESEIDWLVDWWMQADDESRGHMIDEISNGCGSETNDIEDEEVIELISSATAEDAAKLELLAKKLPSGRAAYSLKTLREVTSSILETGDDLSRVIERLYGVEPGWAPTPAPIEDPVGNPSVDRVVKQVARWLKFAEKRWGIPQAVNIEHTREGLKSASLLEEEKENRIKYEERREERLKKMYAQLGISGPFRRSEQTRYEILYLQDCACLYCGCKISFETFEIDHIIPRVDASSDSRRENLAAVCHSCNSAKGGMPFGQWAKLGDCPSGVSLKDALKRVGRWDKDRAGLTDKAMRKRKAEVKSRLKTETPYEEFDGRSMESVAWMAIELKRRIEGYFNSDRSKVCAAVQVNAYSGRLTACARRAAHVDKRVRLIRLKGDNDHHKNRFDRRNHAMDALVIALMTPAIARTIAVREDRREAQQLTHAFLSWKNFLGSEERMQERWESWIGDVEYACDRLNELIDANKIPVTENLRLRNSGKLHADQPESLKKARKGSKRSRPQRYVLGDALPVEVINRVTDPGLWTALVRAPEFDAETGLPANPARSLSLRGSRISADFPVSYFPTDSPALAVQGGYVGLEFHHARLYRIMGPKEKVTYALLRVCAIDLCGIERSNLFAVELKESSISMRTADPKLKEAMKEGTATQIGWLVLGDEIQIDPSKFPKQSIGKFLDECGPISSWRVSALNTPSKIALKPRLLSNEPLLKERNGARKSDLVVSECVEKIMKKTGWVVEINALLKSGSIRVIRRNALGEVRTSAKSGLPISLNLR

SEQ ID NO: 16832 - protein, 1138 aa, unidentified
  REGION 1..1138: note = Cas Enzyme sequence
MIDSSANVQGVRYRVGIDVGLKSIGFCAVEVDQHDQPIRLLNSMVFIHDAGVDPNENKAAKSRKLTAGVARRTRRLYRTRHQRLVNLDRLLSKEFGWPLPDLTSFKDPREPWHVRAGLLEGYIADEEKRKEALSIALRHIARHRGWRNPYAKVETLLQPSEPSDFLKGLNNRISEELGRAFPADATPGQLVDAYLAHPDYVGRAGTPKLRGPKGILAGKLHQSDNAQEIRRICDVQKIAPAERDRLIRVVFEAKSPKGSAKERGLVGYDELPGQGKHVRAEKAHPAFQKFRIVSVLANLRIREGRKERPLTPDELEDLVDFINQVSLKQEITWQDLADKLKIERSDLRGTAKASFDGSPVLRNPPTDVTTEKIMACKVKWLKEWWKEADDEQRGYMVDAFSNSGGSEDGTDVNDAVAELLEQATEDDQLEFEKISLPQGRAAYSLDSLRRLTARMLSEGVDLHTARRLEFKVSDDWKPAVEPIGAPTGNPAVDRVLKQVSRWLHAATERWGEPTVINIEHARDGLGSERVARELMRENEKRRKANASAVAEMAAKLKLSGKVHRSDQIRYFALQRQNCQCLYCGAPITYTTAEMDHIVPRADGSSTNDRSNLAAVCRTCNHMKGKIPFAVWASSDKANQGVSLTGALERVNMWQRDNGVSSKQFKQLQREVRARLKSKKPDQEFDGRSMESVAWMAVELRTRIEGFYRSRGEESVPSVGVYRGQLTAEARKASGFENRVNLIGGRGKTRFDRRHHAMDALVIALMNPSVSRTLALRLNMRDAQRLTGVEETWKNFYGKPGEASQRFESWRESMLSGVELFNIALSDNAIPFVENIRLRVGSSVIHDATVRSFCPPKTPDGKQIITKGYGEQHSLGSAMPVELIDRAETPALWTALTRCPDFDPKKGLPENPQRTISVNGTRVGPTELVNFFGSSAACLKVRGGYVELGSSIHHARIYRIDGKKTTYAMVRVFQVDLLRLKDRDLFTTPLKPSTISMRTAEPKIRKALADGTATQIGWLVEGDELVIDTSKYSNGFVGEALARYPEATSWRVAGFMNGTQLRLKPLLLSKEGFVDEKQAERLSVEPTSEAIKKTADSPGWLPATNVLFGSGQVRVIRRNCLGEERYHSSASLPVSMTLE

SEQ ID NO: 16833 - protein, 1148 aa, unidentified
  REGION 1..1148: note = Cas Enzyme sequence
MTTSSENIPSIRYRVGIDVGLRSIGFCAIEVDDEDHPIQILNSVVHVHDAGTGGPGETDSLRKRSGIAARARRRGRAQKKRLKRLDALLEDLGWGVVSNEMLESHAPWHVRKRLLNEYITDDVERRQCLSTAAAHIARHRGWRNPYSKVDTLMLEHEPSDRMRGLKNRVEEQTGLCFSDQATQGELIATLLEHDKDVTVRGFVRKGGKATKELGVLQGKYMQYDLVAELRQICVKQKVSDEVFKQLVSTIFYSKEPQSDKKNQRKRVGIDELQLAVDPQAVELRAERAHPAFQKFKIVATLANMRIQEDGVGERALRPDELHAVTAYLLDESGVGIPAWEEVAGQLGVPRHRLRGASKASLETGGGLRYPPFDETTARVAESEIDWLVDWWMQADDESRGHMIDEISNGCGSETNDIEDEEVIELISSATAEDAAKLELLAKKLPSGRAAYSLKTLREVTSSILETGDDLSRVIERLYGVEPGWAPTPAPIEDPVGNPSVDRVVKQVARWLKFAEKRWGIPQAVNIEHTREGLKSASLLEEEKENRIKFEERREERLKKMYAQLGISGPFRRSEQTRYEILYLQDCACLYCGCKIGFETFEIDHIIPRVDASSDSRRENLAAVCHSCNSAKGGMPFGQWAKLGDCPSGVSLKDALKRVGRWDKDRAGLTDKAMRKRKAEVKSRLKTETPYEEFDGRSMESVAWMAIELKRRIEGYFNSDRSKVCAAVQVNAYSGRLTACARRAAHVDKRVRLIRLKGDNDHHKNRFDRRNHAMDALVIALMTPAIARTIAVREDRREAQQLTHAFLSWKNFLGSEERMQERWESWIGDVEYACDRLNELIDANEIPVTENLRLRNSGKLHADQPESLKKARKGSKRSRPQRYVLGDALPVEVINRVTDPGLWTALVRAPEFDAETGLPANPARSLSIRGSRISADFPVSYFPTDSPALAVQGGYVGLEFHHARLYRIMGPKEKVTYALLRVCAIDLCGIERSNLFAVELKESRISMRTADPKLKEAMKEGTATQIGWLVLGDEIQIDPSKFPKQSIGKFLDECGPISSWRVSALNTPSKITLKPRLLSNEPLLKERNGARKSDLVVSECVEKIMKKTGWVVEINALLKSGSIRVIRRNALGEVRTSAKSGLPISLNLR

SEQ ID NO: 16834 - protein, 971 aa, unidentified
  REGION 1..971: note = Cas Enzyme sequence
VRPEESGVGLGRAFPADATPGQLVDAYLAHPDYVGRAGTPKLRGPKGILAGKLHQSDNAQEIRRICDVQKIAPAERDRLIRVVFEAKSPKGSAKERGLVGYDELPGQGKHVRAEKAHPAFQKFRIVSVLANLRIREGRKERPLTPDELEDLVDFINQVSLKQEITWQDLADKLKIERSDLRGTAKASFDGSPVLRNPPTDVTTEKIMACKVKWLKEWWKEADDEQRGYMVDAFSNSGGSEDGTDVNDAVAELLEQATEDDQLEFEKISLPQGRAAYSLDSLRRLTARMLSEGVDLHTARRLEFKVSDDWKPAVEPIGAPTGNPAVDRVLKQVSRWLHAATERWGEPTVINIEHARDGLGSERVARELMRENEKRRKANASAVAEMAAKLKLSGKVHRSDQIRYFALQRQNCQCLYCGAPITYTTAEMDHIVPRADGSSTNDRSNLAAVCRTCNHMKGKIPFAVWASSDKANQGVSLTGALERVNMWQRDNDVSSKQFKQLQREVRARLKSKKPDQEFDGRSMESVAWMAVELRTRIEGFYRSRGEESVPSVGVYRGQLTAEARKASGFENRVNLIGGRGKTRFDRRHHAMDALVIALMNPSVSRTLALRLNMRDAQRLTGVEETWKNFYGKPGEASQRFESWRESMLSGVELFNIALSDNAIPFVENIRLRVGSSVIHDATVRSFCPPKTPDGKQIITKGYGEQHSLGSAMPVELIDRAETPALWTALTRCPDFDPKKGLPENPQRTISVNGTRVGPTELVNFFGSSAACLKVRGGYVELGSSIHHARIYRIDGKKTTYAMVRVFQVDLLRLKDRDLFTTPLKPSTISMRTAEPKIRKALADGTATQIGWLVEGDELVIDTSKYSNGFVGEALARYPEATSWRVAGFMNGTQLRLKPLLLSKEGFVDEKQAERLSVEPTSEAIKKTADSPGWLPATNVLFGSGQVRVIRRNCLGEERYHSSASLPVSMTLE

SEQ ID NO: 16835 - protein, 1128 aa, unidentified
  REGION 1..1128: note = Cas Enzyme sequence
MIDSSENVPGIRYRVGIDVGLKSIGFCAVEVDRNDQPVRMLNSMVFIHDAGVDPNENKAAKSRKLTAGVARRTRRLYRTRHQRLVNLDRVLSKEFGWPLPDLTSFKDPREPWHVRAGLLEGYIADDEKRKEALSIALRHIARHRGWRNPYAKVETLLQPSEPSDFLKGLNERISTALRTTFPAEATPGQLIDAYLAHPDYVKEPGTPKVRGPEGILAGKLHQSDNAQEIRRICDVQRIEPAERDRLIRVVFEAKSPKGSAKERGLVGYDELPGQGRHVRAEKAHPAFQLFRMVSVLANLRIREGREERPLTPDELQGLVDFINQVSLKQEITWQDLADNLGIERSDLRGTAKASFDGSPVLRNPPTDVTTEKIMACKVKWLKEWWKEADDEQRGYMVDAFSNSGGSEDGTDVNDEVAELLEQATEDDQLEFEKISLPQGRAAYSLDSLRRLTARMLSEGVDLHTARRLEFKVSDDWKPAVEPIGAPTGNPAVDRVLKQVSRWLHAATERWGEPTVINIEHARDGLGSERVARELMRENEKRRKANASAVAEMAAKLKLSGKVHRSDQIRYFALQRQNCQCLYCGAPITYTTAEMDHIVPRADGSSTNDRSNLAAVCRTCNHMKGKIPFAVWASSDKANQGVSLTGALERVNMWQRDNGMSPRQLKQLQREVCARLKSKKPDQEFDGRSMESVAWMAVELRTRIEGFYRSRDEESVPSVGVYRGQLTAEARKASGFESRVNLIGGRGKTRFDRRHHAMDALVIALMNPSVSRTLALRLNMRDAQRLTGDEETWKHFYGKPGEASKRFESWRESMLSGVELFNIALSDNAIPFVENIRLRVGSSVIHDATVRSFCPPKTPDGKQIITKGRGEQHALGSAMPVDLIDRAETPALWTALTRCPDFDPKKGLPENPQRTISVNGTRVGPTELVNFFGSSAACLKVRGGYVELGNSIHHARIYRIDGKKNTYAMVRVFQVDLLRLKDRDLFTTPLKPSTISMRTAEPKIRKALADGTATQIGWLVEGDELRLESDKYTGGFVGDVLASYPQVTSWRVAGFPDPAKLRLRPYLLAGEGLDGEASKAMKDLLEGQGWRPSVNVVFSPGSAVLVRRNCLGQERRNSGGTLPNSSELR

SEQ ID NO: 16836 - protein, 1147 aa, unidentified
  REGION 1..1147: note = Cas Enzyme sequence
MVTSSENIPGIRYRVGIDVGLRSIGFCAIEVDDEDHPIQILNSVVHVHDAGTGGPGETDSLRKRSGIAARARRRGRAQKKRLKRLDALLEDLGWGVVSNEMLESHAPWHVRKRLLSEYITDEVERRQCLSIAAAHIARHRGWRNPYSKVDTLMLEHEPSDRMRGLKNRVEEQTGLCFSDQATQGELIATLLEHDKDVTVRGFVRKGGKATKELGVLQGKYMQYDLVAELRQICVKQKVSDEVFKQLVSTIFYSKAPQADKKNQRKRVGIDELQLAVDPQAEELRAERAHPTFQKFKIVATLANMRIQEDGVGERALRPDELRSVTAYLLDESGVGIPAWEEVAGQLGVPRHRLRGASKASLETGGGLRYPPFDETTARVAESEIDWLVDWWIQADDESRGHMIDEISNGCGSETNDIEDEEVIELISSATAEDVVKLERLAKKLPAGRAAYSLKTLREVTSSILETGDDLSRVIERLYGVEPGWAPTPAPIEDPVGNPSVDRVVKQVARWLKFAEKRWGIPQVVNIEHTREGLKSASLLEEEKENRIIYEERREERLKKMYAKLGISGPFRRSEQTRYEILYLQDCACLYCGCEIGFETFEIDHIIPRVDASSDSRRENLAAVCHNCNTAKGGMPFGQWVKLNDCPNGVSLEEAIKRVKIWDKNRVGLTEKAMRKRKDEVISRLKVEKPYEEFDGRSMESVAWMAIELKKRIEGHFNLDCAAGSVVKVNAYSGRLTACARRAAHVDKRVRLIRLKGDNGHHKNRFDRRNHAMDALVIALMTPPIARTIAVREDRREAQQLTHAFESWKNFLGSEERMQERWESWIGDVEFACDRLNELIDANKIPVTENLRLRNSGKLHADQPESLKKARKGSKRSRPQRYVLGDALPVEIINRVTDPGLWTALVRAPEFDDQLGLPADPARGLSLRGSRISADFPINYFPTDSPALAVQGGYVGLEFHHARLYRIMGPKEKVTYALLRICAIDLCGIDRSNLFSVELKESSISMRTADPKLKEAMKEGNATQIGWLVLGDEIQIDPSKFPKQSIGKFLDECGPISSWRVSALNTPSKITLKPRLLSNEPLLKDRHGGRKTDLVASECVDKIMKKTGWVVEINALLKSGSIRVIRRNALGEVRTSPKSGLPISLDLR

SEQ ID NO: 16837 - protein, 1138 aa, unidentified
  REGION 1..1138: note = Cas Enzyme sequence
MIDSSANIQGVRYRIGIDVGLKSVGFCAVEVDQRDQPIRLLNSMVFIHDAGVDPNENKAAKSRKLTAGVARRTRRLYRTRHQRLVNLDRVLSKEFGWPLPDFSSFKDPREPWHVRAGLLDGYIADDEKRKEALSIALRHMARHRGWRNPYAKVETLLQPSDPSDFLKGLNERIGTALRRSFPEDATPGQLIDAYLAHPDYVGRAGTPKLRGPEGILAGKLHQSDNAQEIRRICDVQQIGPADRDRLIRVVFEAKSPKGSAKERGLVGYDELPGQGKHVRAEKAHPAFQLFRMVSVLANLRIREGREERPLSPDELQGLVDFIDQVSLKQEVTWQDLADNLGIERSDLRGTAKASFDGSPVLRNPPTDVTTEKIMACKVKWLKEWWKDADDEQRGYFVDAFSNSGGSEDGTDVNDEVAELLEQATEEDQLEFEKISLPQGRASYSLDSLRRLTCRMLSEGVDLHTARRLEFKVGDDWKPAVEPIGAPTGNPAVDRVLKQVSRWLHAATERWGEPTVINIEHARDGLGSERVARELMRENERRRKANASAVAEMAAKLKLSGKVHRSDQIRYFALQRQNCQCLYCGVPITYTTAEMDHIVPRADGSSTNDRSNLAAVCRTCNHMKGKIPFAVWASSDKANQGVSVTGALERVNMWQRDNGMLPKQFKQLQREVSARLKSRKPDEDFDGRSMESVAWMAVELRARIEGFYRSRDEESVPSVGVYRGQLTAEARKASGFESRVNLIGGRGKTRFDRRHHAMDALVIALMNPSVSRTLALRLNMRDAQRLTGVEETWKNFYGKPGEASQRFESWRESMLRGVELFNIALSDNAIPFVENIRLRVGSSVIHDATVHSFCPPKTPDGKQIITKGYGEQHALGSALPVELIDRAETPALWTALTRCPDFDSKKGLPENPQRTISVNGTRVGPKDLLNFFGSSAACLKVRGGYVELGSSIHHARIYRIDGKKTAYAMVRVFQVDLMRMKHQDVFTTPLKPSAISMRTAEPKIRKALADGTATQIGWLVEGDELAIDTSKYSGGFVGEVLARYPEVTSWRVAGFMTPAKLRIKPILLSKEGFVDEAQAALLRVEPTSEAIQKTVDSPGWLPAVNVLFGAGGVRVIRRNCLGEERYRSSTSLPISMTLE

SEQ ID NO: 16838 - protein, 1128 aa, unidentified
  REGION 1..1128: note = Cas Enzyme sequence
MIDSSANIQGVRYRVGIDVGLKSVGFCAVEVDQRDQPIRLLNSMVFIHDAGVDPNENKAAKSRKLTAGVARRTRRLYRTRHQRLVNLDRVLSKEFGWPLPDFSSFKDPREPWHVRAGLLDGYIADDEKRKEALSIALRHMARHRGWRNPYAKVETLLQPSEPSDFLKGLNERIGIALRRSFPEDATPGQLIDAYLAHPDYVGRAGTPKLRGPEGILAGKLHQSDNAQEIRRICDVQQIGPADRDRLIRVVFEAKSPKGSAKERGLVGYDELPGQGKHVRAEKAHPAFQLFRMVSVLANLRIREGREERPLSPHELQGLVDFIDQVSLKQEVTWQDLADNLGIERSDLRGTAKASFDGSPVLRNPPTDVTTEKIMACKVKWLKEWWKDADDEQRGYMVDAFSNSGGSEDGTDVNDEVAELLEQATEEDQLEFEKISLPQGRASYSLDSLRRLTCRMLSEGVDLHTARRLEFKVGDDWKPAVEPIGAPTGNPAVDRVLKQVSRWLHAATERWGEPTVINIEHARDGLGSERVARELMRENERRRKANASAVAEMAAKLKLSGKVHRSDQIRYFALQRQNCQCLYCGVPITYTTAEMDHIVPRADGSSTNDRSNLAAVCRTCNHMKGKIPFAVWASSDKANQGVSVTGALERVNMWQRDNGMSPKQFKQLQREVSARLKSRKPDEDFDGRSMESVAWMAVELRARIEGFYRSRDEESVPSVGVYRGQLTAEARKASGFENRVNLIGGRGKTRFDRRHHAMDALVIALMNPSVSRTLALRLNMRDAQRLTGVEETWKNFYGKPGEASQRFESWRESMLRGVELFNIALSDNAIPFVENIRLRVGSSVIHDATVHSFCPPKTPDGKQIITKGYGEQHALGSALPVELIDRAETPALWTALTRCPDFDSKKGLPENPQRTISVNGTRVGPKDLLNFFGSSAACLKVRGGYVELGSSIHHARIYRIDGKKTAYAMVRVFQVDLMRMKHQDVFTTPLKPSAISMRTAEPKIRKALEDGTATQIGWLVEGDELAIDTSKYSGGFIGEVLARYPEAMSWRVAGFPTPAKLRLRPYLLSAEGLEKDADKAMKDLLEGNGWRPSVNVVFSSGTVKIVRRNCLAEPRYSSQASLPTSSVVE

SEQ ID NO: 16839 - protein, 1142 aa, unidentified
  REGION 1..1142: note = Cas Enzyme sequence
MIDSSANIQGVRYRIGIDVGLKSVGFCAVEVDQRDQPIRLLNSMVFIHDAGVDPNENKAAKSRKLTAGVARRTRRLYRTRHQRLVNLDRVLSKEFGWPLPDFSSFKDPREPWHVRAGLLDGYIADDEKRKEALSIALRHMARHRGWRNPYAKVETLLQPSEPSDFLKGLNERIGTALRRSFPEDATPGQLIDAYLAHPDYVGRAGTPKLRGPEGILAGKLHQSDNAQEIRRICDVQQIGPADRDRLIRVVFEAKSPKGSAKERGLVGYDELPGQGKHVRAEKAHPAFQLFRMVSVLANLRIREGREERPLSPHELQGLVDFIDQVSLKQEVTWQDLADNLGIERSDLRGTAKASFDGSPVLRNPPTDVTTEKIMACKVKWLKEWWKDADDEQRGYMVDAFSNSGGSEDGTDVNDEVAELLEQATEEDQLEFEKISLPQGRAAYSLDSLRRLTRRMLSEGVDLHTARRLEFKVGDDWKPAVEPIGAPTGNPAVDRVLKQVSRWLHAATERWGEPTVINIEHARDGLGSERVARELMRENERRRKANASAVAEMAAKLKLSGKVHRSDQIRYFALQRQNCQCLYCGVPITYTTAEMDHIVPRADGSSTNDRSNLAAVCRTCNHKKGKIPFAVWAASDKANEGVSLTGALDRVAMWERDNGMSPKQFKQLQREVKARLKSRKPDEEFDGRSMESVAWMAVELRTRIEGFYRSRNEEFVPSVGVYRGQLTAEARKASGFESRVNLIGGRGKTRFDRRHHAMDALVIALMNPSVSRTLALRLNMRDAQRLTGAEETWKSFYGKPGEASQRFESWRESMLRGVELFNIALSDNAIPFVENIRLRVGSSVIHDATVHSFCPPKTPDGKQIITKGYGEQHTLGSALPAELIDRAETPALWTALTRCPDFDPKKGLPEDPQRTISVNGTRVGPTELVNFFEFSKSGPKACLKVRGGYVDLSGAIHHARIYRIAGKKTAYAMVRVFQVDLLRHKDQDVFTTPLKPSSISMRTAEPKIREALADGTATQIGWLVEGDELVIDTSKYSGGFIGEVLARYPEATSWRVSGFKTPSKLRVKPLLLSKEGFVDENEAAKFGVEATTEAVQKTVDDPGWLPAVNVLFGAGGVRVIRRNCLGEERYRSSASLPVSMMLE

SEQ ID NO: 16840 - protein, 1132 aa, unidentified
  REGION 1..1132: note = Cas Enzyme sequence
MIDSSENVPGIRYRVGIDVGLKSIGFCAVEVDRNDQPVRMLNSMVFIHDAGVDPNENKAAKSRKLTAGVARRTRRLYRTRHQRLVNLDRVLSKEFGWPLPDLTSFKDPREPWHVRAGLLEGYIADDEKRKEALSIALRHMARHRGWRNPYAKVETLLQPSEPSDFLKGLNERISTALRTTFSAEATPGQLIDAYLAHPDYVGRAGTPKLRGPQGILAGKLHQSDNAQEIRRICDVQRIEPAERDRLIRVVFEAKSPKGSAKERGLVGYDELPGQGRHVRAEKAHPAFQLFRMVSVLANLRIREGREERPLTPDELEDLVDFINQVSLKQEITWQDLADNLGIERSDLRGTAKASFDGSPVLRNPPTDVTTEKIMACKVKWLKEWWKEADDEQRGYMVDAFSNSGGSEDGTDVNDEVAELLEQATEDDQLEFEKISLPQGRAAYSLDSLRRLTARMLSEGVDLHTARRLEFKVSDDWKPVVEPIGAPTGNPAVDRVLKQVSRWLHAATERWGEPTVINIEHARDGLGSERVARELMRENEKRRKANASAVAEMAAKLKLSGKVHRSDQIRYFALQRQNCQCLYCGAPITYTTAEMDHIVPRADGSSTNDRSNLAAVCRTCNHMKGKIPFAVWASSDKANQGVSLTGALERVNMWQRDNGMSPRQLKQLQREVCARLKSKKPDQEFDGRSMESVAWMAVELRTRIEGFYRSRDEESVPSVGVYRGQLTAEARKASGFESRVNLIGGRGKTRFDRRHHAMDALVIALMNPSVSRTLALRLNMRDAQRLTGVEETWKHFYGKPGEASKRFESWRESMLRGVELFNIALSDNAIPFVENIRLRVGSSVIHDATVHSFCPPKTPDGKQIITKGYGEQHVLGSAMPVDLIDRAETPALWTALTRCPDFDPKEGLPENPQRTISVNGTRVGPTELVNFFEFSNEGIKACLKVRGGYVDLSGAIHHARIYRIDGKKTTYAMVRVFQVDLLRFKDQDVFTTPLKPSTISMRCADPKLRRALEGRFATQIGWLVRGDELVVETDVYREGKIAQIMERYPELKHWKVAGFPEAKKIKMRPYLLSKEGLDDDEQGPIRTVLDVKGWITTIHKLLGAGGVRVIRRNCLGEKRYRSSASLPVSMTLE

SEQ ID NO: 16841 - protein, 1147 aa, unidentified
  REGION 1..1147: note = Cas Enzyme sequence
MVTSSENIPGIRYRVGIDVGLRSIGFCAIEVDDEDHPIQILNSVVHVHDAGTGGPGETDSLRKRSGIAARARRRGRAQKKRLKRLDALLEDLGWGVVSNEMLESHAPWHVRKRLLSEYITDEVERRQCLSIAAAHIARHRGWRNPYSKVDTLMLEHEPSDRMRGLKNRVEEQTGLCFSDQATQGELIATLLEHDKDVTVRGFVRKGGKATKELGVLQGKYMQYDLVAELRQICVKQKVSDEVFKQLVSTIFYSKAPQADKKNQRKRVGIDELQLAVDPQAEELRAERAHPTFQKFKIVATLANMRIQEDGVGERALRPDELRSVTAYLLDESGVGIPAWEEVAGQLGVPRHRLRGASKASLETGGGLRYPPFDETTARVAESEIDWLVDWWIQADDESRGHMIDEISNGCGSETNDIEDEEVIELISSATAEDVVKLERLAKKLPAGRAAYSLKTLREVTSSILETGDDLSRVIERLYGVEPGWAPTPAPIEDPVGNPSVDRVVKQVARWLKFAEKRWGIPQVVNIEHTREGLKSASLLEEEKENRIIYEERREERLKKMYAKLGISGPFRRSEQTRYEILYLQDCACLYCGCEIGFETFEIDHIIPRVDASSDSRRENLAAVCHNCNTAKGGMPFGQWVKLNDCPNGVSLEEAIKRVKIWDKNRVGLTEKAMRKRKDEVISRLKVEKPYEEFDGRSMESVAWMAIELKKRIEGHFNLDCAAGSVVKVNAYSGRLTACARRAAHVDKRVRLIRLKGDNGHHKNRFDRRNHAMDALVIALMTPAIARTIAVREDRREAQQLTHAFESWKNFLGSEERMQERWESWIGDVEFACDRLNELIDANKIPVTENLRLRNSGKLHADQPESLKKARKGSKRSRPQRYVLGDALPVEIINRVTDPGLWTALVRAPEFDDQLGLPADPARGLSLRGSRISADFPINYFPTDSPALAVQGGYVGLEFHHARLYRIMGPKEKVTYALLRICAIDLCGIDRSNLFSVELKESSISMRTADPKLKEAMKEGNATQIGWLVLGDEIQIDPSKFPKQSIGKFLDECGPISSWRVSALNTPSKITLKPRLLSNEPLLKDRHGGRKTDLVASECVDKIMKKTGWVVEINALLKSGSIRVIRRNALGEVRTSPKSGLPISLDLR

SEQ ID NO: 16842 - protein, 951 aa, unidentified
  REGION 1..951: note = Cas Enzyme sequence
MLDALINLGFFPTLEANRKALEAIDPYFLRAKGLDEALTPGEFARALFHINQRRGFKSNRKADSGDSDTGAMKSAISGLRSDIQDKGLRTVGELLNKRRIEGLPLRARYLSQTVQESSGRNKTEKWYTLYIDRQMIENEFEALWQAQAALNPVLFSQSSHDRLKNILLHQRPLKPVPTGRCSIFPDQQRAPRALPSAQQQRILQELNNLRFIDSQGASHALSIDQRNLIFEALNSVAKLTFEKMRTLLKHDASWTVNLADEKRDHLKGNETSAILGHKDRGFGPTWFSFDLEKQDQIVSRLVDEQDEAVLVNWLMDETGIDEELATTIANAKLPDGYGSLSAKAIALILPELKSKVITFAEVKHQLKLGEFATVTSKNEDGSKFKASSTTGEIVEKLTLLPYYGETLQAHVGFGTGDPEDTPEVRFGKIANPTVHVGLNQVRVVVNELIKRYGQPAEIIVELARDLKQTKKQRDDESAQQAKNQKNRERIRKEISAHLGISETAVRGRDIEKYILWEELGSSAADRQCPYSGQQISVAMVLSEATEIDHILPYSRTLDDSKANKVLVTSVANKIKTNRTPFEAKSDFERKGWDWDDIQARVASWKWEVRKAKQAKFREDSMETWLGRSDTFLARALNDTRYLSRIARIYLSDVATESCRVIPGRMTALLRAKLGLNDILSSDSLKNRSDHRHHAIDGVVVAITDQGMLQRFSEASSRAEEKHLNNLVDTIQAPWPNFYESVKASIDKIVVSHKPDHGYQGSMHNDTAYSMRPDGKVAHHKNVDGKRVNVFETLKVIPFSSTSNPNRHGTNPDGSPRAYKAYKGDSNYCIEIYADESGKWRSEVITTFQAYQIVREHGEERLRDRTLTASGKPLVMRLMRDDVVELQIDGVKTLCRLQSMVSDGRMAFSHLNEANVDARNRVGEYSFINKSAGSLQKARARLRTINPIGFKH

SEQ ID NO: 16843 - protein, 1020 aa, unidentified
  REGION 1..1020: note = Cas Enzyme sequence
MSSQSYTLGIDLGVNSLGVAVVNAEDRKILYTGARIFSPGFEGDFESGKEESRAAQRRKARQQRRQTDRRRRRMVNIFRLLQTFGLLPDGERETVLPKLDDELRRKYPDTEILPYFLRAKGLDEALTREELGRALYHLAQRRGFRGRASQEQDDEEGGKLKEGIEGLWREIADSGKRTLGAHLATLNPHETRIRDKRTHRRMYQEEFEALWAAQAPHHPGVLIEERRALLHRAFFHQRPRKPMDKFVGMCDLEPGEKRAPLFLPQVQHYRVLTHVNNLQIVEPTGNIRRLDDRERALLVDASRIKEKLPYKTILRNILGLPENTRFSIEEAGEKNLPVNLTSQRLYRVAGNQWTEMTPEQQADLASDLADPNRHATDEDLLACLKEKWKFDSELATKLLAVKLPAGYGSLSLKAIEKVTPLLDAGMHFAAAKKQLWPEKFEEKVPLPFLPPVAVALPEIRNPAVMRSLTEFRKAVNAVIRRWGPPSSIHIELARDLKRNRHDRIQLSKKNRDLERRRKEAQHELSQYCGPNPSRRDVEKYLLWRECNGQCPYSGNQIGLGALFGEYPLYDVEHIIPHERSLDDSFQNKTLCEASLNRSKGKRTPWEAFGHTDMWPAMVERVRGFRNTAKLKRFTMQATGTAKLLEEFTTRQLNDTRYASKLAARYAGLLFGIDRADNRRVITCAGQVTAILRRLWDMNRILNEKPEKSRDDHRHHAVDALAVALCSPAQVKALSDAASRALAEGHRRFGSLADPWDGFREQAKQSVLAGPVSHRPKRKLRGALHEETLYTAPRRENGQSKVRYRKAVDALTATEIENISDKTIQKIVEQAWEGVGRDATRLKDNWPKLRTRMGREIPIKRVRCTKVQKVQTIAEHDPRRRRHVTPGGNHHMEVVAILNAPAGEPKKWEHYTVSRLEAMERYKAGVKIVQRDHGPGKRFCFTLSEGDLVAARRSAGEGEKIWYVRSVRANGSLELSPGTDSRLKQDIKAAGALWDVALNTLMNRGARKVRVDLLGEIIECH

SEQ ID NO: 16844 - protein, 1138 aa, unidentified
  REGION 1..1138: note = Cas Enzyme sequence
MIDSSENVPGIRYRVGIDVGLKSIGFCAVEVDRNDQPVRMLNSMVFIHDAGVDPNENKAAKSRKLTAGVARRTRRLYRTRHQRLVNLDRVLSKEFGWPLPDLTSFKDPREPWHVRARLLDGYIPDEGKRKEALSIALRHIARHRGWRNPYAKVETLLQPSEPSDFLKGLNERISTALRTTFSAEATPGQLIDAYLAHPDYVGRAGTPKLRGPQGILAGKLHQSDNAQEIRRICDVQRIEPAERDRLIRVVFEAKSPKGSAKERGLVGYDELPGQGRHVRAEKAHPAFQLFRMVSVLANLRIREGREERPLTPDELQGLVDFINQVSLKQEITWQDLADNLGIERSDLRGTAKASFDGSPVLRNPPTDVTTEKIMACKVKWLKEWWKEADDEQRGYMVDAFSNSGGSEDGTDVNDEVAELLEQATEDDQLEFEKISLPQGRAAYSLDSLRRLTDRMLRDGVDLHTARRLEFNVGDDWKPAVEPIGAPTGNPAVDRVLRQVSRWLHAATERWGEPTVINIEHARDGLGSERVARELMRENEKRRKANASAVAEMAAKLKLSGKVHRSDQIRYFALQRQNCQCLYCGAPITYTTAEMDHIVPRADGSSTNDRSNLAAVCRTCNHMKGKIPFAVWASSDKANQGVSLTGALERVNMWQRDNGMSPRQLKQLQREVCARLKSKKPDQEFDGRSMESVAWMAVELRTRIEGFYRLRDEESVPSVGVYRGQLTAEARKASGFESRVNLIGGRGKTRFDRRHHAMDALVIALMNPSVSRTLALRLNMRDAQRLTGVEETWKHFYGKPGEASKRFESWRESMLRGVELFNIALSDNAIPFVENIRLRVGSSVIHDATVRSFCPPKTPDGKQTITKGRGEQHALGSAMPVELIDRAETPALWTALTRCPDFDPKKGLPENPQRTISVNGTRVGPTELVNFFGSSAACLKVRGGYVELGSSIHHARIYRIDGKKNTYAMVRVFQVDLLRLKDRDLFTTPLKPSTISMRTAEPKIRKALADGTATQIGWLVEGDELVIDTSKYSNGFVGEVLARYPEATSWRVAGFMNGTQLRLKPLLLSKEGFVDEKQAERLSVEPTSEAIKKTADSPGWLPAANVLFGSGQVRVIRRNCLGEERYRSSASLPVSMMLE

SEQ ID NO: 16845 - protein, 1138 aa, unidentified
  REGION 1..1138: note = Cas Enzyme sequence
MIDSSENVPGIRYRVGIDVGLKSIGFCAVEVDRNDQPVRMLNSMVFIHDAGVDPNENKAAKSRKLTAGVARRTRRLYRTRHQRLVNLDRVLSKEFGWPLPDLTSFKDPREPWHVRAGLLEGYIADDEKRKEALSIALRHMARHRGWRNPYAKVETLLQPSEPSDFLKGLNERISTALRTTFSAEATPGQLIDAYLAHPDYVGRAGTPKLRGPQGILAGKLHQSDNAQEIRRICDVQRIEPAERDRLIRVVFEAKSPKGSAKERGLVGYDELPGQGRHVRAEKAHPAFQLFRMVSVLANLRIREGREERPLTPDELEDLVDFINQVSLKQEVTWQDLADNLGIERSDLRGTAKASFDGSPVLRNPPTDVTTEKIMACKVKWLKEWWKEADDEQRGYMVDAFSNSGGSEDGTDVNDEVAELLEQATEDDQLEFEKISLPQGRAAYSLDSLRRLTDRMLRDGVDLHTARRLEFNVGDDWKPAVEPIGAPTGNPAVDRVLKQVSRWLHAATERWGEPTVINIEHARDGLGSERVARELMRENEKRRKANASAVAEMAAKLKLSGKVHRSDQIRYFALQRQNCQCLYCGAPITYTTAEMDHIVPRADGSSTNDRSNLAAVCRTCNHMKGKIPFAVWASSDKANQGVSLTGALERVNMWQRDNGMSPRQLKQLQREVCARLKSKKPDQEFDGRSMESVAWMAVELRTRIEGFYRSRDEESVPSVGVYRGQLTAEARKASGFESRVNLIGGRGKTRFDRRHHAMDALVIALMNPSVSRTLALRLNMRDAQRLTGVEETWKHFYGKPGEASKRFESWRESMLRGVELFNIALSDNAIPFVENIRLRVGSSVIYDATVRSFCPPKTPDGKQTITKGRGEQHALGSAMPVELIDRAETPALWTALTRCPDFDPKKGLPENPQRTISVNGTRVGPTELVNFFGSSAACLKVRGGYVELGSSIHHARIYRIDGKKNTYAMVRVFQVDLLRLKDRDLFTTPLKPSTISMRTAEPKIRKALADGTATQIGWLVEGDELVIDTSKYSNGFVGEVLARYPEATSWRVAGFMNGTQLRLKPLLLSKEGFVDEKQAERLSVEPTSEAIKKTADSPGWLPAANVLFGSGQVRVIRRNCLGEERYRSSASLPVSMMLE

SEQ ID NO: 16846 - protein, 1133 aa, unidentified
  REGION 1..1133: note = Cas Enzyme sequence
ENVPGIRYRVGIDVGLKSIGFCAVEVDRNDQPVRMLNSMVFIHDAGVDPNENKAAKSRKLTAGVARRTRRLYRTRHQRLVNLDRVLSKEFGWPLPDLTSFEDPREPWHVRAGLLEGYIADDEKRKEALSIALRHIARHRGWRNPYAKVETLLQPSEPSDFLKGLNERISTALRTTFPAEATPGQLIDAYLAHPDYVGRAGTPKLRGPQGILAGKLHQSDNAQEIRRICGVQRIEPAERDRLIRVVFEAKSPKGSAKERGLVGYDELPGQGRHVRAEKAHPAFQLFRMVSVLANLRIREGREERPLTPDELQGLVDFINQVSLKQEITWQDLADNLGIERSDLRGTAKASFDGSPVLRNPPTDVTTEKIMACKVKWLKEWWKEADDEQRGYMVDAFSNSGGSEDGTDVNDEVAELLKQATEDDQLEFEKISLPQGRAAYSLDSLRRLTDRMLRDGVDLHTARRLEFNVGDDWKPAVEPIGAPTGNPAVARRLTQVSRWLHAATERWGEPTVINIEHARDGLGSERVARELMRENEKRRKANASAVAEMAAKLKLSGKVHRSDQIRYFALQRQNCQCLYCGAPITYTTAEMDHIVPRADGSSTNDRSNLAAVCRTCNHMKGKIPFAVWASSDKANQGVSLTGALERVNMWQRDNGMSPRQLKQLQREVCARLKSKKPDQEFDGRSMESVAWMAVELRTRIEGFYRSRDEESVPSVGVYRGQLTAEARKASGFESRVNLIGGRGKTRFDRRHHAMDALVIALMNPSVSRTLALRLNMRDAQRLTGVEETWKHFYGKPGEASKRFESWRESMLRGVELFNIALSDNAIPFVENIRLRVGSSVIHDATVRSFCPPKTPDGKQTITKGRGEQHALGSAMPVELIDRAETPALWTALTRCPDFDPKKGLPENPQRTISVNGTRVGPTELVNFFGSSAACLKVRGGYVELGSSIHHARIYRIDGKKNTYAMVRVFQVDLLRLKDRDLFTTPLKPSTISMRTAEPKIRKALADGTATQIGWLVEGDELVIDTSKYSNGFVGEVLARYPEATSWRVAGFMNGTQLRLKPLLLSKEGFVDEKQAERLSVEPTSEAIKKTADSPGWLPAANVLFGSGQVRVIRRNCLGEERYRSSASLPVSMMLE

SEQ ID NO: 16847 - protein, 1363 aa, unidentified
  REGION 1..1363: note = Cas Enzyme sequence
MANNNKEKYYLGLDMGTGSIGWAVTDKNYEIIKKHGKALWGIRLFESANTAEERRKYRTDRRRRERSKNRLALLQEIFAEEISKKDPGFFQRMKESKYYPEDKRDLNGNIPPLPYTLFADEEFTDADFHQKFHTIYHLRNALMKQPENKPDIRLLYLALHHIIKHRGHFLFEGKKISEVTDFSNTVKVLTECAEENDIMIALDSTQINKFENIMQNKDISRTEKKKQISELIMENNMKSTKENTKQIKALAGLLAGCSTKLSDLFADKSLDEEEHSTISFSDNNYEESISSIELILADRFLLILAAKAIFDWSVLNDILGSSTCLSEAKIQIYEKHKKDLENLKKLLKTESSVYRQVFGVPESEKTTNYSSYIGMVRKNGKKQPIAKKCSKEDFYAFLKKILNNFSCSDEKKPIMEEILTEMEKGTLLPKQVIRDNGVIPYQLHERELNKILENASRYYPFLNEKDADGYSAIEKIQSIFHFRIPYYVGPINTYHSKLGGNSWAIRRDVTGKIYPWNFSEKIDEEKSAEKFVLRMTNKCTYLIGEDVLPKESLLYAKYSVLNELNNLRIDGELASVEVKQKIYNDVFKHSRNVTGKKVKDYLVREGIIEKRQELSGFDQNFKSSLKAYHDFKQIVGEISLSEAEKEDIIKDITLFADSQRMLKKRLRLKYPALSDKQISQLAEKKYSGWGRLSRKFLEEIESVNTETGEIFNIITALWETNDNLMQLLSKKYNFAKSIENQNSQNTSEGAITYEDVENLYVSPAVKRPIWQTLKIVNEIEHIMGCAPERIFVEMAREPGQKGERKISRRTALQQLYRSCQKEVPELYNSLSQSRDDNAFRSDKLYLYYAQMGRCMYSNEVIDFNDLFTNRYDIDHIYPQSKVMDDSMDNRVLVKRELNSNKSDAFPVPLDYVNNAKDLWQTLLQKKLITKEKYHRLTRREGFDDNELAGFIARQLVETRQSTKAVTQLLKKAYPETEIVYAKAAAVSSFRQKFDFIKVRDINDYHHAKDAYLNIVVGNTYFVKFTKNAAWFVKNNPGRTYNLKKMFEQETVKNNNETAWISGEAGTIRTVKKWMKKNNILFTRRAYEGTGELFDQQILKKGKGQVPIKNTASDTRLASIEKYGAYNKASGAYFILIQSEDKKGHLIWSMKHVPIYLAKNLESSPENMLQYCEEEFGLKKPAILIPKIKMDSLFEVDGFRMHLSGRSGKQLIFKNANQLAVSDAAQRTLKKAAKYCADYKINKNAIISDKTQLNEQDLQEVYKEFQHKLQDTIYGKRLGTQLQTLEKGKEKFDSLTREEKCLILNEILHLFQCQSTTANLTLIGGPGHAGILLLNNDISKLEHISIINQSITGFYEQAIDLKAL

SEQ ID NO: 16848 - protein, 983 aa, unidentified
  REGION 1..983: note = Cas Enzyme sequence
IPNVNFDILDNVYELRVKGLTQKLTNLELANVLVNLAKRRGSSLDVAVDENDNESVVAASALTKNTAELKKNNLYICQAQLAKIKSGVKLRNHDNIYKSDDYEKELRQILSNQDLSNELNDKIVEIIMRRRNFSEGPGSYEFPTKYGSYRVDYVDGIKTIKHVNLIEEMRGKCSIFRNEPRIAKCSFEACLFNLLNDLNNLTINGNGKITKEQKLQIINDYVIPKGKITIPQLVKYLGVEEKDITGFRKNKSEKNIITTFDTYSKMINFLPKDILNVTAYVDSIIELLTKTAVVEERIEEIKKLNLGLNDDIINQLANMTKVNGYHSLSKKAMDIIIPEMIETDKNQMQIIHDNNLDKNDCQEKGSKIKFDSSAILSPVAKRVHMQAIQVVNELRKEYGEFDSIVIETTRAKNSSDEKKDIQEDQKRLEEQKRKSDELLIDLDKNPDNYNTLTKLKLRLYKEQEGKTIYAGLPIDLDLLLNDPTAYQIEHIIPYAVSFDNSMNNKSLASAKENQDKGKRTPWQYFSSGMVSECEGPINDWESFEAFVNSLKISKNKKNNLLNQEDVTKYDNMKAFVARNLSDTSYCVRTVMNTMQQYFNDNNINTNVFTVKGRLTNIFRSRVGLKKDRDYFIHHAVDALIIAGSKNQSVFNNAYLLSSTKDGILIKKTGEVFDYSQDPFDDPRFLNYISSLKKIEGKPEDFSYKVDKKTNRQFADQTIYSTRNYDGVDYVVKKYKDIYGKDGESLKKLFDDKKEQTLLMARNDIQTFELFKKIYENYKNEKNPFAKYKDEFGPIKKYCKDGKGPEIYQVKYISDKLGNHLDISDKYNVENGNKKVVLLQISPYRTDVYQSKETGLYNFITIRRYHIYQENDMNIIKPELYQKLLSDKKIDETYEFKFSLNRNDIINLVTIDNQADHIDEMLYRFIGTNNDKTNKIEIRYIEKMTLKQIMVSIGKKIVKFEKYNVSPTGKKAKAEKEVLKLKWK

SEQ ID NO: 16849 - protein, 1199 aa, unidentified
  REGION 1..1199: note = Cas Enzyme sequence
MENTNKKYVLGLDIGISSVGWGLIELNENNEPYKIKDTGVRIFSPGENVKTGESKNIARREKRGTRRILRRRKFRINRIRYLLAEYNFLKKSNKNVISDIYEDLKEQYNILIDNYYKEKDINPFELKTEALNRKLSNEELAIILVHYAKHRGYKSNRDEDNDDSGKVKSSIKENEKIMHEKNYRTISEMFALDEKFNDRIHNTTGDYRMSVNREMVLNDIENVLNCQIKFGLIDEKFKEEYIKIWSSQRHYSKGPGGNSKYGGNLIEKMTGICKYTGEPRAPKQAPSTEIFNALTLMVNLRYKSNENYEKLTEEEINKILELALTKDSVTYKNLKEILDKETLTIKGLELSKKEWIDCLNNFKVKILKLGKNDEVNLNELTKEEQEKFEKIKQEKLFSKKFVELKTTSAFRKEFSRAFGKNIWEKLLDNIEILDEIAVILTNYKTEEDIIEQVENSEIIDNNLIECILHLPNLKDHNNLSLSLIRNLNKLMKTGMLYNEAMSELGYNFSDLTINKEKFDILLPINSENEISNQRVIRSLAQTRKIINAIIKKYGMPYKINIETARELAKSLDERKKIKRNQEENKENNDKIKKELCELLPNKFQNENKVSSFDLLKYKLWKEQQNICPYSLEKITIEELYDNGIVQVDHILPYSRTFDDSYFNKTLVKAKENQIKGNRTPYEWFKSDRERWENYPMYKSYINSLNIPDKKKDNYLLTNLTQEIENEMRNQNLNDTKYITRYLTSFLKAYLNVPLVDSVNGTITSKLRTRWGLNNITHSLQSPSYYIKDVDIENDIKKNRENHLHHAMDACIIACSNKSIIQKITNYEKYKRYFENKVDVSIESLLKNNYIYKSEETDDYIDEETGEIIKTESLEEYYKDLIDNNYLVKNNKNRYTVLFPQPYENFTNELKAKIFERNESQQKFMLEGLHTYTEDELKEVAPLIPVFAKNKVKGSLHGETLYGYKKENDNEFITKRASVISKSFKQDDLENIINKDNGSKEVYETLKEWLSNYDNGEEAYKNSGYPKDKTEKIIKKVKLQLLYEGKGHNINNKIVDKENIQKILVFKDIETNTLYFCGLDRFDILNLKKNKDYEITLWKSQGVSLKESYNKLNTKYTKLLELAKNDFVEIEKNNGNKCYCYINGFTDGKLDIKSYIGDNYDIVGNNKLFNKFYSGGQYQISTTSIKNIIKIKLNTLGKIE

SEQ ID NO: 16850 - protein, 1146 aa, unidentified
  REGION 1..1146: note = Cas Enzyme sequence
MSTTYSLPAACSAELAKWQTHPFYTSAIVLGLDVGLEGIGVCVRRGREILYAKTWLYDVPAAARLEGRRQLRGARHCRANRKTRLHRLRLLFAKHGLPWLADDSPALRNSDPFILRHRAVESANGLASREALSIAIRHCVSHRGHDYEYFSDEGAYPWGDATDFKKVIKELETLWLTKEEAEEANRDAEFFEWKEDEVLAFREVITKRIAGPELIARHLAAHAKGSKNHVRKRAKGEAFPRKLVRAHLDQIITRHEHLITDADAFRVTLFRENKTTADREESIFYYHRKTKKEMMAHFEKKRARCPYAPWLGLGDHPTDSRGKLEIRRWSLLEFAMMRDVEVQAKTKKGTVPHRWRVPVGAELVKQLLDWQAAHPDCRKASDATEIKGALITAIETAHSAKVAPEGGANGSELNKHFFSVLRDLLAPSMANRTKNAPMSCAAAARLFFIATAGGFEREAVRACLENCQPGAEIVSLYNFRRQPMADLYGVYPQVEFLLGQRVKKAKTHPKQGTPKGRGDLAVKGKLQLLFDNLFGAGKAAPEYCVVEVARDLPRNRKQKQERQDLIDANRERRDKLIEKYREHLPKDGTLTGSMRRRIELHDQQGGICPFTAEPLGPNPLGDDLDVEHLFPESLGGLTVDENLVLTFARVNRGEKKNRTPRDYAAAAGKSFDAMLANTTAMRWGKFKREVFAWEDAAKIPEFGNTTRVAQLARQLTAEAARWMRCTDADKQAERIGNPTGFQTAACRRAWGLVEKDRADLTHHLVDAIILAHIPPRAGQNYVQSGGIFQPKLDTQKKRMVLDVLAVGPDPVAVTRLSAHEAAECPVLKHRSTSNTRSMHDMTLLRVLPDGSLAYRKEMPDKATLDPHRLRAMLVNMGIPASYRDRDGKEWPLIPSNDALGNWLDTEGPEPLRLLNGTPVRNFWKAGGKGSLEDDPTGFHADWNAQGKLMGVKAILGRWESLELWRGWNVNKKRWEYFKRLIPSRGVFNGLRSLGYSWKKKNKRPWREGAPEITRPLKHELGGVLPEFARPAVHPDTKEKVVFRTGDVFRVGLKHDGKLTLRGEAAAHSFAWVAIKAVMAGTMSGNGPGRLELVSMFTKGMEPGSPSNGDDLAFLAGLPPADDSSSYPTQRPPGPPRPVGEAPFGLA

SEQ ID NO: 16851 - protein, 1020 aa, unidentified
  REGION 1..1020: note = Cas Enzyme sequence
  REGION 1016..1019: note = misc_feature - Xaa can be any naturally occurring amino acid
MGKDYYVGMDAGTGSLGWSVTNETYEIQRSHGKALWGVRLFDAAETAEERRGFRTNRRRLDRRNWRLELLQEIFAEKINQVDDGFFLRMKESRYLPEDKRGKDGNCPELPYAIFADHDYTDKNYHKQFPTIYHLRKWLMETSDTPDIRLVYLAMHHLVKHRGHFLFSGNIDEIREFHTAFDAFLALVRGEELGFERTFDENCYQETERILKDEHLTRSMKKSHLVKCLDAGTAAEKELIGAISGCTVKLSSIFVDGELDACARPKFSFSDISYDEYAGELQDILGEQYVIIESAKAVYDWAILADVLGSYRSISEAKTALYEKHKKDLQYLKKLVKKHLSTEAYKEIFVRSSEKKSNYPAYVGMTKKNGKKVPIQGKQCSQGELYVYLKKSVIDQIADENAAQYLRDEIEHGTFLPKLVSKENSVIPYQIHLYELNRILENLQDRIPLLKQEGEHIRQIFAFRIPYYVGPLNGVRKDGKETNWVCRRQEGKIYPWNFSEIIDTEASAERFIRRMTNKCTYLPAEDVLPKNSLLYGKFMVLDELNNLRLNGEPISVELKQAIYQDVFKRYRKVTQKKLLAYLIREGIAGRETDITGIDGDFKSSLTAYHDFKEKLSGIELSPSEKETIILNITLFGEDKKLLQKRLEKLFPDMTEKQRIAVSNLSYKGWGRLSGKFLEGITAPDPETGEVWTIIRTMWETNDNLMQVLSSKYQFAEAIERENDTDEKKEISYWLIENLMVSPAVRRQIWQMLLVLKELCKVQGAPPKRIFIEMAREKADSGRTRSRKKMLIDLYKKCKSEERDWINELEQTEDSRLRSDRLYLYYTQNGRCMYSGDPIELKDLWDNTKYDIDHIYPQSKVMDDSLDNRVLVKRVYNGEKEDRYPIEKSIRDARHGFWKSLLDKGFISREKYKRLTRTTEFEEAELTGFIARQLVETRQGTKAAASILKQVFPDTDIVYVKAPVVSRFRQDFKFIKVREMNDLHHAKDAYLNIVVGNTYFVKFTKDAGWFVRKNPGRXXXXI

SEQ ID NO: 16852 - protein, 1417 aa, unidentified
  REGION 1..1417: note = Cas Enzyme sequence
MKHKYIIGIDPGVGSLGISLRNTERNALLEQIEVTNVDIVRSGVVKNGEGKYVSFAAERRGFRNTRTMYRHRKRRKQETLKLLINEDVVLDENIKHVLCPLSKEELDKWVRYDKNKGYKREYPTDSVEFSHWMMLDFNNDGKVDDYSSPFQIRKELVERQFDFSQKEDCYKLGRALYHIAQRRGFKSNKGNINDSDEISISDSQDDDFDSLEYSEKKKSKTLTAYMNQLQEKGHERVTVGFALACLENVGIRLRDSEYQAIRKQLKDEITTIFKFQKQLSLNSTLYKRLVSEKRNEGTIFYQRPINSQKGNVESCTLEPRKKRCQVSHPEFEKYRAWSFINNIRIKLLADSEPQMLPYELRMKLFDKITGTVSKTIDFIGIRKLIEKEVGEPLSANEGTINFKDDYSLSGCPTIGRLRKILGDDWETKTIEIEQTRRRNKNQEVKDLHTISYGAIDLWHICTTMENETAMTAFLENKMPFDEEQKKEMMRLYRNASSDYANFSVYALQRINRFLISGCNNYEATILAKIPDIIGKEQWEQYGKEIEKDIQNLITQNREEKRYLAIANQLIADYKSQDEDDRDHNYEYQLTELDWRDVENKIKESIGKVTWTNIPTEEQNAIKLRVGELYQQFFKSYKRDYYKLPNDTERIQSYLSERFSLDLQKVQQIYTPSSNKYYPPAHRVKGVFQLGSPAKSALRNPSAMRILYLLRRRINELMTRYRDMEPDNTRIVVELPRELNDANMRRAIELYQERRKKENNIFKEMIGEVLDVNEEERVEKTRLLIEQSPEYLKADFEEGFQKHKEPNSYTRNVYNDTIEYATTKYRLWLEQGCVDIYTGHTIPFSHLFDANMYDIEHTIPRSIVLEDSLENKTITSAFFNRKVKGNLLPSQLPNYNDVILPNLQPWKDRVERLNERVRYWLRETKRAADPDRKNYCIVQRHLWQMELNYWSSKLNRFLMTEVKTDFVNKQMSDTRVISKYVYHYLKSCFSSVDVQYGCTNAVFRKILGIQAKDEEKDRSVHTHHAIDATVLTFIPSSSKRCEMMRLFFQIDEAKKAGNIMEEKRLKKQLEEEKNLCLYGRTNKRQSDKNLAALVRDIQESTFVNHSERDQALTPAKRRGVFRKNGTTYNVLKTGDCIRGKLHKEKFFGAITQWEKDADGLVVRDAMGQHVVDTSNVKYVIRVKLQYKQGRGEGFKSWEELKARMIDKSLYRKLEEQHPNETFVEACKNGFFTMRKIHGEFVRNRIRHVRCEISDNQGHISIKQHLNRSKKDYKRFYYAAPADLLCACEYKGVKEQKYEMMRLFDISQNRKDGKEDIPTSLQGKKEILHLVRVIRMGDMVILYKDSPNELDGLDKKQLSKRLYRVDGFEKSGRIILVKHDKTKEDGKGKAYGDFEERISQSIIRMSITKIKFVPLINHR

SEQ ID NO: 16853 - protein, 1417 aa, unidentified
  REGION 1..1417: note = Cas Enzyme sequence
MKHKYIIGIDPGVGSLGISLRNTERNALLEQIEVTNVDIVRSGVVKNGEGKYVSFAAERRGFRNTRTLYRHRKRRKQETLKLLINEDVVLDENIKHVLCPLSKEELDKWVRYDNNKGYKREYPTDSVEFSHWMMLDFNNDGKVDDYSSPFQIRKELVERQFDFSQKEDCYKLGRALYHIAQRRGFKSSKGSINDSDVISLGDNQDDDFDSLEYSEKKKSKTLTAYMNQLQEKGHERVTVGFALACLENDGVRLRDSEYQAIRTQLKEEITTIFKFQKQLSLNSTLYKRLVSEKKNDGTIFYQCPIKSQKGNVESCTLEPRKKRCQVSHPEFEKYRAWSFINNIRIKLLADSEPQMLPYELRMKLFDKITGTVSKTIDFIGIRKLIEKEVGEPLSANEGTINFKDDYSLSGCPTIGRLRKILGDDWETKTIEIEQTRRRNKNQEVKDLHTISYGAIDLWHICTTMENETAMTAFLEKKMPFDEEQNKEMMRLYKNVSNDYANYSVYALQKINRFLISGCNNYEATLLAKIPDIIGKTQWKQYGKDIETDIQNLIAQNREEKRYLAIANQLIADYKSQDEDDRDHNYEYQLTELDWRDVENKIKESIGKVTWTNIPTEEQNAIKLRVGELYQQFFKSYKRDYYKLPNDTERIQSYLSERISLNLQKVQQIYTPSSNKYYPPAHRVKGVFQLGSPAKIALRNPSAMRILYLLRRRINELMTRYRDMEPDNTRIVVELPRELNDANMRRAIELYQERRKKENNIFKNMVGEVLDEKEEERVEKTRLLIEQAPEYLNADFDERYQKHKEVNSYNRNSYNDTIEYATTKYRLWLEQGCIDIYTGHTIPFSHLFDANMYDIEHTIPRSIVLEDSLENKTITSAFFNQKVKGTLLPSQLPNYNDVIVPNLQPWKERVERLDERVRYWLRETKRAADSDRKNYCIVQRHLWQMELNYWSSKLNRFLMTEVKTDFVNKQMSDTRVISKYVYHYLKSCFSSVDVQYGCTNAVFRKILGIQAKDEEKDRSVHTHHAIDATVLTFIPSSSKRCEMMRLFFQIDEAKKAGNIMEEKRLKKQLEEEKNLCLYGRTNKKHSDKNLANLVRDIQETTFVNHSERDQALTPAKRRGVFRKNGTTYNVLKTGDCIRGKLHKEKFFGAITQWEKDADGLVVRDAMGQHVVDTSNVKYVIRVKLQYKQGRGEGFKSWEELKARMIDKSLYRKLEEQHPNETFVEACKNGFFTMRKIHGEFVRNRIRHVRCEISDNQGHISIKQHLNRSKKDYKRFYYAAPADLLCACEYRGVKEQKYEMMRLFDISQNRKDGKEDIPTSLQGKKEILHLVRVIRMGDMVILYKDSPNELDGLDKKQLSKRLYRVDGFEKSGRIILVKHDKTKEDGKGKSCSDFEDRISQNIIRMSITKVKFVPLINHR

SEQ ID NO: 16854 - protein, 1417 aa, unidentified; identical to SEQ ID NO: 16852
  REGION 1..1417: note = Cas Enzyme sequence

SEQ ID NO: 16855 - protein, 1077 aa, unidentified
  REGION 1..1077: note = Cas Enzyme sequence
MNTAYGIGLDIGIASVGWAVVALNEDAEPYGLIRCGSRVFDKAEQPKTGDSLAASRREARSTRRRLRRRSLRKADLYALMEKSGLPGRAAVEETVLAGHLPDIYALRAQALDGPVTAMDFARILLHLMQRRGFRSNRKADDAQKDGKLLQAIDANTQRMEDNHYRTVGEMMYRDTAFATHKRNKTENYLSTVRRDQIASEAAQLFAAQRQYGAAWASPETEAEYLTILTRQRSFDEGPGGNSPYGGNMIEKMVGTCTLEGTAEPRAAKATWSFEYFTLLQKLNHIRIEEGGNSHPLTHAQRQELLTLCYQTDKLDFARIRKVLDLPPQARFNMVRYRADQPADACEKKEKITALPCYHKMRKALNTLRKDYILTVGHDRLDAAATALTLYKSEDLLREKLQQADFEPLEINALLTLPSFSKFGHISVKACRKLIPYLEQGENYNDACREAGYDFQGSGHGEKSILLPAEAEEFSDITSPVVRRAVAQTIKVVNAIIREQGESPVSIHLELAREMSKSFQERADLENAMKENNADNERLMRDLHELFPGRNISGQDLVKYRLWKEQDGRCAYSLQPLELQSVITVSGYAEVDHIVPYSISFDDRRTNKVLVLASENRQKGNRLPLQYLQGTRRDNFIVYTKNNVKNYRKRQNLLKENLSAEDSSGFMQRNLQDTQYIASFMLNYIRGHLAFAAHPMAGKKRVVAVNGAVTSFLRKRWGIAKVRADGDLHHAVDAAVIACTTDGMIQRVSRFYQRAELSHARGERFPEPWPRFRDELMQRLSSCPQENLLTINPVYYTTADIAGIKPVFVSRMPRHKATGPAHKETIKGRLDDTYVTQRRSITDLKLNKDGEIDGYFNPSSDTLLYNALKDRLVAFGGNGKKAFAEPFFKPRADGTPGAQVRKVKLYSKVTSTVPVHGGNGVADNDTMVRVDVYYIPGDGYYWVPIYVADTVKPILPNRAVVAHKRCSEWKEMSEENFLFSLCKNDLVCIESKRPIKLKAANEDSTLEKELTVQRVLAYFEGGNISTGAVSVTTHDNAYIADGLGFKTLQKVEKYQVDVLGNYTHVKKEKRQLFPAQRR

SEQ ID NO: 16856 - protein, 1394 aa, unidentified
  REGION 1..1394: note = Cas Enzyme sequence
MKSKKYSIGLDIGTNSVGWSVITDDYKVPSKKMKVLGDTDKHFVKKNLIGALLFDEGTTAEGRRLKRIARRRNTRRKNRLRYLQEIFSEEMSKVDSSFFHRLDDSFLVPEDKRGSKYPIFATLSEEKEYHKQFPTIYHLRKQLADSKEKADLRLIYLALAHIIKYRGHFLYEDTFDIKNNDIQKIFNEFLSIYDNTFEGNSLSGQNAQVEAIFTDKISKSAKRDRVLKLFPDKKSTGLFSEFLKLIVGNQADFKKHFDLEEKAPLQFSKDTYDEDLENLLGQIGDGFADLFLVAKKLYDAILLSGILTVTDPSTKAPLSASMIERYESHQKDLATLKQFIKDNLPEKYDEVFSDQSKDGYAGYIDGKTTQEAFYKYIKNLLSKFEGADYFLDKIEREDFLRKQRTFDNGSIPHQIHFQEMNAILRRQGEHYPFLKENREKIEKILTFRIPYYIGPLARGNRDFAWLTRNSDQAIRPWNFAEIVDQASSAEAFINKMTNYDLYLPEEKVLPKHSLLYETFAVYNELTKVKFIAEGLTRYQFLDKKQKKDIFDTFFKAENKRKVTEKDIIHYLHNVDGYDGIELKGIEKQFNASLSTYHDLLKIIKDKAFMDDAKNEVILENIVHTLTIFEDREMIKQHLAQYASIFDEKVIKALTRRHYTGWGKLSAKLINGICDKETGNTILDYLIDDGEINRNFMQLINDDGLSFKEIITKAQVVGKTDDVKQVVQELPGSPAIKKGILQSIKIVDELVKVMGHAPESIVIEMARENQTTVRGKKNSQQRYKRIEDSLKILASGLDSNILKENPTDNVQLQNDRLFLYYLQNGKDIYTGEALDINQLSSYDIDHIIPQAFIKDDSIDNRVLTSSKDNRGKSDNVPSLEVVQKRKAFWQQLLDSKLISERKFNNLTKAERGGLDERDKVGFIRRQLVETRQITKHVAQILDARFNTKVNEKKQKIRTVKIITLKSNLVSNFRKEFRLYKVREINDYHHAHDAYLNAVVAKAILKKYPKLEPEFVYGDYQKYDLKRYISSSKDPKEIEKATEKYFFYSNLLNFFKEEVHYADGTILKRENIEYSKDTGEIAWNKEKDFAIVKKVLSLPQVNIVKKTEIQTHGLDRGKPKGLFNSNPSPKPSEDSKENLVPIKQGLDPRKYGGYAGISNSYAVLVKAIIEKGAKKQQKTVLEFQGISILDKINFEKNKENYLLEKGYIKILSTITLPKYSLFEFPDGTRRRLASILSTNNKRGEIHKGNELVISEKYTTLLYHAKNINKTLEPEHLEYVEKHRNDFAKLLEYVLDFNDKYVGALKNGERIRQAFIDWETVDIEKLCFSFIGPRNSKNAGLFELTSQGSASDFEFLGVKIPRYRDYTPSSLLNATLIHQSITGLYETRIDLSKLGED

SEQ ID NO: 16857 - protein, 1363 aa, unidentified
  REGION 1..1363: note = Cas Enzyme sequence
MIKGDYYLGLDLGTNSVGWAVTDLEYNLLRAKGKDLWGVRLFDEAQTAANRRSKRIARRRIERDKARKALLKEFFADEIEKIDPAFYMKMNESFFKLKDRSVENQQPYSLFNDFDFTDKEFHDKYKTIFHLRSDLIHSDKIFDVRLVFLAIYNMFSHRGHFLNATLDAEKNDTGFKNAYAEMIEVLEEHEFGIPSNIEVDAIEEILSDNKSSRTNHFEQLLALFNIIKKDKRNCAVLKLLAGLSINLKDIYNQELDKESDKKFGFRESNYEEVIEEVYNIVDEDYKNIIEKIKMVHDAGLLSKIMIGCEYLSDARVKIHDMHKKDLKQLKALLKKYNKGAYEKLFRTIESGTYSAYVGSVNSHGKIERRQGKERGKDVLYKSIEKAIKDIPDNDKDKIEIKAKIDAEIFLEKQLTNKNGVIPNQVHSRELRAILNNAEKYLSFLSKVDSTGYSIKEKIIQLFEFQIPYYVGPLGREFNGKKGYNCWAVRKESGRVFPWNFDEKIDKNASAEEFIKRMVRKCTYFNDENTLPKNSLIYEKFMVLNEINAIRVNGCRLDTETKQAIYNDLFTSGKKVNKKKIKEYLVSINKMDNESEISGIDTDWSKNLTSIAKFKGVFDGKIETNKEIIEDIIFWSTIYSGDKKLIRSKIETVYPNILNENQLKKILGFRFTGWGNLSRHFLEGIMGKDKNGTAENSIIGFLWNEQVTLQELLSQNYTFREIIDEQFLGIEKPLSSWKIEDLDDFYLSPSVKRMTWQTMKIVEELQRVLGKSPKRIFVEMTRSDGKKERTVSRKNKLISLYKSLGKEGKEFINEIDGKDENFFNRRKVYLYYLQMGKCMYSEEVIDFHKLLNDNLYDIEHIYPQHYIKDDSIENNLVLVKKELNAGKQDKPLTSEIQADRYTFWRMLKDKGFISSEKFTRLTRKNDSFTEDELTGFINRQIVETSQASKAITQILQQSMDENCKIVFSKAKLISEFRQKFDLPKSRIVNDLHHANDAYLNIVVGNAYYVKFTGNPYKFIKNAIKNKELNESKYHISDFYKNDIYNKNEVAWRSEKKEYPTIVTVKKMINKLTPIITRKVEVEHGEYFKETLNSHLESKKGIYIGQKTHDSVLSNVEEYGGKTKIKIQGYALIEYKKGNDTIRMFKAIPWLVGNIKNIDEHKLIAYIIDDLQTEDVNTDIKDLRICKKFISKNSLIKMNGAYYYLGGKTGNRIEFKNAMQFKIPLDRIEYIHKLEKANAKNNYYEVDRLHNMVITNEKNIDLYKFIVEKLRIKPFCKSRKTGLADIFNDLFDTFKTTDISNQCIIIERILRNIKNSDAINLGPIGGGSSQGKTFVMARIDKCTELKLIQQSVTGLFKSETDLLKI

SEQ ID NO: 16858 - protein, 1376 aa, unidentified
  REGION 1..1376: note = Cas Enzyme sequence
MSDFDKYKDQICTHKGFKRGNYFIGFDIGTNSVGWAVTNEKYELLKFKSHKMWGSRLFAEAQTAVDTRMKRSAHRRLQRRKFRLLLLEELFAKAINAADDTFFLRLHESKYHVEDKTNLVKYTLFMDKDYTDIDYYKEFPTIYHLRHHLMTSGTKDIRLLFLGIHHILKYRGNFLYGRKEFSIDGKMYSVLRYTLEELGFGSYVEDASVLQSIANLVLDRGIVRGEKVKQIEPLITQGKKLSSVEKNRLKAWAYLIMGLKANLVNLFTDEDIEVILPEEKEFKSINLHEGIYEDVRDAYEDAWGDRFAIVDQCKVLHDIIVISSIIKPGQSLSEAKIESYNQHKEDLVLLKSVLKEDKKLYDDMFVVDIDKGTNYVKYIKQGVNGNTSTTQEAFYKYVRKVVSVLPETENTRCIVQKLEEGTFLPLQRISKNGVVPYQLHKEELVRILEKAKLNFPFLNEVEDGLTVADKIISILEFKIPYYVGPLNPTHSIENGGFAWVVRKEAGQVLPWNFEQKVDVQASAVKFIENLTNKCTYLIDQDVLPKYSLLYAEFSLLNELNNIRVNDKPLPADVKQAFIRDHFMSLQDSKTATKKVVAKYLVDNNYVSQPPIITGMDQQIATKLTSHRDMTRILGEHFDYAMAEDIIRYITIFGESKDMLRQVLKNYYGDRLTTEQIKKLGKLTYTGWGRLSKKFLSDIWGMKKNDDDAEAGTIIEHMREGQENLMQLLSSSYSFIDVVQEYVTNVLGEKEKTAFEMLEDLSLSPMVKRSVWQTLRILDEIVSIRKELPKKIFVEVARTNKADKKRTQSRKALLEELYEQIKDEDIHVLQQELESKEDSALNSKKLYLYFTQMGRCMYSGRRIDIHELFTDKYDIDHIYPRSLTKDDSWHNIVLVEKQLNAEKTDRFPILSAIQSKQKGFWKLLWDRGFISEKKYDRLVRTTDLTDEELNQFINRQMVSTNQSVKAVTTLLHQLYPETEVVFSKAENVSDFRHDYDFVKVRSINHHHHAKDAYLNIVVGNVYHEKFTKNFLSFAKQKGTHRTYNLTKMFEYEIKLTEESKKVIWDPNIHMEIVKKMMKSNDVRVTQRAVPQKGGLSDETIYKKGIAKRGVYLPLKSSDERVRDVEKYGGRTSITISEYIILNIRDTSDQDRIEIFSLPLYVAGKKDIHKAIEEVYLSTCKKPTSVVDIQILYRGLYIGSKVNINGFTYYMGGKTGSNVSIDSAVDVVMDITSSVYIKLLEKVAIKKIENPKTFHIENIKTSYNHKEVTVSKEQNIALYQELLKKLDTPLFSKMKGNKLEEFRTVGFDTFIALSLEDQASVLLEVLNVLTNFKTKRDITKIGMTSSRSTLGINISNTEQFSVITTSITGLYEHEIKIK

SEQ ID NO: 16859 - protein, 1452 aa, unidentified
  REGION 1..1452: note = Cas Enzyme sequence
MKNILGLDLGTNSIGWSLIQQDFDNKMGKILGLGTRIIPMSQDIIGDFDKGNSVSQTAERTRLRSARRLRERFLLRRERLHRVLNILGFLPEHYASQIDFEHQLGKFKEDAEPKLAYHANGFLFKKSFEEMLNDFQLHQPKILIDEKGEKKLVPYDWTIYYLRKKALTQKILKEELAWILLNFNQKRGYYQLRGEEEEESSNKLVEFHSLKVVDVVPDEFKKSKTDQWYSLILENGWVYRRSSKTPLYDWKDKVRNFIVTTELNEDGNIKTDKDGNEKRSFRAPSEDDWTLIKKKTEQEIDKSDKTVGEFIYENLLKSPKQKIRGKLVRTIERKYYKDELRKILLAQREFHPELMKSELYNECLRELYRNNSAHQFQLSKRDFLHLFIDDIIFYQRPLRSQKSLLSNCPLELRKYKNANGVEQIQNLKVIAKSNPYYQEFRIWQWMLNLSIYKREDESNVTAVFLTGKEDWENLFDFLSNRKEIDQKSLIKYFIEQKGLKGRALTAEVEKYRWNYVEDKKYPCNETRALISSRLVKVMNLPAGLLTAEVEYQIWHIIYSVTDKTEYQKALNTFAEKIGLDKVSFSDAFGKIPPFKSDYGAYSEKAIKKLLPLMRLGKYWSWDAIDERTKARIDKLLTGEFDETIKKCVREKAIHLTEHHHFQGLQLWIAQYVIYDRHAEAANADKWNSADDLEQYLKGFKQHSLRNPIVEQVVTETLRVVKDIWLKYGQGRKDFFDEIHIELGREMKKTREERERDTKRNVENENTNLRIKALLAELKNDSAIQNVRPYSPVQQEILKIYEEGVLNTTTDITDDILKISKMPQPSSAELKRYKLWLEQKYRSPYTGAIIPLKKLFTPEYEIEHIIPQSRYFDDSLSNKVICEAAVNKLKDNQLALEFIKNHHGEKVQNGLITVKILEVKDYEDYIKNHYAGNRVKRNKLLLEDIPEEMIERQLNDTRYISKFISSLLSNIVRAETNDDGVNSKNLIPGNGKVTNELKLDWGLNDVWNDLILPRFERMNQLTNSTQFTVWNENFQKYLPTVPFELAKGFSKKRIDHRHHAMDALVIACATRDHINLLNNKYAKSKERYDLNRKLRKFEKVVYKHPKSGERIEREIPRDFLKPWPDFTVEARIELEKIVVSFKQNLRVINKATNYFEKWVERNGTKVKELHEQKGMNWAIRKSLHKDTVSGEIKLDWVKVPKGKILTATRKVIDSSFDLKRIETITDTGIQKILKNYLASKGNNPELAFSPEGLEDMNNNISKYNDGKPHQPIYKARIFELGSKFPLGQIGNKRTKYVEADKGTNLFFAIYQDKNGKRSFETIPLNIVIERQKQGLDTIPSENDKAHKLMFDLSPNDLVYLPTKEEMIDPRSIDLKSPGSNKVSRIYKMVSCTGSECHFVRADIASLIKNYDPKTKIGELGSLNKQETTIDSAQRIKESCIKLKIDRLGNLSLA

SEQ ID NO: 16860 - protein, 1312 aa, unidentified
  REGION 1..1312: note = Cas Enzyme sequence
VQNGFLGITVSSEQVGWAVTNPKYELERASRKDLWGVRLFDKAETAEDRRMFRTNRRLNQRKKNRIHYLRDIFHEEVNQKDPNFFQQLDESNFCEDDRTVEFNFDTNLYKNQFPTVYHLRKYLMETKDKPDIRLVYLAFSKFMKNRGHFLYKGNLGEVMDFENSMKGFCESLEKFNIDFPTLSDEQVKEVRDILCDHKIAKTVKKKNIITITKVKSKTAKAWIGLFCGCSVPVKVLFQDIDEEIVTDPEKISFEDASYDDYIANIEKGVGIYYEAIVSAKMLFDWSILNEILGDHQLLSDAMIAEYNKHHDDLKRLQKIIKGTGSRELYQDIFINDVSGNYVCYVGHAKTMSSADQKQFYTFLKNRLKNVNGISSEDAEWIDTEIKNGTLLPKQTKRDNSVIPHQLQLREFELILDNMQEMYPFLKENREKLLKIFNFVIPYYVGPLKGVVRKGESTNWMVPKKDGVIHPWNFDEMVDKEASAECFISRMTGNCSYLFNEKVLPKNSLLYETFEVLNELNPLKINGEPISVELKQRIYEQLFLTGKKVTKKSLTKYLIKNGYDKDIELSGIDNEFHSNLKSHIDFEDYDNLSDEEVEQIILRITVFEDKQLLKDYLNREFVKLSDDERKQICSLSYKGWGNLSEMLLNGITVTDSNGVEVSVMDMLWNTNLNLMQILSKKYGYKAEIEHYNKEHEKTIYNREDLMDYLNIPPAQRRKVNQLITIVKSLKKTYGVPNKIFFKISREHQDDPKRTSSRKEQLKYLYKSLKSEDEKHLMKELDELNDHELSNDKVYLYFLQKGRCIYSGKKLNLSRLRKSNYQNDIDYIYPLSAVNDRSMNNKVLTGIQENRADKYTYFPVDSEIQKKMKGFWMELVLQGFMTKEKYFRLSRENDFSKSELVSFIEREISDNQQSGRMIASVLQYYFPESKIVFVKEKLISSFKRDFHLISSYGHNHLQAAKDAYITIVVGNVYHTKFTMDPAIYFKNHKRKDYDLNRLFLENISRDGQIAWESGPYGSIQTVRKEYAQNHIAVTKRVVEVKGGLFKQMPLKKGHGEYPLKTNDPRFGNIAQYGGYTNVTGSYFVLVESMEKGKKRISLEYVPVYFHERLEDDPGHKLLKEYLVDHRKLNHPKILLAKVRKNSLLKIDGFYYRLNGRSGNALILTNAVELIMDDWQTKTANKISGYMKRRAIDKKARVYQNEFHIQELEQLYDFYLDKLENGVYKNRKNNQAELIHNEKEQFMELKTEDQCVLLTEIKKLFVCSPMQADLTLIGGSKHTGMIAMSSNVTKADFAVIAEDPLGLRNKVIYSHKGEK

SEQ ID NO: 16861 - protein, 1312 aa, unidentified
  REGION 1..1312: note = Cas Enzyme sequence
VQNGFLGITVSSEQVGWAVTNPKYELERASRKDLWGVRLFDKAETAEDRRMFRTNRRLNQRKKNRIHYLRDIFHEEVNQKDPNFFQQLDESNFCEDDRTVEFNFDTNLYKNQFPTVYHLRKYLMETKDKPDIRLVYLAFSKFMKNRGHFLYKGNLGEVMDFENSMKGFCESLEKFNIDFPTLSDEQVKEVRDILCDHKIAKTVKKKNIITITKVKSKTAKAWIGLFCGCSVPVKVLFQDIDEEIVTDPEKISFEDASYDDYIANIEKGVGIYYEAIVSAKMLFDWSILNEILGDHQLLSDAMIAEYNKHHDDLKRLQKIIKGTGSRELYQDIFINDVSGNYVCYVGHAKTMSSADQKQFYTFLKNRLKNVNGISSEDAEWIDTEIKNGTLLPKQTKRDNSVIPHQLQLREFELILDNMQEMYPFLKENREKLLKIFNFVIPYYVGPLKGVVRKGESTNWMVPKKDGVIHPWNFDEMVDKEASAECFISRMTGNCSYLFNEKVLPKNSLLYETFEVLNELNPLKINGEPISVELKQRIYEQLFLTGKKVTKKSLTKYLIKNGYDKDIELSGIDNEFHSNLKSHIDFEDYDNLSDEEVEQIILRITVFEDKQLLKDYLNREFVKLSEDERKQICSLSYKGWGNLSEMLLNGITVTDSNGVEVSVMDMLWNTNLNLMQILSKKYGYKAEIERYNKEHEKNIYNREDLMDYLNIPPAQRRKVNQLITIVKSLKKRCGVPNKIFFKVSREHQDDPKRTSSRKEQLKYLYKSLKSEDEKHLMKELDELNGHELSNDKVYLYFLQKGRCIYSGKKLNLSRLRKSNYQNDIDYIYPLSAVNDRSMNNKVLTGIQENRVDKYTYFPVDPEIQKKMKGFWMELVLQGFMSKEKYFRLSRENDFSENELVSFIEREISDNQQSGRMIASVLQYYFPESKIVFVKEKLIPSFKRDFHLISSYGHNHLQAAKDAYITIVVGNVYHTKFTMDPAIYFKNHKRKDYDLNRLFLENISRDGQIAWESGPYGSIQTVRKEYAQNHIAVTKRVVEVKGGLFKQMPLKKGHGEYPLKTNDPRFGNIAQYGGYTNVTGSYFVLVESMEKGKKRISLEYVPVYLHERLEDDPGHKLLKEYLVDHRKLNHPKILLAKVRKNSLLKIDGFYYRLNGRSGNALILTNAVELIMDDWQTKTANKISGYMKRRAIDKKARVYQNEFHIQELEQLYDFYLDKLENGVYKNRKNNQAELIHNEKEQFMELKTEDQCVLLTEIKKLFVCSPMQADLTLIGGSKHTGMIAMSSNVTKADFAVIAEDPLGLRNKVIYSHKGEK

SEQ ID NO: 16862 - protein, 1312 aa, unidentified
  REGION 1..1312: note = Cas Enzyme sequence
VQNGFLGITVSSEQVGWAVTNPKYELERASRKDLWGVRLFDKAETAEDRRMFRTNRRLNQRKKNRIHYLRDIFHEEVNQKDPNFFQQLDESNFCEDDRTVEFNFDTNLYKNQFPTGYHLRKYLMETKDKPDIRLVYLAFSKFMKNRGHFLYKGNLGEVMDFENSMKGFCESLEKFNIDFPTLSDEQVKEVRDILCDHKIAKTVKKKNIITITKVKSKTAKAWIGLFCGCSVPVKVLFQDIDEEIVTDPEKISFEDASYDDYIANIEKGVGIYYEAIVSAKMLFDWSILNEILGDHQLLSDAMIAEYNKHHDDLKRLQKIIKGTGSRELYQDIFINDVSGNYVCYVGHAKTMSSADQKQFYTFLKNRLKNVNGISSEDAEWIDTEIKNGTLLPKQTKRDNSVIPHQLQLREFELILDNMQEMYPFLKENREKLLKIFNFVIPYYVGPLKGVVRKGESTNWMVPKKDGVIHPWNFDEMVDKEASAECFISRMTGNCSYLFNEKVLPKNSLLYETFEVLNELNPLKINGEPISVELKQRIYEQLFLTGKKVTKKSLTKYLIKNGYDKDIELSGIDNEFHSNLKSHIDFEDYDNLSDEEVERIILRITVFEDKQLLKDYLNREFVKLSEDERKQICSLSYKGWGNLSEMLLNGITVTDSNGVEVSVMDMLWNTNLNLMQILSKKYGYKAEIERYNKEHEKNIYNREDLMDYLNIPPAQRRKVNQLITIVKSLKKRCGVPNKIFFKVSREHQDDPKRTSSRKEQLKYLYKSLKSEDEKHLMKELDELNGHELSNDKVYLYFLQKGRCIYSGKKLNLSRLRKSNYQNDIDYIYPLSAVNDRSMNNKVLTGIQENRADKYTYFPVDPEIQKKMKGFWMELVLQGFMSKEKYFRLSRENDFSENELVSFIEREISDNQQSGRMIASVLQYYFPESKIVFVKEKLIPSFKRDFHLISSYGHNHLQAAKDAYITIVVGNVYHTKFTMDPAIYFKNHKRKDYDLNRLFLENISRDGQIAWESGPYGSIQTVRKEYAQNHIAVTKRVVEVKGGLFKQMPLKKGHGEYPLKTNDPRFGNIAQYGGYTNVTGSYFVLVESMEKGKKRISLEYVPVYLHERLEDDPGHKLLKEYLVDHRKLNHPKILLAKVRKNSLLKIDGFYYRLNGRSGNALILTNAVEVIMDDWQTKTANKISGYMKRRAIDKKARVYQNEFHIQELEQLYDFYLDKLENGVYKNRKNNQAELIHNEKEQFMELKTEDQCVLLTEIKKLFVCSPMQADLTLIGGSKHTGMIAMSSNVTKADFAVIAEDPLGLRNKVIYSHKGEK

SEQ ID NO: 16863 - protein, 1312 aa, unidentified
  REGION 1..1312: note = Cas Enzyme sequence
VQNGFLGITVSSEQVGWAVTNPKYELERASRKDLWGVRLFDKAETAEDRRMFRTNRRLNQRKKNRIHYLRDIFHEEVNQKDPNFFQQLDESNFCEDDRTVEFNFDTNLYKNQFPTVYHLRKYLMETKDKPDIRLVYLAFSKFMKNRGHFLYKGNLGEVMDFENSMKGFCESLEKFNIDFPTLSDEQVKEVRDILCDHKIAKTVKKKNIITITKVKSKTAKAWIGLFCGCSVPVKVLFQDIDEEIVTDPEKISFEDASYDDYIANIEKGVGIYYEAIVSAKMLFDWSILNEILGDHQLLSDAMIAEYNKHHDDLKRLQKIIKGTGSRELYQDIFINDVSGNYVCYVGHAKTMSSADQKQFYTFLKNRLKNVNGISSEDAEWIDTEIKNGTLLPKQTKRDNSVIPHQLQLREFELILDNMQEMYPFLKENREKLLKIFNFVIPYYVGPLKGVVRKGESTNWMVPKKDGVIHPWNFDEMVDKEASAECFISRMTGNCSYLFNEKVLPKNSLLYETFEVLNELNPLKINGEPISVELKQRIYEQLFLTGKKVTKKSLTKYLIKNGYDKDIELSGIDNEFHSNLKSHIDFEDYDNLSDEEVERIILRITVFEDKQLLKDYLNREFVKLSEDERKQICSLSYKGWGNLSEMLLNGITVTDSNGVEVSVMDMLWNTNLNLMQILSKKYGYKAEIERYNKEHEKNIYNREDLMDYLNIPPAQRRKVNQLITIVKSLKKRCGVPNKIFFKVSREHQDDPKRTSSRKEQLKYLYKSLKSEDEKHLMKELDELNGHELSNDKVYLYFLQKGRCIYSGKKLNLSRLRKSNYQNDIDYIYPLSAVNDRSMNNKVLTGIQENRADKYTYFPVDPEIQKKMKGFWMELVLQGFMSKEKYFRLSRENDFSENELVSFIEREISDNQQSGRMIASVLQYYFPESKIVFVKEKLIPSFKRDFHLISSYGHNHLQAAKDAYITIVVGNVYHTKFTMDPAIYFKNHKRKDYDLNRLFLENISRDGQIAWESGPYGSIQTVRKEYAQNHIAVTKRVVEVKGGLFKQMPLKKGHGEYPLKTNDPRFGNIAQYGGYTNVTGSYFVLVESMEKGKKRISLEYVPVYLHERLEDDPGHKLLKEYLVDHRKLNHPKILLAKVRKNSLLKIDGFYYRLNGRSGNALILTNAVEVIMDDWQTKTANKISGYMKRRAIDKKARVYQNEFHIQELEQLYDFYLDKLENGVYKNRKNNQAELIHNEKEQFMELKTEDQCVLLTEIKKLFVCSPMQADLTLIGGSKHTGMIAMSSNVTKADFAVIAEDPLGLRNKVIYSHKGEK

SEQ ID NO: 16864 - protein, 1232 aa, unidentified
  REGION 1..1232: note = Cas Enzyme sequence
DPNFFQQLDESNFCEDDRTVEFNFDTNLYKNQFPTVYHLRKYLMETKDKPDIRLVYLAFSKFMKNRGHFLYKGNLGEVMDFENSMKGFCESLEKFNIDFPTLSDEQVKEVRDILCDHKIAKTVKKKNIITITKVKSKTAKAWIGLFCGCSVPVKVLFQDIDEEIVTDPEKISFEDASYDDYIANIEKGVGIYYEAIVSAKMLFDWSILNEILGDHQLLSDAMIAEYNKHHDDLKRLQKIIKGTGSRELYQDIFINDVSGNYVCYVGHAKTMSSADQKQFYTFLKNRLKNVNGISSEDAEWIDTEIKNGTLLPKQTKRDNSVIPHQLQLREFELILDNMQEMYPFLKENREKLLKIFNFVIPYYVGPLKGVIRKGESTNWMVPKKDGVIHPWNFDEMVDKEASAECFISRMTGNCSYLFNEKVLPKNSLLYETFEVLNELNPLKINGEPISVELKQRIYEQLFLTGKKVTKKSLTKYLIKNGYDKDIELSGIDNEFHSNLKSHIDFEDYDNLSDEEVEQIILRITVFEDKQLLKDYLNREFVKLSEDERKQICSLSYKGWGNLSEMLLNGITVTDSNGVEVSVMDMLWNTNLNLMQILSKKYGYKAEIEHYNKEHEKTIYNREDLMDYLNIPPAQRRKVNQLITIVKSLKKTYGVPNKIFFKISREHQDDPKRTSSRKEQLKYLYKSLKSEDEKHLMKELDELNDHELSNDKVYLYFLQKGRCIYSGKKLNLSRLRKSNYQNDIDYIYPLSAVNDRSMNNKVLTGIQENRADKYTYFPVDSEIQKKMKGFWMELVLQGFMTKEKYFRLSRENDFSKSELVSFIEREISDNQQSGRMIASVLQYYFPESKIVFVKEKLISSFKRDFHLISSYGHNHLQAAKDAYITIVVGNVYHTKFTMDPAIYFKNHKRKDYDLNRLFLENISRDGQIAWESGPYGSIQTVRKEYAQNHIAVTKRVVEVKGGLFKQMPLKKGHGEYPLKTNDPRFGNIAQYGGYTNVTGSYFVLVESMEKGKKRISLEYVPVYLHERLEDDPGHKLLKEYLVDHRKLNHPKILLAKVRKNSLLKIDGFYYRLNGRSGNALILTNAVELIMDDWQTKTANKISGYMKRRAIDKKARVYQNEFHIQELEQLYDFYLDKLKNGVYKNRKNNQAELIHNEKEQFMELKTEDQCVLLTEIKKLFVCSPMQADLTLIGGSKHTGMIAMSSNVTKADFAVIAEDPLGLRNKVIYSHKGEK

SEQ ID NO: 16865 - protein, 1312 aa, unidentified
  REGION 1..1312: note = Cas Enzyme sequence
VQNGFLGITVSSEQVGWAVTNPKYELERASRKDLWGVRLFDKAETAEDRRMFRTNRRLNQRKKNRIHYLRDIFHEEVNQKDPNFFQQLDESNFCEDDRTVEFNFDTNLYKNQFPTVYHLRKYLMETKDKPDIRLVYLAFSKFMKNRGHFLYKGNLGEVMDFENSMKGFCESLEKFNIDFPTLSDEQVKEVRDILCDHKIAKTVKKKNIITITKVKSKTAKAWIGLFCGCSVPVKVLFQDIDEEIVTDPEKISFEDASYDDYIANIEKGVGIYYEAIVSAKMLFDWSILNEILGDHQLLSDAMIAEYNKHHDDLKRLQKIIKGTGSRELYQDIFINDVSGNYVCYVGHAKTMSSADQKQFYTFLKNRLKNVNGISSEDAEWIDTEIKNGTLLPKQTKRDNSVIPHQLQLREFELILDNMQEMYPFLKENREKLLKIFNFVIPYYVGPLKGVVRKGESTNWMVPKKDGVIHPWNFDEMVDKEASAECFISRMTGNCSYLFNEKVLPKNSLLYETFEVLNELNPLKINGEPISVELKQRIYEQLFLTGKKVTKKSLTKYLIKNGYDKDIELSGIDNEFHSNLKSHIDFEDYDNLSDEEVEQIILRITVFEDKQLLKDYLNREFVKLSEDERKQICSLSYKGWGNLSEMLLNGITVTDSNGVEVSVMDMLWNTNLNLMQILSKKYGYKAEIEHYNKEHEKTIYNREDLMDYLNIPPAQRRKVNQLITIVKSLKKTYGVPNKIFFKISREHQDDPKRTSSRKEQLKYLYKSLKSEDEKHLMKELDELNDHELSNDKVYLYFLQKGRCIYSGKKLNLSRLRKSNYQNDIDYIYPLSAVNDCSMNNKVLTGIQENRADKYTYFPVDSEIQKKMKGFWMELVLQGFMTKEKYFRLSRENDFSKSELVSFIEREISDNQQSGRMIASVLQYYFPESKIVFVKEKLISSFKRDFHLISSYGHNHLQAAKDAYITIVVGNVYHTKFTMDPAIYFKNHKRKDYDLNRLFLENISRDGQIAWESGPYGSIQTVRKEYAQNHIAVTKRVVEVKGGLFKQMPLKKGHGEYPLKTNDPRFGNIAQYGGYTNVTGSYFVLVESMEKGKKRISLEYVPVYLHERLEDDPGHKLLKEYLVDHRKLNHPKILLAKVRKNSLLKIDGFYYRLNGRSGNALILTNAVELIMDDWQTKTANKISGYMKRRAIDKKARVYQNEFHIQELEQLYDFYLDKLKNGVYKNRKNNQAELIHNEKEQFMELKTEDQCVLLTEIKKLFVCSPMQADLTLIGGSKHTGMIAMSSNVTKADFAVIAEDPLGLRNKVIYSHKGEK

SEQ ID NO: 16866 - protein, 1368 aa, unidentified
  REGION 1..1368: note = Cas Enzyme sequence
MERGEYYLGLDIGTDSVGYAVTDMDYKLKKFHREPMWGVTTFDPAEGAEGRRGFRTARRRLDRRQMRIRLLEELFAREIAAVDRGFFIRLKQSGLCREDADGKAPFILFNDTGYNDSDYYKQYPTVHHLILALLKDEAPQDVRLVYIACAWLVAHRGHFLNEMSKENLDAEGGFENAYREFICFFEERGYELPWEGDRSREILDLLIERSGVRYKTKRFADLLYGGKIPKLPKEPTEDELEAFPFDREAIIKLLSGGEVKPDALFKAEELDSDLPKLKLDKDEDSFADMISGLGGCSDLVIKLRAMRDAASLVELLNGRKYISESKVLQYEKHKEDLEKLKAYIRKYFSKDEYKAFFRHYTKGVANYTAYSGNIKDVKGDIPEFRKATVKDFSEHLKKLLLSKTPDDADREYYETTLARLETFDFMPKQVQGENRIIPYQVYWLELRDILVRAEAYLPFLAERDEEGLSVSEKILSIFEYRIPYFVGPLHRSKGQKAFWLERKEKGRILPWNFDKKIDLDKTEDGFIENLTNRCTYLIGEDVLPKDSLVYSKFCVLNEINNLTANGAPITVEWKQRIFEDLFMCYRRVTVKKIKDYLVSNGVIKKDATLGGIDTSVKSSLSSYHDFRSLLSRGILTEADAEEIIKRSAYAENKTRFRAWLRREYPTLEENDVNYVSSKTYSGFGRLSYKFLTGLYGARREGGEAFTVMELLYSTNENLMQILSSAYTFRESIEAENSLIDEEELSVDERLEKMYVPTAVRRPILRALDIIADVRKATGGDPKRIYIEMARGATPEQKNSRTKTRLQQILDLYSKVKDEHLPELRRELEAMGAEVNNRLQSDKLFLYFIQLGRCMYSKERIELSELMTTKLYDIDHIYPQHFVKDDSVLNNRVLVTSIENGNKGDRYPIDAPIREKMSSFWKKLLDCGLITEEKYKRLVRSHAFTDDEKMGFINRQLVETRQSTKALATILKEMLPETEIVYVKAGLVSDFRHKYGILKSRTLNDLHHAKDAYLNIVVGNVYNAYFNYSFFRPTDEYSMKIEKIFARNLVGRAGCRWRGEEDIGRVKKIYSNNSVRVTRYPFKRGGGFFDQMPVKAKEGLVPRKKDLPTEIYGGYNKPSAAFFVAVRYKAGKKSGIIILSVDLLVSKRFLDDNAFALEYARDKVAELISAVPNSVEFVLGKRIIRVNSILELDGLRMCISGKSGGGTKLIVQTVTPFICDTVSAEYVRVIEKFNERRKDNPSLVFDPQHSLVNEVSNLALYELYIEKLSAWPFNKRPANPVDTLKAGKEKFLALGVVEQAGLLGAIHQFFARYASGVDLRQIGGVGKAGVTMLSSSVENWKKTYTDVRLVDQSPSGLFEHRSENLLALL

SEQ ID NO: 16867 - protein, 1271 aa, unidentified
  REGION 1..1271: note = Cas Enzyme sequence
MLKYRGNFLYEGQKFTELDDFKIIYEQFVTSLKEYLEIECNYDEISCEEIEKKLKEKKSKKEKNDEVSEILKKLGLNKKYAGAVANAIIGYKFNVATIMNDKNLCDENGKEMSVSFASADYEEEEQKLSDELGEKFSVIENLKRLYSWYVIKQIMQGSDKNRVNYLSEAMVAKYEKHHAELKELKELFRDYKTQKEYSEFFHKELKAEQKDGKMSPAFLKSFGKIKKGEYVPNYANYIKGMKRCGDTQSKARENLYKCIKALLGDVAKDDERYIRICAEMENDSYLEKINDVSNSVIPYQLNEMEMEKILDVQGRFYPELNDNKELILKMLTSKIPYFVGPLNSGSRFAWMSKKAGMENISVYPWNVEEVVDVDKTAEKFITRMTNYCTYLPSEKVLPKHSIIYQWYEVLTELSQISIDKIKLGKEMRDDIIQNLFLKKVSVSEKNLIEHLKKSGTYNDIDNRVIRGYQGGDNFASSMSSYITFKKIFGEINMSNIDMIEQIIYWLTIFDDKKIIKRKIEQNYRERINDSQLKRIVKIKYTGWGQLSKKFLTGIKGDTGHTIIEMLEEGDPRWKELPNLIQIINKDEKIKTVIEENRLRYNGEDDLPDIIDKLHTSPANKRGIKQCMKVIEEIIEYMGRKPEQIFIEFAREEGEKVETKKVKDKLDKAIGKLKQEFKDYYNDDIKQELKDNEKRLDEEKVRLYFSQNGKSLYSAPSASNQLSLDNLNQYDVDHIIPYSISQDDSMDNKVLVKKIENQNKGNRIVSDAFGNKADYKEMQNYWEMLYKAGLISEKKYNNLNKSLDEVFSKGFINRQLVETRQIVKNVANLISDYYDDKIEVIEVKAQLSSYIRNKFTQEKKDDDGFWIENTENAMFFKNRGLNDYHHAHDAYLACIIGLYIQKVYPGWKNELNFKKYRREFEKYYEEQKKYNTKSKKEIYISMLSRFTKNYEKAGWNGEEIIDYMRKIFCYRDVMVSKKTEENTGSFYNQTRYPKEKLDGNKKETKLIPLKSGNNLRGKEELKELSVEKYGGYQGGECAYFVLVKYYTVKKKKKTEEKQWKMEFVGIPTYISYEINKGNINLKQYVCDKLKNDTVEILRGKICKYQELMDEEGNRYFLVGPTEVANAKQFVLGSRYQKFNRLYSYINSENWHYIRTDELEKEIDEFFKLLQNKIHNEFKGYIKDIDKVIGANTSKLDIDKKIDYFNEIYKIVQANSSRPAVSKFNIAGISDGLGRKRSLPFKDKIIIVDKSVTGIYERRTCFELENGGNTKSC

SEQ ID NO: 16868 - protein, 1159 aa, unidentified
  REGION 1..1159: note = Cas Enzyme sequence
MSRILGLDLGTNSIGWAVVDFDTQQIIDTGVRVFPEGINRDSGREVSKNATRREARQMRRQHFRTRMRKKYLLDTLKKQGLCPKENKAFEQWISKDPYELRLRALDEEVSLDDLGRIFYHFSQRRGFKSNRKAGKEDSAIFKGSSKTDTISINETKEELNQGYRTLGELLYNLNPHEERRRNRYTTRQMYVDEFNKIWDKQKQYHPGVLTEELKHKIGHPEEGLLFYQRPLRSQKHLLGKCTFESYWFYDKYSNPNRWVEKGKPVCSVSNPEYELFRAWQFANTIKYDKDKPLTNEQRGKVVEIINSKDKRFEFQKIKKALGMENELFNYENSHKVFGNKTHAKLSKLFLKEIWEQNKNDIWHCFFSYDKNEKLVEKLKRSYGLKEKDAKKVENIHLDQDYSRLSLKAIRNILPFLKEGYLYDEAVLLGGVKNAFGKQWENLSEEQHKFIRDNVESISAGKYKEGELIEKLREFLTQQFNLKNKQLSKLYHHSQIDHKDGSDSKLDPPPEIRNPIVQKALNETKRVVNAIINEYGKPGEIRVEMARELKQSKEARERQRLEKSQREEKNDEVRKVLDEYGLAHSRNNRHKYLLWEESQGVCPYTGKQIGIEDLFSDNQFQVEHIIPYSISLDDSFMNKTICEAKENQLKGNQTPYQFYKDNPGKWEEVKERAKTLLAPNNFRKYQRFISDQDYKLDDFIERQLNDTRYISKAARDYLKSVCPKVYVTQGEVTNQLRHLWGLNAILQLPKKTSEVREGHYWAALDEHGEIKEMERWGFEKRKEVPQKLAKKGELVYGFVKGGQFIPQKQREDHRHHAIDALAAACSKASFLKELSNATKKDKGYRYEDFPQPWESFYNEAWSAISNILVSFSANRKVTDTIKKTIKKNGKKYKSKGLAARGELHEQTIYGKHKNKEGKDYYHLRKPLEKITQKKHVDEIVDSRIKSAIEQKLVDKGIDISKKYKFGSDLLFEKDPQTGEKITSIYLPNRNGNPVPVKKVRVRKPFSNIRNLKPKSGINQYVEPGNNHHMLIYRNSKGEIDYQLVTFWEAVQRKKNNQPVFDTKMTEGNELIEFLQRDDLFLLGINDEDIDWDNPNEKFLSDHLYRVQKITSTGYKIVFRHHLASTIDNINQMIGIASLKNWDSYNPIKVSIDILGNIYRQ

SEQ ID NO: 16869 - protein, 1380 aa, unidentified
  REGION 1..1380: note = Cas Enzyme sequence
MKRILGLDLGTTSIGWALVNEAESNNEASSIIRLGVRVNPLTVDEKSNFEKGKAITTNADRQLRHGARINLQRYKLRRQNLHDCLQKQGWLGTEAMYEEGKASTFETYKLRAKAAEEEISLHEFARVLFMLNKKRGYKSNRKANNKEDGQLFDGMTIAKKLYEEHLTPAEYSLQLLNKGKKFTQGYYRSDLNAELERIWDEQKKYYPEILTDEFKQQLEGKTKTNTSKIFLAKYGIYSADLKGLDRKLQPLKWRVEALKQQVDKEVLAFIISDLKGQIANTSGLLGAISDRSKELYFNKQTVGQHLWASLEENPHISIKNKPFYRQDYLDEFEKIWETQATFHKQLTPELKQEIRDIIIFYQRPLKSKKSLISVCELEQRKVKATIDGKEKEITIGPKVAPKSSPVFQEFRIWQNLNNVLLIDNDTNEKRPLDEDERNLLYEELSIKAKLSKTEALKILNKKGKQWDLNYKELEGNRTQAILFDCYNRIITLTGHEECDFKKIKASEIRHYVTTIFKNLGFNTDILDFDPSLEKHELEKQPMYQLWHLLYSYESDNSRTGNESLLRKLETTFGFPEEYATVLCDVVFEEDYGNLSVKAMRKILPYLQAGNDYSQACAYAGYNHSRHSLTKEELDQKVYKERLELLPKNSLRNPVVEKILNQMINVINAIIDEYGKPDEIRIEMARELKSSAIERENATRAISQGNAENQRIREILEKEFSLSYISRNDIIKYKLYEELEPNYYKTLYSDTYITKDKLFSKDFDIEHIIPKARLFDDSFSNKTLEARNINLEKSNKTAFDFIKEKYGEDGAEAYKKKLDMLLENDAISRPKYNNLLRAEADIPSDFINRDLRNTQYIAKKACEILGELVKTVTPTTGKITNRLREDWQLVDVMKELNFEKYEKLGLTEIVEDRDGRKIKRIKDWTKRNDHRHHAMDALAIAFTKPSFIQYLNNLNARSNKGDSIYAIENKELHYEEGKLRFNAPIPVNEFRAEAKRHLSAILVSIKAKNKVMTQNVNKIKTKHGIIKKIQLTPRGPLHNETIYGTKMRPIIKMVKVGAALDEATINKVSSPAIREALLKRLNEYSGNAKKAFTGKNTLEKNPIYLNAGRTKTVPSLVKTVEWESFHPTRKLIDKDLNVDKVVDKGIREILKARLEEFNGDAKKAFSNLEENPIYLDEAKKIALKRVSIEGVLSAIPLHTLKNQAGKPITGKDGKPVLGNYVQTSNNHHIAFYYDEDGNLQDNAVSFFEAAERKSQGIPVIDKDYNRDKGWRFLFTMKQNEYFVFPNEATGFIPSEVDLTDEANYGIISPNLYRVQKVSRIDKGTSASRDYWLRHHLETILNDDSRLKNSAFKRINSLKPLEGIIKVRINSTGKIVAVGEYD

SEQ ID NO: 16870 - protein, 1436 aa, unidentified
  REGION 1..1436: note = Cas Enzyme sequence
MKRILGLDLGTNSIGWALVNEAENKDERSSIVKLGVRVNPLTVDELTNFEKGKSITTNADRTLKRGMRRNLQRYKLRRETLTEVLKEHKLITEDTILSENGNRTTFETYRLRAKAVTEEISLEEFARVLLMINKKRGYKSSRKAKGVEEGTLIDGMDIARELYNNNLTPGELCLQLLDAGKKFLPDFYRSDLQNELDRIWEKQKEYYPEILTDVLKEELRGKKRDAVWAICAKYFVWKENYTEWNKEKGKTEQQEREHKLEGIYSKRKRDEAKRENLQWRVNGLKEKLSLEQLVIVFQEMNTQINNSSGYLGAISDRSKELYFNKQTVGQYQMEMLDKNPNASLRNMVFYRQDYLDEFNMLWEKQAVYHKELTEELKKEIRDIIIFYQRRLKSQKGLIGFCEFESRQIEVDIDGKKKIKTVGNRVISRSSPLFQEFKIWQILNNIEVTVVGKKRKRRKLKENYSAIFEELNDAEQLELNGSRRLCQEEKELLAQELFVRDKMTKSEVLKLLFDNPQELDLNFKTIDGNKTGYALFQAYSKMIEMSGHEPVDFKKPVEKVVEYIKAVFDLLNWNTDILGFNSNEELDNQSYYKLWHLLYSFEGDNTPTGNGRLIQKMTELYGFEKEYATILANVSFQDDYGSLSAKAIHKILPHLKEGNRYDVACVYAGYRHSESSLTREEIANKVLKDRLMLLPKNSLHNPVVEKILNQMVNVINVIIDIYGKPDEIRVELARELKKNAKEREELTKSIAQTTKAHEEYKTLLQTEFGLTNVSRTDILRYKLYKELESCGYKTLYSNTYISREKLFSKEFDIEHIIPQARLFDDSFSNKTLEARSVNIEKGNKTAYDFVKEKFGESGADNSLEHYLNNIEDLFKSGKISKTKYNKLKMAEQDIPDGFIERDLRNTQYIAKKALSMLNEISHRVVATSGSVTDKLREDWQLIDVMKELNWEKYKALGLVEYFEDRDGRQIGRIKDWTKRNDHRHHAMDALTVAFTKDVFIQYFNNKNASLDPNANEHAIKNKYFQNGRAIAPMPLREFRAEAKKHLENTLISIKAKNKVITGNINKTRKKGGVNKNMQQTPRGQLHLETIYGSGKQYLTKEEKVNASFDMRKIGTVSKSAYRDALLKRLYENDNDPKKAFAGKNSLDKQPIWLDKEQMRKVPEKVKIVTLEAIYTIRKEVSPDLKVDKVIDVGVRKILIDRLNEYGNDAKKAFSNLDKNPIWLNKEKGISIKRVTISGISNAQSLHVKKDKDGKPILDENGRNIPVDFVNTGNNHHVAVYYRPVIDKRGQLVVDEAGNPKYELEEVVVSFFEAVTRANLGLPIIDKDYKTTEGWQFLFSMKQNEYFVFPNEKIGFNPKEIDLLDVENYGLISPNLFRVQKFSLKNYVFRHHLETTIKDTSSILRGITWIDFRSSKGLDTIVKVRVNHIGQIVSVGEY

SEQ ID NO: 16871 - protein, 936 aa, unidentified
  REGION 1..936: note = Cas Enzyme sequence
KKLMNKCGVHTMAETFCAICGIDPLGKKRSTNLPGADRPKGQNAAFPRATVESEVRRVVQAHFGKLEKVDANLERALLGQSNQDKTAWQAIPCPDLKLPKRYEGALLFGQLVPRFDNRVISTCPISGAKVPSRNCPEFLNFRWAMQLANIRVSRLGEKELSALTVQERKQLDSLMRAQGGMGVEEFKKQVRQVSGAIRDNLETMFMHPDAKEALLLDPVTKLVESSEVKPYWALLPERLQKRTRGQWRRGKSITLAKLREQLSELCGDTASFDAAITRQLDKANTRGRKKDIPTTVAEFVNQPLSIRKLDQRAAFSRPMLKRAFEEVMAGKHPKEEGGCLFITEKMREAQLTREIAEQTNNHLVRHRLLILERLLADIVREYAAGDKTRVAKITIEVNRDLREMSGMTAKAKAQDLGLRIANHHQVVRKLEEDESLMKILHERRAKITAGLIRKARVADDLDWTCPYTGQRFQPVDLLTKRVDKDHIVPRADRATDSLDSLVITFSAINKWKGKRTAWQFMQEEQGKAVPDLPNLSIMTLSRYKGLVESLDTFKGHDDDKRRKKKRKELMLLPTYEEKEFTPGDLTATSQLVRLGAMALKKAFVGCARHPVVVSLPGSVTGAVRKAWRLLGCLSLANPQVLDEKGEVRNKDEIRDITHLHHALDACVLGFSSHFIPNDGRTWELITKRKWTPAEENELKALGVFDKDSEGRFQMRDLDNELKEQIRQRLAEKRVVQHVPARMDGLKVEQNIWRVVSVKDGEASLQQRIRQPDGSRPVKHGEEKVGKLLGLQPTGGTGKLNANKGVLIIPDNFGVGLDPHPTIIPFHKVWTRLKELKSSNGGKTPRVLRNGQIIQVPNGKNFKGIWKVFSAKNNASGMALDIGSPDVVRLKNKTEGHKINVRLATLMKDGLEIQKCGLTGVPACPTTSSALIPPTAP

SEQ ID NO: 16872 - protein, 1016 aa, unidentified
  REGION 1..1016: note = Cas Enzyme sequence
MKVLLAFLGVLSKAQLDQPGCAWPWQLAARVLRGGELLTWPELWDVLRWYAHNRGYDGNRRWSAAEKEADNEDTEKEENAKKLMNKCGVHTMAETFCAICGIDPLGKKRSTNLPGADRPKGQNAAFPRATVESEVRRVVQAHFGKLEKVDANLERALLGQSNQDKTAWQAIPCPDLKLPKRYEGALLFGQLVPRFDNRVISTCPISGAKVPSRNCPEFLNFRWAMQLANIRVSRLGEKELSALTVQERKQLDSLMRAQGGMGVEEFKKQVRQVSGAIRDNLETMFMHPDAKEALLLDPVTKLVESSEVKPYWALLPERLQKRTRGQWRRGKSITLAKLREQLSELCGDTASFDAAITRQLDKANTRGRKKDIPTTVAEFVNQPLSIRKLDQRAAFSRPMLKRAFEEVMAGKHPKEEGGCLFITEKMREAQLTREIAEQTNNHLVRHRLLILERLLADIVREYAAGDKTRVAKITIEVNRDLREMSGMTAKAKAQDLGLRIANHHQVVRKLEEDESLMKILHERRAKITAGLIRKARVADDLDWTCPYTGQRFQPVDLLTKRVDKDHIVPRADRATDSLDSLVITFSAINKWKGKRTAWQFMQEEQGKAVPDLPNLSIMTLSRYKGLVESLDTFKGHDDDKRRKKKRKELMLLPTYEEKEFTPGDLTATSQLVRLGAMALKKAFVGCARHPVVVSLPGSVTGAVRKAWRLLGCLSLANPQVLDEKGEVRNKDEIRDITHLHHALDACVLGFSSHFIPNDGRTWELITKRKWTPAEENELKALGVFDKDSEGRFQMRDLDNELKEQIRQRLAEKRVVQHVPARMDGLKVEQNIWRVVSVKDGEASLQQRIRQPDGSRPVKHGEEKVGKLLGLQPTGGTGKLNANKGVLIIPDNFGVGLDPHPTIIPFHKVWTRLKELKSSNGGKTPRVLRNGQIIQVPNGKNFKGIWKVFSAKNNASGMALDIGSPDVVRLKNKTEGHKINVRLATLMKDGLEIQKCGLTGVPACPTTSSALIPPTAP

SEQ ID NO: 16873 - protein, 1149 aa, unidentified
  REGION 1..1149: note = Cas Enzyme sequence
MPDLQISFDVGHSSIGWAVIRTPERSAANGTLPEILGTGVVTFGADDCLAVKRRKNRQARRHARATRQRIGHMEKLLSHLGVLSADKLKDRHRQAGGDSFAWQRAAEILTATRAGKPLPKIGWPELWDILRWYAHNRGYFAPPWAKRGDELPEDDDAVPDTEKVKIAHATMMELGTQTMAETIAAYTEWYEREAAKWQQKQRDTKPVHFKGLNAAFPREDVVWPEVRALLQALKGSLPKLDDTLIRALLGNDIDPMRDREAWRAISCPSIVLPKRYHGGLLFGQSIPRFDNRIIGVCPILFARLETQYRQEGLESAEAKERAEKEAKLPSKASTEFLRFRWAMQLANVFGSAPGERSTRPLSADERKKLTGQAEGLGAFTKGEFKKAIRLLTGWTRDNLDNLLLHPDAEKALVLDPVQLELCKSRLADAFARLPLRYAKRLRGKLSDGKTVTAGEVRCWLEPADASAFDDVVAGVLDGTNTRKGRKQSVTSRDDLLSEKLTAQFPAGRAPYARPILREAYGEVMTGHDPRAEKSERQPRGCLCQTDELKEAQLHRRLEKQTNNHLIRHRLLILERLLRDLIAAPEFANGDAKRVASLVIEVNRDLRDQSGKTRKEQEQDLGLRLGDFKRVAAKVEEACKSRGVPVTAGLIRKARVAEDLGWKCPYTGRMFEMNDLLGDRYDKDHIIPHSDRQSDSLDSLVITTKEVNLWKGKRTAMQFVREEGGKVTPGRPAIMPLVAFQKHVAGLNIYKGHPDDQTRKKRRIRRLLTENYEEKEFTPRDLTMTSHLVRLGAQVLQRAFPPGLRPPVVSLPGSVTGEVRKAWRLIGCLGAANPAIFEADGKTPKRKEDIRGITHLHHALDACVLGLAALYFPRNGAVWGAMVKAGTDRNANDERRLWLAMTKRRPTGEEAALLRATGLYQADASGRMHLAELPAELQQQLRRRLAEKRVVQHVPADMSGVKVEENTRGVAGEKGGRVLLRQRAGRDAKTGLQAVKTTDEAPGKLLGLKPINGDGKLMRQNGVRVITDNFGVAILDHAPEGEEKFVVIPWHRVWHRLAALKVRNSGKRPLVIRNGQLIRVRNGNYSGIWRVFSAKNNASGMALDIGWADVVRLQNKTEGHKINVLLASLVKAGLEPLPAGLLGVPTVAGK

SEQ ID NO: 16874 - protein, 1126 aa, unidentified
  REGION 1..1126: note = Cas Enzyme sequence
MKEKKMPDKHMHGPLTFGFDIGIASVGWAVINETRIVDLGVRCFDKAETAKEGESLNLARRSARLMRRRLRRRAWRMTKLARIMKRVGLISDAEKFLALPPPDVSPWKLRVKALDEKLDAESWARVLYHLTKHRGFHWISLAEEKAAEGDAKGEGGKVTQALKATNKLMKEKNYRTAAEMVLAEFPDTQRNKRGDYGKALSRTLLAHEMAALFEVQRSLGNPHATEELQLALLGRGDKKSGLFWSQKPPLSGENLLKMLGKCTFENKKNGKAEDEFRAPKASYTAERHVWLTRLVNLRITVDGKSRPLNESERRFALPLPYEAGEKFTYKSLRTALVKSGHLPDSFRFAGLSYPSERQKAEDKAKNPEDANLIRLPAWHELRLTFQRKLLDNEWKSIGSNPELLDSIAWVLSVYKDDDEVESELGKLQLPNKEIVIDALLDIRFDKFHALSLKALRKIVPFMEQGLRYDEACEKADYHHSQLFKVGEGQHRKLPSLYSGRDKDGRMVFNEQLGDIPRNPVVLRSLNQARKVLNALVDRFGSPHSVHIEMARDLSRNMDERNKIAKEQDGYRDRNEKDRQDFVSQFGIVGTPRGGDFEKWKLYREQQGKCAYSCTPISIERLLEPGYVEIDHALPYSRSFDDSKNNKVLVHSKENRDKGNRTPYEYLDGESNSERWRTFVALVESNKLYRQAKRSRLLRKDFGKDEASEFRERNLNDTRYLCRFFKNQVEQFLKLAESSENKRCVVLSGQMTNFMRMRWGLLKVRDESDRHHALDAVVVAACSHGMVKRLADYSRTKELDQVKEGFVDFETGEIVNPAMHQKLATHFPEPWPHFRDEVQIRLKIDDPALMHSELERLGSYPNEALGAARPLFVSRAPQRRNGGAAHKDTIYGQPDHLRAQGGVTQKVALSGLSLKDLDKLIDPGRNEKLYAAIRKRLEEHGGKGEKAFPASNPLRKPDKDGNPTGPIVRAVTLVIDKMSGIPVRGGLAKNDSMLRVDVFTKAGRFHLVPVYVHHKVKGLPDRAIVAFKDEDEWTQIDETFAWCFSLQPNDFVRVAQKGKQPVTGYFASCHRGTGNINLWAHDRSQQVGKGGQIEGIGVKTALSFEKFHVDVLGRAYLARTESRRDLA

SEQ ID NO: 16875 - protein, 1337 aa, unidentified
  REGION 1..1337: note = Cas Enzyme sequence
AVTDEQYHLLRFHGNDAWGSHVFDSASLCDERRGFRSARRRLDRRQQRVKLLQEIFAKEIANIDPRFFIRLSESYRWRDDTDDRYIYFNEEEYTDIQYMRDYPTIHHLICELMENEEEHDIHLVYLACAWLVAHRGHFLSQLSVDNIDSLIDIESVYQKFLHFFIDNGCENPWIQDAELVGGILKEHIGVTEKHNRLGEIMLGNRKPSKDVRETFLYSEYCIIRLLAGGTCKLRDLYGKEEYEDFGSVSLEMDDDKLAEIMINIGEDYELIAVLRSLHDWSVLADILDGQNGLTNISTAKVAIYEQHKKDLATLKYFIRKYCPEKYNAIFKDAREDNYVAYSYHYNNKLDGQIKKKADTETFSKSLIKIINSIKCDKEDEIIYQDMNNRLGLRQFLPKQRNTDNRVIPHQLYEYELKKILENAAKYLPFLNQKEDGISNTEKIISIFKFKIPYYVGPLNKHSEFAWIDRKSGKILPWNYENMIDDDASEEAFIKKMTNQCTYLPGESVLPKDSLCYQKFMVLNEINNIKVDGRKISVGAKQGIYSDLFLKYKKVKRSQIEEYLISNGQLEKNRRETLSGIDIQIKSSLSSHIAFRRLLEQKILNEADVERIIERASYAEDKGRVAKWLRAKYPHLTEADIKYICKVKIKDFGRLSRTFLTGIEGACKETGEVATIISMMWESNDNLMELLSERYTFADTILEFKSDYYTERKQTLSERLDEMYVSNAVRRPIYRTLDIVKDLEKAFGKPEKIFIEMTRGAMPELKGKRTKSRQQQLLEYYDKCKEEDVRDLKQQLEALGEYVDNKLQSDRLFLYFMQFGKCAYSGMPISLERLMAGSKEYDIDHIYPQAYVKDDSIINNKVLVLSVANGEKKDVYPIKSEIRNKMQKTWSFWHHVGTISDEKYKRLIRSTPFTEDEKYGFINRQLTETSQSTKVVAELLKERYPEAEIVYSKAGLISDFRHEFDLYKSRSYNDLHHAVDAYLNIVVGNVYHMRFSRQWFNINSSYSIKTKTLFTHTVNCNGKEVWNKDMLPGVLKTAKKNTAHFTKHATFKTGGLFDQNPVKKAPGLTPLKAGLPTEKYGGYNKAGVMFFIPVRYKSGKKTVLMVLSVELLYGNRFLEDEIFAKEYAKDRLQRIIGKSVDEIDFPIGMRPWKVNTILSLDGFRICITGNASGGKCLIAQPIMQFSSDEYWKYYLKKLEKFVEKVKNNSSYVYDVDYDVVHHEDNLKLYDLYLDKLQNSIYRKRINAPIQTLIEGREKFIDCSVIEQCQVLLNIHQVFGRMTSGCDLTLIGGKSHSAATVSFSSTISNWKKNYTDVRIIDQSASGLWEVVSENILEYL

SEQ ID NO: 16876 - protein, 1132 aa, unidentified
  REGION 1..1132: note = Cas Enzyme sequence
MIIFIQKFVNKEFAMKQHYYGLDIGIGSVGWAVLEVGADNARILDFGVRLFDSGENTGSSETKNQQRRGFRSTRRVIRRKKHRRMRLKNFLCHIGLTTLDAIDKWYQKNELNIYKVRSKGLDEKFSPEELAVSLIHISNHRGYKEFYGDQSEDAKEAELIKSAITKTKTIFAQSGYRTIGEMIAKDKTFCNPNSKDCALSLCRNHHGKYDYMFLRKDLENETKMILEKQKEYYAALTDENIKNIMDIIFRQRYFEYGPGNKEDSTRRYKGFLHTIGHCAIYNNELRGARHTVIGDLFAVVNALSQYHYYETETGEEADFGIVVKLVLEYVLNECNINKTTLIKLLKENGIEVIISSATGTQDINKCIKFLKPIRAAIEQAGLDWSSFISEPQLDLHAPSRLHRLGQCISSYITPSLRREKLEALGFVNTGFINNCMREKFSGTANVSDKYMVEAILAAQKGVRVGDYQAQVNKQEKQERKELKRLPPINDKDVISNPVVFRAINETRKIVNALISKYGQQPAIINIEVARELGRSEKARKEIARAQINNQKIRDEAANKIKELFGIANPKPAQLERYLLYEMQEGKCLYSNTPVEIGRLLTDDYEVDHIIPYSLILDDSLHNKALVLTKENREKGQKAPLEYLHGERRTDFKKRVINAYKHNKISKKKYDYLMLESLNNEEVLKDWKSRNINDTRYITKYVAGYLQQNLLFDSPNKKNVHCINGAVTSRFRQIWLRDSKWGKPEKEREETELHHAIDAIVVANLTPRYIELASDYLKLRAMKRAYKGLALLPAEYYAYLDKCCKKMKKYYYMNEDETQNLLEGGRIPTIVPRLFDEVSLRFDSDDEETLRERAKTFYRDETFANGLRLPLVSRKQERKYRGAVVSSENPVSLKTINGKTYQYVAKKLEKITVKDIDKIVGISKAARAQLRAAFEGQKEQYSLGDYLKSHDIPALRRKDGTLPKRFTLAIGEDIPVYKKAIESGIKKENTQLWEVKSYYCLEIYKDTKGNTRWRGIRYTDIKRKDKKLYLCCAYPEDYQSHVMYLFKNDYIVVYNRKGEETKRGFYQAIKALSQGQIRIIRDNNAKAEVISLAQSCTVKKYDISILGVIGGEIKCGEPYSLLTDPGSAQGTSA

SEQ ID NO: 16877 - protein, 1102 aa, unidentified
  REGION 1..1102: note = Cas Enzyme sequence
MNSFRSSDSSAKRYVLGINLGCASCGWAAIGLNAQHQPTKLLRAGVRIFNPGVTGDIDRGKDESNAVARRAARLIRRQFRHRTARQAALFRLLQRNGLLPPYEGEKADASGQRHAILNRLDREIAVTWAERFPGETATDLPLYFLRKRALDEPLQPFELGRIFYHLSQRRGYQSNRKEKAFHLERAETGAKDEDLGQIEGEIEELKAAMEKAGARTLGEYFASLDPHRQKVRRRWTGRKMYEAEFALIWTKQAGYHPELLTKDLHDRIKYLLFYQRPLRSQAHLIGKCDLEPGERRAAWAMVEAQEFRLLQSVNNLEIVYPGQNVQFPLTTEQRWTVIHLLEKTAEATYETIRKALELPRGTQFNLQRNGEKRLKGNMTNALMATVFGDRWSVMPEEDKKLVVEEWRTIEREDSLMRRAQEHRKLDAAGAEWLAKHPAPAGYCAYSRKAICKLLPLLYEGIRGEEAKNVVYGSRLSGGAVYERIPPVREALKNLRNPAVERALTELRKVVNALVQEMGAKPYEVRIELMRSLKNSRRARFYSVQHNNELQNGREAAKARLLKECGIAQPSRADVEKALLWEECQGECPYTGRRFAFSSLFGENPSMRVSHIIPFSRIADDSFQNKVLCAAGEIQFKTNRTPFEAYGSDAAHYEEILTRVRNWKGTRYSGARSQRDKKKLVANAKIANPGKFRRFELHTAEEVEGFSNRQLTDARYASRSACELLETLYGGRDLKTDEERRQAVFASSGVLTTILRRRWGLDAILREPGASPNRLNTDESQSDYRHHAIDAMVVALSRPSFINALKKSAQAESSQPAAARSAVALQSPWKDFVDSIRPQVEEMLVSHRIDHRLSGALHEETNYGRPCENDGKMTVHIRKPVPGLSAAEIENIIDLKVREAVREKAALLDGSLKKWMPQKENEDWPMLKSKNGQEIPIKRVRIRKSLQVKTIGKKSRERHVSLGSNHHVAVFAITGDKGEEKRWSSQIVSLFEAMERKRKGEAVVQTSMQEDPHAVFKFALMKGDMLLLHKDCDHGKSLCQPSYWKVRSIWEQGTLTLVQIHDARQIKEIYAAKDWLLSSANTLRKLEAMKIEIDSLGRIHRAG

SEQ ID NO: 16878 - protein, 1073 aa, unidentified
  REGION 1..1073: note = Cas Enzyme sequence
MSEPQQPRDYILGIDLGVGSVGWAALECKDGRTTALIRAGARVFTPAVEGNIEGGREESRNVARRSARLQRRQTWRRSRRNLRVFRLLQSWELLPSGPSKTPQERHDLFDQLDLHILSSGWFDRRRADKSIPEPMHVLPYLLRAAALDEPLEPHFLGRAIYHLAQRRGFLSNRKVSGRAKADDDSGLVKPAIAELRKHMADAGSRTIGEFFARISPSQTRIRTRWTARDMCANEFDSIWNSQTPHHPRLLTDERKKLLHKAIYFQRPLKSARNLIGSCELEPKHRRAPRSLLLSQKFRLLQRVNDLQVLPEGQATRNLTSEERFKLLISLEIHGDLTFPAIRKLLSFSRDTKFNLEAAGETRVPGNRTNAFFLKLFADRWDKMSSDERAQVVDYVRSFQRLDKLPAAAMKRWGLTQESAQLLEADPLESDYFNLSNAAMCKLVPLLETGLSYAEARRQLYPDRFLAQTPRQFLPPVFLAESAVGRIRNPSVVRSLTELRKVVNALIHEFGKPAQIRIELGRDLRNSRVQRERMAKSNRDNEKLRIEAARRILRDVGNPNPSRRDLQKAQLWDECHGECPYTGKPIPFASLFGPEPQFDIEHIIPFSRSLDNSFTNLTLCYAEHNRNTKQNRAPCEAYGSDPDTYQAILNRVRKFSSRSAPEKLRRFLMTPEEIQNFVSDFAESQLNDTRYASRLAADYLGLLYGGRVDHDHKLRIRSTAGRITAMLRDEWKLNAILNDGPTSHGGDTPKSRDDHRHHAIDAIVTALTDDGTIQILSRAAEKARLAQRRRFAPIEEPWQGFFAEVRDEISRIVVSHRTSGRVRGPLHEQTLYSHPIPVSATASGQKRSQKPAFEHRVRKPLEAMTVEEAANIADPTVRALVADKLSQFGDASPKTVFSVAANLPSFKITDGRTIPIKKARVRKPLTATSIGSGPSGRFVVAESNHHAEIFAELDERGKEVEWDVAVVSLAEAVERKRLRQPVVRVDHGGLRSFKFSVAPGDVIEMDVHDGKRQFFVVRGTSYPQIALAPISDARLKDRLMKDRVYLRLVPNSLKKKNARKVHVSPLGDVESVHD

SEQ ID NO: 16879 - protein, 1073 aa, unidentified; identical to SEQ ID NO: 16878
  REGION 1..1073: note = Cas Enzyme sequence

SEQ ID NO: 16880 - protein, 1212 aa, unidentified
  REGION 1..1212: note = Cas Enzyme sequence
MTKILGIDTGTNSLGWAIVEKQTDGYHLLDKGVNIFQEGVKIEKGIESSKAAERTAHKAARVRNYRIKLRKIRLLRILSDAHLCPPLSKAELSAWRLKKEYPKNELFMQWQGTDDALEKTPYACRHKCLHESLDFSSLTDRYILGRAFYHMIQRRGFLSNRKDQSGDDTGKVKESISNLTQEMHDAGYEYLGDYFYSLYKRGEKIRNHYTARNEHYLSEFKAICEKQDLAKNLGQEVVSQIEKAIFDQRPLKSQKGQVGKCVFEKNKTKCPSSHPMYEEYRMLSFINNIKILTPKDDALRPLSAEERELIMPLFFRKSKKQFDFEDIAKKLAPKKQYGFFKKSADVGMPYLFNYPMDTSVSGCPVTAALKDIFGDNWIDGLCETYTLAEGKSRLDIVNDIWHALFFYTDDTKLAEFAKNRLQLSDEEAKKFCEISLPADYASLSLKAICKILPYLRRGLIYSHAVFLGNLCEVMPQYEWNIEEMREAAIDNIIHEMNQIDSKDARTFEVCIKEYLREQYHVSDEKLKKLYHPSMMEVYPRVQHTNNHGVYQLGSPRIDSVRNPMAMRSMFRLRKLVNRLLEKGKIDQDTEIHIEFARELNDANKRNAIAAYTKENQNMNDEARKKIINLFKAETGKDIEPTDNDVLKYVLWEEQNHICLYTGKQIAISDFVGANPMFDIEHTIPRSVGGDSTKMNLTLCDSRFNRDIKKTKLPTELPNYEDIISRIQDWKDEYESLEAQIRKQKKLSKGATTKEQKDNIIRKRHLLELRRDYWKGKYLRFTMESVPEGFSRRQGTDISVISKYARLYLKSLFKHVYTVKGIATSDFRKIWGIQDIYSKKERVNHVHHCIDAIVIACTGLDEYNKLGAYYHDEENHEWYGKSKAYFKKPWPTFVEDIKKVQDEILVYHYTPDNMPKQGCRRIKINGQKVLCKGDAARGSLHNDTYYGAIENDGQVKYVKRIDLTSLKESDVKNIVDDTVREIIKAAIREKGFKDAMAGTIWMNEEKQIPIKKVRCFTPSVTKPLNIRHQRDASTKEYKQQYHVANDSNYMLALYIGKDKKGKEKREFEIVNMLQAAQYFRTSNDKNAAEGHLVPVKSEHDYPFVYSLKIGTSVLLYESSPEEIWESSMKEQARRMYKVTGMSTSTISNSVYARITFVHNEEARSSKDFKAKNGAYKQGEELRPSIIMLHTQLNALVQGYDFEINELGEIKRLR

SEQ ID NO: 16881 - protein, 1046 aa, unidentified
  REGION 1..1046: note = Cas Enzyme sequence
MNGFVFGIDQGIASCGWAVLRHPTPGNPTGEIVAMGSWMFDVPETDKERTPTNQIRRGNRLLRRVIRRRAQRMAEVRRLFHNHGLLAGQEPDALKRTSLDPWELRARGLDRALSPVEFAVALGHIAKRRGFRSARKGKEANAVGDDQKMLKALEATRERLGRYRTVGEMFGRDPDFRDRKRNRDGLFDRTQSRDDLAHEVSELFRAQRRLGSDAATAELEEAFTAIAFRQLEMQDSEKLVGMCQFETRERRAAKFAPSFEKFRLLTKLVHLRITTADGERPLTRAEIALAAADLGVTGKLTVKAVRKRIGLPDDQRFTAIKPEDESQDIAARAGEAMHGTKKLRDALGDQLWAELQGQPEQLDRIAHIISFFETADTIGSELRKLALPAGAVDALLTDLGAFSRFKGAGHISALAARSLIPHLESGLRYDQACEAIGYDHAASRWSKREQVVDKQAFNRLVEDMGKEIANPVARKSLTEGLKQLWAMRNRWGLPDAVHIEMARDVGNSLEKRNEIKSGIDKNTAERERQRAEVRELLNIEDVNGDTLLRYRLWKEQAGRCPYTDKMIPPTAIIATDNSHQVDHILPWSRFGDDSYSNKVFCTAEANQRKKGQTPCEWIMASQGEDGWATFVARIEGNSAFRGAKKRNYVLKNAKEAEERFRTRNLNDTRYAARLLAEAVKLFYPEGERQEKGGSRRVFTRPGGLTAALRHAWGVESLKNVDGRRVDDARHHALDALVVAAIGEWEVQRLTRSYQEWEQQGLARPLRHVDPPWGDPASFRREVQQAYDDIFVARPERRRARGEGHAATIRQVRERDGTPVVYERKSIIELPEKRLEDIKDPERNQGVIEAIRQWIADGRPTDQLPRSPAGDEIRKVRLRTKGKPAVPVRGGSADRGEIVRVDVFAKPNKRGKDEFYLVPIYPHHVMNKREWPGPPMRAVVAYKDEEEWTLIDDTFSFRFTLYPRNYVEVVKSTGEVFEGYFGGVDRSTGAVSLFAHNSTKISFRGLGAKTLLTMRKYSIDRFGARSEVKSEVRTWHGVVCTSPTRPG

SEQ ID NO: 16882 - protein, 1177 aa, unidentified
  REGION 1..1177: note = Cas Enzyme sequence
VSLVLGLDIGANSLGWSLYDSDILNYIDSGVRIFSDIDSSGAESNANANVERREYRQRRKLLYRKAYRKKLLFKYLKELGFINFSDFNDFLLAIQNMNPYILRAEALQRQLTTVELSRIFYHFIKRRGFLSNRKQLARTKEEERSVVKEGISATRNAMGENTLGAYLASIYPPDNEPFTENERIRKRFTSREMYIDEFNKIWEFQSQFYPDLLTEENKKLIGDPKKGIIFYQQPLKSQKHLRGKCTYETGKPRCNISRYEYEEYTFYQFVNNIELIDGYGEIRKLRSDEKATILELELALALNSKSRLTIKKIKNALKLNAFLCNYENDVDLPTLLFMRFVNQFFPPHYKKEYIDPDFDKKIDALWQILNYGDDDEWVIDKMKEKRYFPEDPKYNFFYDDHRIELLKKYYHREGYGSLSLKAIKNILPFLKKGYMYHIAVLLGGIRNAFGDDYKNLTQDDINKIEKFVNDVASQHHKEKELTEIISNWLIENYHIQPQQLANLYHHTLENKELDIVERLPQFTENIRNPKVERALHEVRRLINSLIDKYGKPDKIVIEIANEIYLTKKQIINSIKHYSGGKVSKEMEEYPTWKLSSILKKKIQEFQLQNKKVNDEARNYLSNFAGVANPTREMLQKYQLYVEILDKSDNNSNSMKVPLCPYTGKEITLKNLFADGIVDIEHIIPYSRSLNDSLANKTLCYADFNRNLKKNSTPYEYFTKYEPNKWKEVKQRAEKLLPKDKYKRFISENVPDADTFASNKLNDTRYISRIVADYVKQLHCEVQVVAGTITATVRKFWGLNTILNELNKNLYSDDEESKISDEKNREDHRHLAVDAMVLCLITKSIIQRLSTLKSDDDIGTGSKKLEYPWPNFKNDVRKQVENILISLKQKDKIAVWKHQKIFDKGKVHRVTTFTPKGKLHDETFYGYHQHPKTKKKGFVHRIPIENINKMSQVEKIMDKSIRDKIIKYLSSNNLCKNGKEIEKGAFLDKTADGELRYKVYLKNHRGQYVPIKKVRIFEESENNRAILKEKNKWVSPGSNHHAEIYKYQEGKYYQKLVSFWEAVDRVKNKQPVYGDLQNPDKYICAIKKNDIFLLNYPEDLDYSNKKLLSKYLYRVQKITFSGKLEAPYYTFRALNASTLKYEKQELRTASMQAFISLNPKRVFINHLGEIEKIIPIEF

SEQ ID NO: 16883 - protein, 1397 aa, unidentified
  REGION 1..1397: note = Cas Enzyme sequence
MKRILGLDLGTTSIGWALIEEHNNRKKSKIVKLGVRVNPLTVDEKINFEGGKPISTNADRTLKRGARRNLDRYQLRRKALIEILLKNNFISKNTPLTEVGKNSTHQTLSLRSKSAKEKVELEDLAKILLTINKKRGYKSSRKTKVEADGIAIDGMAVAKILYDENLTPGQYVYKLLNEGKKYIPDFYPSDLKSEFTAIWTMQQSYYPEILTDELYQNLQGKNKSQTWAICKEPFNLVGIKLKGTRSEIKKQQFLLRVNGLKQKLELEHLTIALQEINNTINSTSGYLGKISDRSKVLYIDKLTVGEYLYQQIRENPYVSLKNQVFYRQDYLDEFEQIWETQAKHHKELTSDLKAEIRDVIIFYQRPLKSQKGLLSFCQFESWEQTYFDDIKKKERKRVVGQRVIPKSSPLFQEFKIWQNINDLKLIPQRELTSDLFNTEEKGVYKKNEEVKIEEEDRKMLFAEANLRGKLSSANVLKLLGLKSKDWKINFKEIQGNTTNEKLFNAYQEIVKQEGYGIGWEKLSAPEIYEELRAVFPEIGIDANILDFDANLSGNDFDKQASYQLWHLLYSASDDGAISEEDKLKYGTADVNLRKKLHEKFGFKPEYTKIISNISFPNDYGNLSARAIKKIIPHLQDGLDYYEACTAVGYNHSNSLTKEQLDARVLKDKLEILPKNSLRNPVVEKILNQMVNLVNQAIDEFGKPEEVRIELARDLKQTAKEREDQTKYITSATKVNLDIAKKIQQEFGFTPTKNDIVKYKLWLELKPLGHKTVFTNRYIEKKDIFSKKIDVEHILPKALIFDDSFSNKTLCYREVNLKKANRTALDFITQDYKNELEEYLKRVDVLYNKGKNTNNFSKGKYHKLLKSAKDIKEGFIERDLRNSQYIAKKARNMLLEVFKVVTPTTGKITDKLRNDWGVINVMKELNLPKYKALGLTEIEERKNEKTIVKIKDWTKRNDHRHHAMDALVVAFTSHNHIQYINNLNARRDKTHEKHKSILGIEKQITYLENLENGKKKRRYVKPTMHFRVEAKKHLQSILISFKAKNKAVTRNINKTKKKGGYNKKLELTPRGQLHKETVYGKAKLPKTKPTKINKRFSLLDAKNIIHNHQRDLVLKHLGLYENNPNLAFDGKTLKNNPLLWHEEPLKEVLCFEEVYTIRKDISPTLKLDKVVDLGIRKILEDRKKEFGGDAKKAFSDLDKNPIWLNKEKNIQIKRVAITGVSNAEPLHYKKDHLGEFILNKNNEKIPVDYVSLGNNHHVAIYRDEKGKLQEKVVSLYEAVERKNQKLSIIDKAYNNHLGWEFLFTMKQNEMFVFPSEEFDPTEIELLDEKNTKEISRHIFRVQKFTTKDYFFRHHLETTVENNKETLNSAWIRTGLSGIEGIVKVRTNHLGQIVQVGEY

SEQ ID NO: 16884 - protein, 1070 aa, unidentified
  REGION 1..1070: note = Cas Enzyme sequence
MKFTLGLDMGVASLGWAVISEDDNFIDSGVRIFPAGVDNFNSAKEKHPNQDRRIARGMRRRLHRKVERKKAIGVALKELGWMPTNEDALHEWYGLDIYLLRHRALSEKITLSELGRIIYHLNQRRGFLSLRKTESEGDKEAQGMLGEISDLEKAIEETGARTLGNHLYSLYQKEGISTRLRNRHFSRKMLHHEFSEIWKEQIKHYPEILTEALRFGTQGPRVAGKDIKTVKPISRQKDQSLLEQFGLEGMTFFQRSVYWPADSIGKCELEGGNGEYRAPLADRRFQEFRLLQEVNNLRITDHSNPGSPLERRLDKEERDEAIKYLTGKDKPKLEALKKYLCKSKTLTNFPKEHAQVTFNLEAGGRTVISGTPTDCKLKTKKILGDSWTKLSEETKNKIVEALTLPAATDEDIREALEKISQLTEPKIDRLLSVSLGTGYGHLSVVALEKLLKPMREGKLYMHKDAERSALAAAGYERRDQQARTVFDKLPLLDQLTNPNSEIFDPHQPVINNPVVLRSLTELRKVVNALIRKYGKPERIHVEMARSLKMGPKQRKEHQKETRGFEKERAEAVKELESYNIIPNRDAIQLLRLWREQKEQCPYSGRPISQAQLFGGGGEIDIDHIFPFSRSADNSMMNKVVCFRTSNATKGNKTPREWLEDSDPDAYEQLIQRTKSYRFKKRERFYAKEIPEGFVSRDLNDTAWMAKAARQYLSLIVPEAHHVQGTKGTHTSLLRDHWQLHSLLRNDGVDLKNRDDHRHHALDAILIGLCDQRRLKALLSKHKFELKAKVAKEEGRIIYRLKNSGSSIDPPWDGFRDSVETSLNKIWVSHRPKRKVSGALHKETNYGKTPDGDLVRRKPIQELSKKEVAGIRDENIAKIVNEYIEEHGGNPACLKEITDEEPLRMPSGVPIKKVRTAIPYAHLTIREGTPHETHVQSAATHHLAIFSLGNGKHHSEPVTLYEASRRLRAKEPIVQKSYDGMPAEAEFQFHLCKGESIMATIDDKDSLFLFNTMNTNSGQIWFSHHTEGAQNHKDPETGVSLLRTCMPGTFSDKFPNARKVMILPDGQVRNC

SEQ ID NO: 16885 - protein, 1048 aa, unidentified
  REGION 1..1048: note = Cas Enzyme sequence
MIRETTSKPSTEPVVLGLDIGAKSIGWALVRGPETGKPEIVAAGVRVFEAGVDGDIESGQDSSRAAVRRMARQMRRQTHRRVQRKRQLFRLLQSVGLLPATPNTQSTTRDATIKAVDTLLLASLPEAYGTEGDVAAKLPYVLRAEALKRALTPEELGRVFYHLGERRGFKSNRRTDRKAEDTGKVYDGIAEVRSKKGSQTLGEYFAAGDPKKARIRNHYLARADYEEECLKIFDSQQRHHDCLTPKFRRKLSRCLFWQRPLKSQKSLIGRCSLLTTRRRCSIADPIAQEFRLLQAVNHLNIIDPDGNMRVLTNAERAKLLDALRNQGDLTFTAVRKLLGLKKKESRFNLEEGGEKKLPGNRTHQAMTEAIGEDWEKLSDVEKSQLVGIVRGSTDEASLRGQIGAAFPNLLYACDTLDKVVLEDRPAAHCKKVLADLVERMRDGIPYATARADFEATHKLGGPTEPVDQLPSVRTFLPSLTNPAVIRALTELRKVVNELVRLHGKPDMVRIELARDLKKPRHIRQAISDRMRQREGERSVAVQNLKSKGVTNPSRADIEKVMLAEECGWVCPYTGKSFGMIDLIGSAPAVDVEHIFPRRYLDDSFINKTLCVATENRAVKKDRLPAEAYAGDAPRYQQILDRVRAFRSELRDEKLRRFMADKVDADFASRQLVDTAYASREAARYIGLLYGGIVDVRSDRRVRTSSGRLSGLLRSAWKLNTILGTAESPKGRGVDHRHHAVDAIVVALSTDSIVKAVTDSASKYAARSSGRWTLDIPEQDGLLEAATEAVKAIVVSHRVDRRLAGRLHEDSIYSPPRPDGNGNHYHVIRKALTKLTPADITSDKIVDPRVREIIQEQYRVLCERLGRTKPSDVFADEKNLPHLPNKSGAPIPIRKVRLRVRDSAARIGDADHRQRHIMRDADGLHHTAIFVRRKGDKEVWLEEPTSRLEVQDRKRRGSPVVRTISGLDTDFVLHLCKGDSVELDDATGDRTIYVVRGVAGTDIRVVPCWDASTDNRTPETRIRSPNKLRNRNPRVVVVTPAGRVFARGG

SEQ ID NO: 16886 - protein, 1394 aa, unidentified
  REGION 1..1394: note = Cas Enzyme sequence
MKRILGLDLGTTSIGWSLVEENENKEASRIIKLGVRVNPLTTDEKINFEGGKPISTNADRTLKRGARRNLDRYQLRRDTLIEILIKNDLITSDTPLTEIGKNTTHQTLFLRAKSAKEEISLEDFSKVLLALNKKRGYKSSRKTKLEADGVAIDGMAVAKILYNEKLTPGQYVLNLLTENKKHIPDFYPSDLKAEFKAIWKVQNQYYPEKLTEELYQNLQGKNKSQTWAICKKPFGIVGVKLHGNKIEQRLQRYGFRVKGLSEKLDLEHLAIAFQDINNAINSTSGYLGKISDRSKVLYLNKLTVGEYQYQQIAANPHVSLKNQVFYRQDYLDEFEQVWETQAKYHYKLTPKLKEEIRDTIIFYQRPLKSQKGLLSFCLFESWQQTYYDEIKQKERKRTIGHRVVPKSSPLFQKFKIWQNINDLRLVPQRDLAMDLFAVDAIGKYKKNQLVELEEDDRKLLFEEANLRGNLTETAVLKLLGLSPKDWKINFKEGINGNTTNQKLFNVYQEIAKRAGYGIGWEKLSAKEIVSELKIVFTELGIDPSILDFDSTLKKNAFPKQAGYQLWHLLYSASDDGIISEEDRLTYGNNDVNLKKKLHQNFGFKPEYATLLANVTFSNDYGNLSARAIRKILPHLQEGKDYYEACQAVGYNHSNSLTKEELEGRVLKSKMELLEKNSLRNPVVEKILNQMVNLINQVIDEYGKPDEVRIELARELKKTAKEREEASRYITSATKVNLEIAKQIEQEFGFTPTKNDIVKYKLWEELKPLGHKTIFSNRYIEKKDIFSKKIDVEHILPKALIFDDSFSNKTLCYREVNIKKANRTALDFITQDQNADVEEYIKRVESLYEKGNGTISKGKYYKLLKGAKDIKEGFIERDLRNSQYIAKKARNILLEVFKTVTPTTGMITDKLREDWGVINVLKELNMPKYRALGLIEREERKNNKTIEKIKDWSKRNDHRHHAMDALVVAFTTYDHIQYINNLNARRDENHEMHASISGIEKKITYSEKDKNGRSKRKFLEPLPDFRSEAKKHLQSILVSFKAKNKAVTRNINKTKKKNGFNKKLELTPRGQLHKETVYGKSKFPKPKPTKLNKRFTLDEAKMIIDFQQRNLVLDHLKKHDNSPEMAFSSKILKAEPLLWNQEPLNEVLCFEEVYTIRKDISSDLKLDKVVDQGVRRILEQRKKEFGGNAKEAFSNLDKNPIWLNKAKGISIKRVTITGVSNAEALHYKRDYLGNSIENENGEKIPADFVSLGNNHHVSIYRDEKGNLQEKVVSLFEAVARKNQNLPIIDKDYNAHIGWKFLFTMKQNEMFIFPAEDFNPKEIDLMDEKYAKLIVPNLFRVQKIATKNYMFRHHYETEVTNQLDFAYKHIRSISPLENLVKVRINHIGKIVQVGEY

SEQ ID NO: 16887 - protein, 1416 aa, unidentified
  REGION 1..1416: note = Cas Enzyme sequence
MSNLTLGIDLGTNSLGWAIRDIYKDSNQIVNTGVLIFDKGVGEEKGIEFPKVQKRTESRGKRRNYQAEKYRKWELLEFLINKKMCPLTIDELNEWRKYSKEAKRKYPQTKDFINWLQYDFNSDGKPDFHLFNGNKHENHYLFRAKAISESEDDKRQFQNNPHILGRVFYHLVQRRGFKGRDEEEAKTMLKGSNDGFTEGRDKIADYIDKHKSLGAALYYYQKDKSNDHQKTRIRQRYNLRKDYENELKEICRVQGLDDNFYNKLWKAIIWQRPLRTQKGSVGLCTFEKNKRRAPISHPLYEEYRTWIFINNLKIEAPENWNQELYLKEKIYPIFYKTGNDFSLKTILKQLDKDKAIITSKFALRENTKVISAKLLKQLEDILGEDWKEKYAWKKAFVREAQPNKKENNYYTFEDVWHILFSFDSEEKLNEFAVEKLELPEDKAIKFSKIKLQQGYATLSLSAIKKILPYLQKGFIYSKAVYLANLHKVLGTHEITESLINHFAQEVDGIYETVSLEKKLNNIVNGLFRTELMSEGDYHLRENEELDSADESLILNKIIDILGEKTWNETYKDDKKKYLNYVKRHYKEFLQKPIQAKKASFIEQPRIHQRIFNFLQEYYPESVPGDNIKYLWHPSEQEKYLNAENYHKVKNNRKHFFIKESELQSFLRLNQDAETEGISLKLLEDPEPISKGFKNPMALKTLHKLKQLLNYLLQTEKIDPHTRIVVEIARELNNTNYRKALESWQREREKENNNYKKVIEEINEEAGTSYNPEDKKLIRKIRLWEEQERKCMYTGKTINKSNLLNGEHYDIEHTIPASISFDNELKNLTIADKDFNSKIKGKKFPTQLDNYDSSISLNGEILQPINKNIEAIFGKRTTEKKVIKKYGKQKTITAIKWKKINDLEKQLDEYLKKTSYASTKEIKDYFIQKRHLIKFDLDYLKQKLQTFTIEEYKSSWRNSQLRDTQIMTKYAVPYLKTIFNRVEVQKGNVVNSFKEIYKVKLSSEKKNRSVHSHHAVDAAILTLIPKPSYRDEILKKYQLEIDNRTGKTYHENPKDWTNFKVSFIKDIENETLINNLKEHRTLTPTFKKIRKRGKIVRNENGKPRWAKGDSIRGQLHGESFYGAIKRAKRDENNKIIFNDFKKMELQDEIKLVIRKPLLYAKDSSSPGFKNLGEIEKSIVDKDLFKIIESQINNAESFKLALEKGIYMLKKNGERINKMRHIRCFDRLKHSTAVRPHEHDFISNKKYKQTTYAQNGENVFCLYYKGSVKEKEERAISIVGIFDLAKLDIESDKDFIDIPLFNSTKKGKVELPLYAVLKSGQKAIFYKECIEELKDLEEKELSERMYKMYQFEGDGRIKLKHHLISGSNTDIKKEHKEISAMNFDEYSPLLRIRSKGWDFAIEEIDFEMNLDGSMTWKF

SEQ ID NO: 16888 - protein, 1416 aa, unidentified
  REGION 1..1416: note = Cas Enzyme sequence
MSNLTLGIDLGTNSLGWAIRDIYKDSNQIVNTGVLIFDKGVGEEKGIEFPKVQKRTESRGKRRNYQAEKYRKWELLEFLINKKMCPLTIDELNEWRKYSKEAKRKYPQTKDFINWLQYDFNSDGKPDFHLFNGNKHENHYLFRAKAISESEDDKRQFQNNPHILGRVFYHLVQRRGFKGRDEEEAKTMLKGSNDGFTEGRDKIADYIDKHKSLGAALYYYQKDKSNDHQKTRIRQRYNLRKDYENELKEICRVQGLDDNFYNKLWKAIIWQRPLRTQKGSVGLCTFEKNKRRAPISHPLYEEYRTWIFINNLKIEAPENWNQELYLKEKIYPIFYKTGNDFSLKTILKQLDKDKAIITSKFALRENTKVISAKLLKQLEDILGEDWKEKYAWKKAFVREAQPNKKENNYYTFEDVWHILFSFDSEEKLNEFAVEKLELPEDKAIKFSKIKLQQGYATLSLSAIKKILPYLQKGFIYSKAVYLANLHKVLGTHEITESLINHFAQEVDGIYETVSLEKKLNNIVNALFRTELMSEGDYHLRENEELDSADESLILNKIIDILGEKTWNETYEDDKKKYLNYVKKHYKEFLQKPIQAKKASFIEQPRIHQRIFNFLQEYYPESVPGDNIKYLWHPSEQEKYLNAENYHKVKNNRKHFFIKESELQSFLRLNQDAETEGISLKLLEDPEPISKGFKNPMALKTLHKLKQLLNYLLQTEKIDPHTRIVVEIARELNNTNYRKALESWQREREKENNNYKKVIEEINEEAGTSYNPEDKKLIRKIRLWEEQERKCMYTGKTINKSNLLNGEHYDIEHTIPASISFDNELKNLTIADKDFNSKIKGKKFPTQLDNYDSSISLNGEILQPINKNIEAIFGKRTTEKKVIKKYGKQKTITAIKWKKINDLEKQLDEYLKKTSYASTKEIKDYFIQKRHLIKFDLDYLKQKLQTFTIEEYKSSWRNSQLRDTQIMTKYAVPYLKTIFNRVEVQKGNVVNSFKEIYKVKLSSEKKNRSVHSHHAVDAAILTLIPKPSYRDEILKKYQLEIDNRTGKTYHENPKDWTNFKVSFIKDIENETLINNLKEHRTLTPTFKKIRKRGKIVRNENGKPRWAKGDSIRGQLHGESFYGAIKRAKRDENNKIIFNDFKKMELQDEIKLVIRKPLLYAKDSSSPGFKNLGEIEKSIVDKDLFKIIESQINNAESFKLALEKGIYMLKKNGERINKMRHIRCFDRLKHSTAVRPHEHDFISNKKYKQTTYAQNGENVFCLYYKGSVKEKEERAISIVGIFDLAKLDIESDKDFIDIPLFNSTKKGKVELPLYAVLKSGQKAIFYKECIEELKDLEEKELSERMYKMYQFEGDGRIKLKHHLISGSNTDIKKEHKEISAMNFDEYSPLLRIRSKGWDFAIEEIDFEMNLDGSMTWKF

SEQ ID NO: 16889 - protein, 1380 aa, unidentified
  REGION 1..1380: note = Cas Enzyme sequence
MKKILGLDLGTTSIGWAFVHEAENEQEKSTIINTGVRVVPLSTDEKINFNKLNAVTAAAHRTASRGARRNLQRYKLRRQELLSILQGHGFISKNDILSENFENSTYFTWKIRAHAASDPISKKELAMVFLAINKKRGYKSSRKANNQEEGQLIDGIGIAKKLIEENLTPGQFNHKLKTEGSRYLPDYYKSDLHKEFEKIWKTQSIYYPEILTDTHLKELDGRTNKATAYYFEKVMLIERAENKGKEKKLQEYEWRSDAVKQQIPLEQIAYILTELNNDINKSSGYLSAISDRSKTLQFNNLTVGQHQYAKLFGMPLASQKNQVFYRQDYLDEFNTIWELQSKHHPELTDDLKVEIRDVIIFYQRRLKSQKGLISICELESRKRTTTVDGKTITKLTGPRVAPKSSPLFQSFRIWSNINNIVVTSKTDKKQIYQLDEETKKALFKELSWRSSMTDNQFLTWLFAGSKEKVGDYEIKYGKIEGNRTNEELLNAYLKITVLEGYDINTKQDKVDVVKDVRSCFKEFGIKDSLFHFKWDLQDTTMIATQDSYELWHLLYSYEDDSSNTGLDSLNNVLIEKYGFATNHTGIMSSVTFEKDHASLSARAMRKILPYLEDGMVYSDAATAAGYNHSRSVTKEENLKRELKDQLEILTKNSLRNPIVEKILNQMINVVNAILAEPSLGRPDEIRIELARELKQTAKQRADATTQIAKATREHEEYREIIKKEFGLPYVSKRDLIKYKLYRELKSNGYKTLYSNTYIKPDELFSKKFDIEHIIPQSIRLDDSFSNKTLELRDINIEKGSQTAIDYCQRKGYEDRFIKTVQTLATVIDGISPRKMLKLFTKIEDVSTDFNERDKNNTGYISRKANEILIDVTRNVYATSGTITSMLRSDWELIDVLKELNWSKYDTLGLTYYETNKDGQKLPKIKDWSKRNDHRHHAMDAITVAFTKPALIQYINNKSAKSKGNIIISNIEEKFTYQDKDGKRRFVKPAPDIREQSKKALASILVSHKAKNKVVTDNINIIKIKGGTIKKKQSTPRGQLHLETVYGASKFYETKLETINASFDEQKINTVSNKQQREALLSRFRESGNDSKQAFTGKNALSKNPLKLSNGDELPLKVQTVALQTRYTIRKPINADNFKDEKTIAKIIDIGSRNIVLKRFLESGKNSKAAFSNLDENPMWLNKEKGICLKTVTILGISNAVSLHVKKDMNGMPLNDPTGKEIPADFVNTGNNHHLAIYESPTGDWDDNVVSFFDAVTAVNNKQPAVAPRNEKGWLLKFSIKQNETFLIPPSEDFFKDEDLKDISNKSALSPYLFRVQKFSKLQYGNSYVREYMFRHQLETELNDKKVLNGIAFNTFKSLKPMKGIIKVRLNHLGNIVETYT

SEQ ID NO: 16890 - protein, 1467 aa, unidentified
  REGION 1..1467: note = Cas Enzyme sequence
MKRILGLDLGTNSIGWAQIELDFKNKKGKIIGLGSRIIPMSQDILGKFDAGQSISQTAERTGYRGVRRLYQRDNLRRERLHRVLNVLGMLPTHYKESIDFEKKLGQFKPETEVKLPYIMNEDNQYSFIFQDSFQEMADVFKANGYTENIPYDWTIYYLRKKALTHKIDKEELAWLLLNFNQKRGYYQLRGEEEEVDKNKSEEYYALKVADVQATEDNNAKGIWYNVILENGWIYRRQSKDPLFEWKDKTKEFIVTTTLDNNGNVKTDKEGNEKRSFRAVDSEKDWIAIKKKTENDIENSEKTVGTYIFDTLVKNPSQKIRGKLVKTIERKYYREELEKILDKQLSEHSDLFNDNALKSCVEELYPRNEAYQNTLMAKDFKHLFINDIIFYQRPLKSKRSSIADCPYEVRSYNKDGKIVKQPLKCIPKSNPIYQEFRLWQFIHNLKIYQKEGKKNGKPAIDIDVTKQFLDNSENYATLFKQLNDKKEINQKQLLALFKLKETSHRWNFPEDKKYPCNETRNQIASRLSKLDGLDVDAFLTQEKLYALWHLIYSVTDKLEYEKALITFAKKNDLPVADFSENFKRFPPFESSFGAYSEKAIKKLLPLMRMGKYWNEEVISNEVKNRITAIVERLNSIDYDIDKLDTIADDDIPKRLLKSFAKSKNRTHPLQGLNTYQACYAVYNRHSEIGDIIQWKQPEDIDNYLKTFKQHSLRNPIVEQVVLETLRVVRDIWKNYGSKEIKNGREIYKSLFDEIHVELGREMKNDKKTRERISEANTERENTNERIKALLEELKADPEVTDDVRPYSPSHQEILKIYEDGLISSLKEVDEGIEKIRKNNKPTKSEIVKYKLWLEQGYISPYTGKTIPLSKLFSTDYQIEHIIPQSRYFDNSMNNKIICESAVNEEKDNKTAYEFIKEQGGAIIDIGHGKTVQLFSLEDFENHCQTYFKKNKSKLERLLSEDIPEGFINRQLNDSRYISKVVKGLLSNIVREDDELEATSKHLVPFTGAITSKLKQDWGLNDKWNEIIAPRFKRLNDITQSNDFGYWDEKINAFRIQVPKELERNFSKKRIDHRHHALDALVIACTTKDHINYITSINTERKNYALVSKLRNTETIIDTNGHIRTVAKEYLKPWQGFTTDAKDLLEKTVISFKSNNRVINKTNNKIWKWVDENGQLKKKLVKQNKGQNWAIRKPMHKETVSGKINMEVPKGKIATATRTELSDIKTRKRLESITDVSIQKILNNHLKNYIDDKGNENFELAFNQDGVDKLNKNIQKLNGGKPHQPIKKVRLYEVGVKFSIGETGKKSTKFVEAAKGTNLFFNIYWDEKKQKRTFDTVPLNEVIAHQKQVAHLPKNERLEVPIDNSKGKFLFSLSPNDLVFVPNEEELNNPSMVDYEKLNKEQIERIYKMVSSSGNQCFFIKSEVATTIWNKKEYSALNKMEKDINDDMIKNICWKLKTDRLGNLKGIKP

SEQ ID NO: 16891 - protein, 1467 aa, unidentified
  REGION 1..1467: note = Cas Enzyme sequence
MARILGLDLGTNSIGWAIVEKDGDGSSLIDKGARIFSEGVKSEKGIESSRAAERTGYRSARKIKFRRKLRKYETLKVLAKNKMCPLTLEEVEKWRQSGFKDYPLNEAFLKWLRTDDDKNINPYFFRDKASKGKASLYEVGRALYHIAQRRGFLSNRLDQSAEGIFEEHSPKIEDVLDNTTTIAELRTEITDYFDGLDIFDKNEKTGFKKDLDEGEKKLKSLFIALEKIIKTNEKDYEKAIVELKERLNRKEDLGAVKQKIGEISQAMKDGGFKTLGQYFHSLYNAEVELENKTTKEIEKFNRAKIRNQYTSREEHYLTEFEIICKAQNIEGINDAELLPEKKYSGLAKDLYKAIFFQRPLKSQKGLIGKCSFEKSKSRCAVSHPDFEEYRMWTYINTIKIKTPEDETLRFLKQEERQKLVSKFLRKKDNFNFEDLAKELIPKGATFDFYKSFNAKSSHYLFNYKPKDSVSGCVVSASLKNVFGEDWKTKIFSYKTKNSKGESVNRNVDYKDLWHLISVSNNDIYLQEYAKENLSLDEKRAKSFSKIKLKKDFASLSLNAINKISPYVREGLLYSHAVFMANIENIVDKKIWNNETHRKFIQNKIAKIIETNTYDNGLLDVVNGLIKEYKKESVYYSKEAETTFKKDLQKKLISFYKYHKIEDDQEQIFTELFPVFMEQLIKYEFKPVKRLDEKVLEFLSGENEDGEIFCTDEKQLKKLYHPSDIEVFKKKIHKDENGNEQLVLGSPLTSSIKNPMAMRALHQLRKVLNALILEGQIDPKTRIHIEMARELNDSNKRKGIQDFQNENKKAREAYRVEIKKLYFEETKKEIEPTEDDVLRYQLWIEQDKKEIYEEGKSIGISKIIGNNPDYDIEHTIPRSISQDNSLMNKTLCSKRFNREIKKTKMPVELANHEQILSRVDHWRIEAGKLTWEIDQIVKSTKAQATKEAKDRKVRKRHFLSLKRNYLQGKYDRFILKEPKIGFKNSQIPDIGIITKYSQAYLKSYFNRVESVKGGMVAEFRKIWGLQESYQENGKKYYEKKDRSKHTHHTIDAITIACMTKDKYDALASAWTLEDKEQIGAARKILADSKPWKTFTEDLKQTEEEILVSHYTPDNVKKQSKKIVRIRGKKQYVAEIEKDQNGKNISKKDANGKIIYQIDKNGERIPRLQQGDTIRGSLHQDSIYGKIRTPLNFEDIRCVIRKDLESIKATDIENIVDETVKEKVRTAKENKILVFSSNAQQKNKLNGTVWMNEEKGIPIKKVRLYANSVKNPLEIKEHAALSKSRHEHKQKVYAQNDENYAMAIYEGVDKKGNVKRSFESVNYMDAGAFYKLSNKNNNGDFLVPLMHLKTQLSLKYEVKKGDLVLFYQENKEELNKIDSEDLVKRMYKVIGFEGDGRIQFRHHKTAMQQSSSNKEELTIVKFMTDNKLKNSQVDFENPVPWLRLTMGNFNFLLNKAEFEINSIGKIIVF

SEQ ID NO: 16892 - protein, 1192 aa, unidentified
  REGION 1..1192: note = Cas Enzyme sequence
MLMSKHVLGLDLGVGSIGWCLITLDAQGDPAEILGMGSRVVPLNNATDAADFSIGKAFTANQERTARRTMRRGFARYQLRRYRLRRELEKVGMLPDAALIQLPLLELWELRERAATAGERLTLPELGRVLCHINQKRGYRHVKSDAAAIVGDEGEKKKDSNSAYLAGIRANDEKLQDEHKTVGQYFAEQLRQSQSESPTGGISYRIKDQIFSRQRYIDEYDQIMAAQRVHYPDILTDEFIRMLRDEVIFMQRPLKSCKHLVSLCEFEKQEKVMRVQQDDGKGGRQLVERKVKFGPKVAPKSSPLFQLCRIYEAVNNIRLTRPDGSPRDITPEERVKIVAHLQSSASLSFAALKKLLKEKALIADQLTSKSGLKGNTTRVALAAALQPYPQYHRLLDMELETRMMTVQLTDEETGEVTEREVAVVTDSYVHQPLYRLWHILYSIEERDAMRRALITQLGMKEEDLDGGLLDQLYRLDFVKPGYGNKSAKFICKLLPQLQQGLGYSEACAAVGYRHSNSPTSEEITERTLLEKIPLLQRNELRQPLVEKILNQMINLVNALKAEYGIDEVRVELARELKMSREERERMAEGNRRREKENKAIAEKIRECGLFPTKSRIRKYMLWEEAGEQCLYCGQILTLSQCLNGDDMEVEHIIPKSVLYDDSYGNKTCACRRCNKEKGNRTALEYIRAKGWEDEYMERINGLLDKKAISYSKHQRLRWLKEDIPSDFLERQLRLTQYISRQAMAILQQGIRRVSASEGGVTARLRSLWGYDDILHTLNLDRYDSMGETERVSREGETTEKLRIKDWSKRKDHRHHAIDALVVASTRQGYIQRLNRVSSESEREAMSGEIEMQKVTKTDKLSLLERWLTQRPHLSVRAVSDKVAEILISYRPGKRVVTRGRNIYLRHGKKCVQSGLLVPRGPLSKETVYGQITVNGEPQIVCKYDLHSLKAKDVDYVVDLALRKRLKELLAQHGGKEKEAFAGDVYMDEAGTQGPIRSVRCFTGLDRGKMKAVKYDEQGDAVGFVSPRNNHHLAIYRTPKGKLEESIVTFWDAVDRARYGIPLVITYPREVMEQVLQRGDIPEAIQNLLPSSDWVFVDSLQQDEMVIIGLSDEELQRALEAQDYRKLSEHLYRVQAISSRDYYFRYHLETSVSDMRNSSGYIPKFYRIRSLKDYEKRNLRKVRVDLLGRISLL

SEQ ID NO: 16893 - protein, 1178 aa, unidentified
  REGION 1..1178: note = Cas Enzyme sequence
MDKKILGLDLGVGSIGWSLITLDEGGNPAEILGMGSRIVPLTSDDMQEFQKGKAITKNKDRTMKRSARRGLDRYQQRRAKLSRLLSEFGLGFPRPLMSLSPLTLWGLRADAATEGKVISLAELGRVLYHLNQKRGYRHSKSDESSKQDTEYVAAVKTRYAELKNESLTIGQYMYRYLSASAERGADALSCVHYRVKDQVYPREAYMEEFDRIMAVQQKAYPEVLTSVVLQKLRDCIFFQRPLKSCKHLVSYCEFERKTREVQIPVVGADGTTSYKTKIVDIGPKVAPVSSPLAEVCRLWESINNVRIYYPDGAVYPLSLEHKQAFFNKLQESESLKFSDAKKIIGAKAKDKLWCNDLLKSGIKGNRTTATLRKLIEDYPQYKALLRFDLKQEDSCRVDLSTGEVLPLISVSYLNEPLYKLWHILYSVAEREAMGNALRKQLGVEQGDLDKGLLDACMKIDFTKQGYCNKSAKFMCKLLPYLQQGYMYSEAADLAGYKHSDSKTKEELEHRALKPRIELLPKNSLRQPIVEKVLNQMINLVNALKDKYGEIDEVRVELARELKMGREERETTSRRIAANEKDNKRVAEAIAEYGTPTKNRIQKYKLWEEANYECIYCGKQIGLANLFSDGEAEIEHIIPRSVLYDDSMSNKTCACRSCNKAKNNRAAMDWVLTQTEEFQTKYFNRLEGLVATKRLSNGKRQRLMTLLKDIPEDFIERHLRLTQYISRKATEILKDGIRYVWSSEGSVTSTLRHLWGYDKVLEDLNFERYKSMGETQTILVKRGSVEQEVERIKDWNKRKDHRHHAIDALVVACTRQSYIQRLNRLSSEEDRQSMQSELGSSYAPSKEERMQLLDKWLTAQPHFSVQAVRDYVRGILVSFRPDRRTYTKSRNKVKIKGRVSLQTGILTPRGALSEETIYGAIQVGKRKEIVCKYRLENLQAKDVPSIVDKGIQRIIKARLETYNNDAKKAFAEPLYSDAAQTKQIRSVRCFTGRVHEKMIPLRRNDAGEEIAFVAPGSNHHVAFYRDSKGVLQEAVVSFYQAIERAKYQLPMIIKDPRAVVEEALERNVPDSVLSALPHSSWTFVESLQKNEMFLIGLSDDEIARAIKEADRATLNDHLYRVQKYSSKYYCFRYHIETLLDEIIEGDIPKLYRIRSEKSYLELNPRKVRVDLLGNLSLLE

SEQ ID NO: 16894 - protein, 1096 aa, unidentified
  REGION 1..1096: note = Cas Enzyme sequence
MKILLAHLGVLRRKEQLDLPGCAWPWLLAARVLRGGKKLTWAELWDVLRWYAHNRGYDGNKGWSMHDAASNEDSEKERRAGELLTQFEKKYGRAGTMAEVFCDVLRLDPLGAVQSSMQRVRNLGAAFPREGIECEVERILRAHVGVLNNLDDRLINALMRDHTALPGPDLRLPARYGQRLNDGSLSPGGLLFGQLVPRFDNRIIARCPITFERVYRSVKAETGDEEKAKHEAGKQAKVPGVDCVEFHRFRWAMQIANVQVATGDARKTRLLTAAERHALNEEMEKHGFLTPGDFKKAVRALTNKAPDNLDRTLALPDADRALVLDPVRRYIHSDSLVSALWPVLPRQLQKRLSGQWRRGHAVTVAELLDDCGEGRAAAEAVCERYLDAQNTKKRKKDEPLTRETLQRTPLHVEPPNGRAPHTRGVMREVVDFVFSTDRHPAEEGGPLYRSEAIRQAQLQRALDEQTNNHLVRHRLKLLVGETEEEAKQHPKQRRLKGLFRDLVNSYAAGDLTRITRITIEVNREVREMSGKTAQEQAKLQGQQLAHFKGVAKKLAEAYEGMGVHVGPGLIRKGRIAEDLGWTCPYTGKPYDALDLLHRRVDKDHIIPRTDRASDSLDSLVITFSEINKMKGKRTAVRFVEEFQGQLVQGLPQVMIKPLSAYLKDVEALETFKGHDDDQRRKKNRKRLLLLRDYVEKEFMPGDLTQTSQLVRLGAEALQKHYVGAAKQPVITSLPGSVTGAVRKSWNLIGCLATANPQVLNPEDLDEDGRPKVRTKTEIRGITHLHHALDACVLALASHLLPRDGGAWELLVKRRLNADEQRRARRLFGSLIEITKDGDLRLADLEPALKAQICERLRERRVVQHLPADVSGLRCKETVWRVFDPADPHPNSQRLARWLAQKEIVVPVPGAKTVLIICRKRRDAETAGEGSEGGKTFRETRTWRWVYEIKDKSALLGLAPEGDVAAAKLKRTKAVKVLGDNFGLALDPEPTLIRPRKVWHQLDALRARNGDKPVRVLRIGCLIQVKEKTPRSDYRGVWMVRGTTLNQRAGFLVDLSPADQILYRGQPGCYQNVSVATLLKCGLEVVKAPLCGFTPIP

SEQ ID NO: 16895 - protein, 1109 aa, unidentified; identical to SEQ ID NO: 16494
  REGION 1..1109: note = Cas Enzyme sequence

SEQ ID NO: 16896 - protein, 1020 aa, unidentified
  REGION 1..1020: note = Cas Enzyme sequence
MRVLGLDGGIASIGWAVLEIEGDAAGIVAAGSRTFDAPETAKERTPSNAVRRLHRGQRRVIRRRRQRMTALRALFAEHGLLPAAQRDALKQPGLDPWLLRVEGLDRLLTGVELAVALGHIALHRGFRSNSKRERGANAANDTSKMLTAMDATSARLGQCTVAQLFASDPAFADRKRNRNGDYSRSVQRKDLEREVRALFSAQRRLGNTATSPDFEAAFADKAFSQRPLQDSEKMVERCPFEPDNKRTAKRSYAFEMFRLLSRLANLTLTAGAAEWRLSPEQIGQVAADFGTQKQISYRRIRKLLDLDPRTRFASVSPEDEIRDVVARSGNAAEGTATLRDAVGDTAWRTLLHAPETLDRIAEILTFRDDPGSIRAGLDETGAEPLIVEAIMAAMERGAFARFTGAGHVSAKAARALIPHLARGLKYDEACTEVGYDHAAPREIQLEDVRNPVARKALGEMLKQVRAVVQEFGLPERIHVELARDVGKSAEERDEITSGIEKRNKEKDRLRGEFAELLHHEPGSGDDLLRFELWKEQNCRCLYTDEMIPPESIVATDNTVQVDHILPWSRFGDDSFVNKTLCMAHANQAKQGRTPFEWFSADKPAEWAAFEARVEGCKAIRGRKKRGFYLRRNAAEVEVRFKARNLGDTRYATTALLNKLKRLYPTADLRARPGALTAKLRRAWGLEDIKKDESGQRREDDRHHALDAIVIAATSESMLQALTHASKEAERQGRPRGFLFNDVPEPWPGFREATRDVVMNVFVSRAERRRARGEAHAATIRQVREIDGQSIVYERKPVEKLTLADLEKIPVPVPYGRAVAPETLRDAMVDDLRRWIEAGKPKDAPPLSPKGDVIRKVRVASKDKPAIDLRGGVADRGDMARVDVFGQADKRGVRRFFLVPVYPHQVADQESFPRPPDRVVIQSKPEEEWTVIDARFDFLFSLHGNSLIEVITPEGEVIRGYFKGLDRSTGAISIAMPQNQRLLRRGIGARRLVAFRKLTINRLGRIDVIKSEVRTWHGAAC

SEQ ID NO: 16897 - protein, 1038 aa, unidentified
  REGION 1..1038: note = Cas Enzyme sequence
MKFAQNLTFGFDIGIASCGWAVVEDGEKVVNMGVWLFDAPETDKERTPTNQLRRTARGLRRVLRRRRQRMRDIRVLFEIHGLIDARKPDAFAAKKREDPWTLRAEGLERLLAPRELAVSLAHIAKHRGFKSNSKRDKGANAPKDTKGMLGALEETKTLLANYRTVGQMMARDSRFATRKRNRDGDYSRLVERDALAREVALLFDSQRRLRNEAATAELEKAYADIAFFQRGLADSEDRVGFCRFFPEERRAAKRSYSFELFRHMSRLANLRLRGGRALTADEIRLASADFGAQHGLTFKALRKTIGLGDGERFEGVPLDEEGKRQVVSRNGDSASGTFALRKALGAAWAGLLAKPETLDRIASVLSFRESDVSIAKGLESLALEPTLLNALLEAQKRGDFVEFSGASDLSAKACRTLLPHLAQGLDFTKAREAANLRDPDGRAGSLSGLVAEGNIGEALSEFRKLAREVIDDMGNPIARKALSESAKQFVALAREYGIPGRIHVELARDVGKSKEERDEIKNGIDKRNAEKDKLRTRFEEHLGRPPRNAEDFLRYELWTEQQGFCLYTGEPIPVELLASGANAIQVDHILPWSRSGDDSFVNKTLCFAKANQEKKGRTPFEWFEAAKSPEQWETLTKRVETLRSIKGRKKRNYLLKDASVLETKFRDRNLGDTRYATRVFADLLRALYPKKDAARSVFARPGALTDRLRRGWGVQGLKKNAEGERIPDDRHHALDALIVAATSEAMLQALTKAFQAAEKLGSPRDFGRLDPPWPGFLEQAMGAYEKVFVARAERRRARGQGHKETIKGVETTPDGQIVYERKTVEKLTLKDLANIPDPERNAALVEALRVWIEAGKAKGTKPTSPQGHPIGKVRLKTNDKVAVEVRGGTADRGEMVRVDIFTKPNKRGKNEFYAVPIYPHQVMDPSDWPEPPNLAIQPAKPEAVWPVMDQTFKFKFSIYALSLVQFVKSSGEVFEGYFRGVNRSTNSFAVSPHTTKVQVIDGIGAKTLFSIRRFQVDRLGRRFEITSEQRTWHGVVCK

SEQ ID NO: 16898 - protein, 1076 aa, unidentified
  REGION 1..1076: note = Cas Enzyme sequence
MSSALERPQKYVLGLDLGSASLGWALIALNDADNPTSLIRAGVRIFEPGVDGTSMEIEQGKDQSKAVERRTARLHRRQLRRRAARQRDLFRLLQRHSLLPAPGTLDGSPEEQRHSILNELDQALARKWQSAFPDNRFAQLPLYYLRKRALDEPLEAYEIGRILFHLIQRRGFLSNRRENKQNPDQKKELGQVKAEIHSLEQEIQNAGARTLGEFFAGLDPHAQKVRRRWTARKMFQDEFEKIWETQVIHCPNLLTPELHDKIAHLLFFQRPIAAQSHLVGKCELESGKQRAPWAAMEAQRFRILQKVNDLRLVNPGSLISDPLTEEDRQRLYSLLDREGDQTFKAIKKYLSFPTDVQFNLEKGDEKRLRGNRTQAAMRKVFADRWDTMSAGKQHQIVENWRNSESDEALIREAEEQWSLDDTAATLLSEQIPEPGYCAVSLTAISKLLPLMQCGKSFKEAETEVYGARFSGGVVFDSLPEVRKQLESLRNPAVERALTELRKVVNAIVREYGKPYEIRIELARELKKPRQERLEATKKNRTRQREREDIAGRILRECGLSNPSRKDIEKARLHEECGGICPYTGRPIPFSTLFDNSEFDVEHIIPRSRYPDDSFQNKTLCYLPENRDVKKGQTPWEAYGKDEQRWAEIMTRVGSWKNRGKMARFSIQTEEALGEFSARQMNDTRYASVLAARFLGSLYGGRDVVDGDNARQVIFASSGAVTASLRSSWGLEAILHEIVPAESGESRGKPRTDHRHHAIDAITIALTRPKVIQSMARTASLEPWQIDSRAWRKIELPWRDFVPSIRPHIEQMLVSHRPEHKMSGELHKGTNYSAPYNYKGKPTVHTRCLLSALSAAKIADDEVIIDTAVRDAVRKKLAELGGNPKLFDRPENAPCLCARDGRLIPIRKVRIRETKNPVKVGKGVRERFTSSGGIHHVALFVTRDEKRREKWDSEVAQVTEIYRRCPRNDRRKSRSQPVVIESPISRQLKSDPEAQFLFSVMKDDTIEVTDPNGIYILRVKKFSDNKQMWFVPVNDAHDDTQQMKLGITWSKTPNSLKELRPRKVVVDLLGKVHPAND

SEQ ID NO: 16899 - protein, 1061 aa, unidentified
  REGION 1..1061: note = Cas Enzyme sequence
MAQSGKPYILGLDLGVQSVGWAAIDLDADGQPCRVRRAGVRCFDSGVGSETQISMGKDESGNATRRQARLQRRQLWRRGRRLKKVFNLLRKAGLLPADEVRTPQQRHELLNKLDAELAKTYIPDGDRIAGHLLPYRLRALALDQTLPPFAFGRALFHLAQRRGFASNRKSAAKKGEEEGDVKAGIAELHQKMQDSGARTLGEYFANLDPEEQRIRKRWTGRQMYLDEFEKIWAAQSPHHSGLTEDWKQRIHNAIFHQRPLKPQKGLVGLCELEPNCRRAPRASLEAQRFRYLQKVNDLEISAPDGEIWRLCDPEHADLRARLIDFLETHAEVEFKSMRSKLGLKKPKGSETDYDFNLEAGGEKKIKGNATGAKLRKVLGNGYDKLTQDHLSAIIEDLIAYEKKEPLARRLTARYGIESQLADDLADITLEDGYASLSREAMRKLLPLMEKGVRFATAKKEVYGEYAGSKELRAVLPPVLETVPQLRNPVVLRGLTELRKVANALIREYGKPELVRVELARDLKRSGKQREDIWKQNRQNEKARDMAREEIRAKKELGIDEPRRSDILKVLLAKECNWECPYTGKTICMEALLGRNPQFDIEHIVPFSRSLDNSFINKTLCDVKENRDVKQNRTPYEAYSAHETKWQEIIARVKRFRGLAAHAKLRKFQQKELDGDFAARQLQDTRYMSKLAAQYLGLLYGGQIDGDGRRRVQVSAGRVTAYLRDEWGLNAILNDGGDDEKNRGDHRHHAVDAVVIALTSAGTVKKLSDSAELAEQHGNRLFTPIDKPWDSFLDNVRTSIDAINISYRVNRRVTGALHQETNYSKAYKSHDENGKKELEYRHVRKPLQNMSGDEVENIVDDTIRKLVQAKLQQIGGEPKKVFADPGNHPYLIAGDERKVFIHKARIRKPVGVIALGKSSSPRYAAPGSNHHMEIVTVLDEQGKETRWEATTVTLMEAAQRVRDGKPVVQREHGPGMQFKFSLAGGEYVELEDDDGNRRVVRVTVLSGKIVEFRLHTDARPITLLRQTKGGRAGLSKPVDSLRKAKARKVVVDPLGNVLKAND

SEQ ID NO: 16900 - protein, 1362 aa, unidentified
  REGION 1..1362: note = Cas Enzyme sequence
MKKKAEKIYLGLNVGTNSIGYAVTDEQYRLLKFNGNDAWGSIVFDAASSNEDRRNHRLARRNLDRRQQRIVWLQEIFAKEISKVDDRFFIRLSESFRWREDVQDRYVFFNDKEYTDVQYMKEYPTIHHLICELMDNKTPHDVRLVYLACAWLITHRGHFLNNLNVEKLDEIMDFSSVYQNFINYFTENGYKRPWGEIDVSALSEVLKQKTGITVKNKELQNILLEGKKPEKSGTEEFPFSQDSIIRLLAGGQCKLKDVFCKEEYLDFGSVSLGMDEEKFDEISGSIGEDYDLLIALRGLYDWSVLANLLNGHSETISMAKVQMYEQHGKDLQILKYFVRKYVPDKYNEVFRKAKADNYVAYTGHMDKDTASQIKKKAKAEEFSKYVLKLMSPIKPEKIDLQSYEDMCERLKLNIFLPKQKNTDNRVIPHQLYEYELIQILKNASVYLPFLNDTNNGISEADKVLSVFRYKIPYYVGPLNEKSSFAWISRKAGKITPWNYKDMVDEDASENAFIRRMTNKCTYLPTEDVLPKDSLCYQKFMVLNEINNLQIDGLKIPVKAKQGIYHELFEKNKKVKRKDIEEYLIRNNYLDKDSTKLISGIDEQIHSGLSSYCAFFNLLNKKILSEDDVERIIERASYAEDKSRVIKWLRKEYPGLSEDDIRYIARIKIRDFGRLSKTFLTGLKGCDVSKGFDGQDVEMISILQTMWETNDNLMEILSDKYTFLEAVEAFTQEYYTGKKKSLKERLDEMSVSNSVRRPVYRTLAVVKDIEKAFGKPDKIFLEMTRGGQADQKGKRIKSRKQQILDLYDKCKDDVHDLIRQLEAMGEYADSRLQSDRLYLYFMQFGKCAYSGAHIGFEQLMAGSVEYDIDHIYPQSYVKDDSLNNKVLVLSDLNGTKDNIYPVSPEIRGKMQGLWSWWNHVGAISDEKYKRLIRSAPFTDEEKMGFINRQLTETSQSTKFIADLLKERFPDAEVVYVKAGLVSDFRHEFDLPKSRSYNDLHNAADAFLSVVAGNVYDMRFSKKWFRIDEKYSVKVKTIFTHEVKCRGDIIWDGMPMLKKVEDTARKNTAHFVKYAAFKTGGLFDQNPVKKGTGLIPLKAGLPTEKYGGYNKAGVMFLIPVRYNIGKKSEILILPVELMHGKHFLEDKVFARNYTFTRLENILGKKVGEVSFPMGMRPWKINTMLSFDGFRVCLTGTGGRGKCLVAQPVMQFSADEHWRFYIKRLERFVEKIGINPDLLYDKDHDKVSKDENLKLYELYVDKLQNTIYKKRVNSPVQTLLKGKEEFKKLSIEEQCQVLLNIQSVFGRMTGGCDLTLIGGSAHSAATGSLSTTISNWKKKYSTVRIIDQSPSGMWEKSSENLLDLL

SEQ ID NO: 16901 - protein, 1061 aa, unidentified
  REGION 1..1061: note = Cas Enzyme sequence
MAATAPPSFRPGLILGIDLGSNSLGTALVRSDRDLIEFMGVRIFPAGVEGNLELGKEESRAAKRRQARLARRQTQRRQRRLYKVFHLLQRIGLLPAGSRVEVLDRLQHELEQRFPETTVLPWFLRARSLDQALEPHELGRALYHLAQRRGFLSNRVGGKENDEERSRVKGAIKGLAEKIEAAGKRTLGEYMASLNAREKLRNSPEFSEHYTHRSMFEHEFAMIWDSQRMHHPEILTENRRVPLHHAMFHQRPLKDQSNLVGQCELEPAEKRAPLRLLAAQRFRVLGFVNNLRLRLEDGNERILTPNERAVLLDLCEKAEKTLTIAAARRAIGLSKSQKFTIEEGGEKNVPVNLTATRLRAALGQRWDGLTPQEKDDLVEDAGDGKRCPTDEDLERCGREKWGLPQETAEALSKVRLPEAYGRYSLKALVALLPALEEGLTVEEAIRALPVYVETRKSAEPLPMLPPLQDEKMKKLLGEIRNPAVLRSLTELRKTVNAIIRRYGLPEKIHIELARDLKKTKKERQRQTELNRDREKLRQEATEELRKHDAVRFANPRNSDIEKYLLATEARWQCPYTSRKYGFTDVFGDHPQVDVEHIIPRSRSLDDSYLNKTLAYRSANMEKGNRTPREWLFESDQEQYDQMIRVVKDSDPRFEVGKKLRRFSMELSDPDSLLKEFTERQLQDTRYASKLACRYLGALYGGTIDASGTQRVFASAGQVTAKLRRAWDLDRILSPDKPEKCRDDHRHHAIDALTVALSSTTLIRALATAAGDADRLYRRKIILPAPWVDFAAQARSVVESIQPSHRPMRKLSGPLHEETFYSRPRRDVVGADKKGKPIEKEFVHYRVPVTSLGSAKDFESIVDSRVRAAVEEKAAQLGGGGNRFEKNNCPALVTKKGQSVPIKRVRIRKVQAVVSIGKNQRERFVIPGSNHHAEILAELDASGRVKRYHCETVTMLEAMERKRQGVSVVTRDHGPGYRFQCTLSEGDLLEARRFEDSPPRIWKVRAVRQSGQLDLSPALDARWKEDIKKDGKLWRQNVNPLFLGGARKVLITPLGEIIPAND

SEQ ID NO: 16902 - protein, 1092 aa, unidentified
  REGION 1..1092: note = Cas Enzyme sequence
MKYIIGLDIGIGSVGWAVVRNDDDCKRLEDFGVRIFESGEIIESNKNIRNSQRRRKYRGMRRRIRRRNHRKERLKNYLENIGFVSRAELSEFFAKNNHDIIDIRVRALDEMVTPVELTAALLHIAKRRGYKAFYELSDENNNAKDKKAKEEEKDIYKALTNTADVIKNGGYRSIAEAIMKDSEHFSDKNSGRYKYRNIKEKDEKGKKESSSKISENDILFPTEMFEDEVRKILGKQKEFYPQLTDESIDKIFDIIFSRRDFEDGPGNTDDENRPYKGFVDSIGNCPYYKNEKRGHRYTVIGDLFALANKLSQYKYVEKNTGEVVKLPRDLMRNIVNQSLQSGSITKTKINELAKEFNIVILNTKTAKNENIADCIKYLKAVKPIFESYGFNWDKLISEEYTDQNSLLNRVGDTISFNITPKRRIDALNKIDELKGKDELIKKLSKQNFSGTAKVSDKYMIDAINAFFDGTLVGEFQANVQQDEFSVSIKTEKLLKLKPFDNNSEYAQNPVVFRAINETRKVVNAIVQKYGAPNAMNIEIASELNKSFDTRQKISTQQNKNEKERKNAIKQISLITGLDEREIRPQYIERYLLGELQGWRCMYSNEEITNKKEAILNKGKQYEIDHIVPFSRILDDTLNNKALVLARENQKKGARTPLMYLSAEKEKEFKQRVNKLFKGNKITEKKYRYFMLESLVGEDAEKILGDWKTRNLNDTRYIAKFLVKYFNDNLYFAREKGDDKRPVVYAVKGAITSSLRRQWLNKETWGRYDKGELKKITYFDHAVDAIVIANCLPAYVIIAAENHKLRDIYYSAGKIKTEEYRKSLDNCVDTLMKYYGMSPAVSRKLLEKVKETPSLLKNIRFEVEYRVRDYELMKYFFNYDTKVGEDTLDQIFRNDLYKIYDHQFADSIEMPIVSIKPERKYSGQMVKDNFLKKRVANSENKYVKTIDKNNDAVLDNSYYYCVEVYRTRSGNIDLQGIKYTDLVNKNKKLYLKPCYKYPENYYKYIMYLFKDDYLRIKGPKSTRLGFYKAVNNINQNSIKITRYNSKYTRAFREESTTISADAEIEKIYVDILGKKGKVLTKHGEPLSLLPEKN

SEQ ID NO: 16903 - protein, 1093 aa, unidentified
  REGION 1..1093: note = Cas Enzyme sequence
MDQNVLKPQFSLGIDLGSASLGWSLIELDTSGNPIGLLSKQRNGQLIPACGVRIFEPGVEGTALDIEQGKDQSKAVARRAARLHRRQFRRRAYRQARLFRLLQNHELMPRCTSGKVTHPPEERNTILTELDKQLCDRYRQLNGSSDFAQLPLYYLRKTALDRKLEPYELGRVLYHLSQRRGFKSNRKEGSKGTDQKKEAGAVKAGIAELEAKMHAANARTLGEYFAGMDPHQMGQNVRRRWTARKMYEEEFATIWQVQSGFYPDLLSEELRRDVSHLLFFQRPIAAQSHLVGKCDLEPDQKRAAWATLEAQRFRILQKVNDLKVIYPGNPIAQSLTTEQRHLVFELLDRQGDQTFKALRKSLKLGPSEFNLENGGETRLRGNRTNVAMLSAFGERWDSLPAETQKQIVEEWRTSESEEALFRRGVRFWGLDEGSARQWVNTKPEDGYCSLSRRAIERLTPLMRSGKAFKEADNAVYGNRFSGGPVLDSLPPLHVHRNIKGTAQTERVLQQLRLGAIRNPAVERALTELRKVVNAIVREHGKPFEIRIELARELKKPRKERQSVAKKNRTRQKGRDAVKAALLKECGIQNPSRADIEKALLHEECGGICPYTGLAIKLADLFGAHPQFDVEHIIPLSRYPDDSFQNKTLCWHEENRNVKRNKTPFEAYSTDAERWEEIQIRVGAWKPGKLKRFLLRSEDELQDFTARQMNDTRYASVLASRLLESLYGGRDVQTSIGTRQVIFASSGAVTASLRRFWQLEGILRETAPSSNGRSKGKPRTDHRHHAIDALVTALTKPAVIQAMSRSASVDPAFWPDARAFRRVPAPWASFVESVRPHIERMIVSHRPEHKVSGALHKETNYGRPYRYGGKSVVNVRRPLDTLSTDQVNNIVDAAVRKAVLEKLAENGGNTEVFAADKPETLPVLTNGNGNSTLIKRVRVRESAAPESLRELLGNRFVEPNSIHHVALFVVRENGTERWEGVCVDIMEAYQRRRNGQPVVRRTMDTDSEAEACFLFSLMKGDTVEMNYDGGRRVFRVKKFYSAGSIWFTEANNAQSDKEQKKQKTTWSRNANSLRRVNARKVVVDLLGRVHPAND

SEQ ID NO: 16904 - protein, 986 aa, unidentified
  REGION 1..986: note = Cas Enzyme sequence
CGLPTRLKIKEDSDEPKNKKGEDTNAPKNLYALRKMVEHEFNTIWDTQSKHHDILNSTHEGKPIRELFYDALFHQRPLKSAADLAAQCGLEPTLPRAPRAQMAFQRFRIEKTLADLRWGAGKRAEQPSPQQKQVIRELLNNPRALDEGKNKKDQNGAITFEAIYEKLTEAGCPRPQGKGLNLDRASREELQGNKTLYALYKLDEHNEKKHPDFSAKIKHEFINLEEKTQIAAINFLADLGSPEQLDDPMWHTSFVKRDGTPRQFSEALIGFINLIKEHDNFDRLSKMDFDGGRASYSVKALNTLAEWLEEPNWPGDWQDSMKRMDEEASIRVCYPKSLNREIKRREKLPAPESTGNAVVDGSLRQIRWTLNKMIAKLGAPPEEIVVEMAREMSLGISRRNERESENTKLQKMRKNAEKAIRDRNAVPTPSRIRRYLLWEEQATHCPYCNLTIELGDALDGGATEYEHIIPKSLTQVGMKRSEIVIAHHSCNQAKGDRTPWEAWGEGRNDARWQSVEAAAARFDAKKNFRKAKLLRLKDFERKVLTDESVDGFADSQFHHTSWIAKEATQWLECLCPNKVSVSRGELTSMLRRSWKLETVIPEVRYENNLPVLDTGGKLDDKGKVLPAQPIAQDEFVTLKKYLEGHSVRSEDRKANPNFDFNRRPDKRLDHRHHLIDAITLALTSLRLFQQMAKNYKAAAEEMLPRNGESAEDRERRIKTHTRLRLEVPEPPLRNVRAAALEAVRECRISIKTDHYQAGRLFQDFAYRVIFPDGDTPARLARKKSVSDLAGDTAEQTRKNINDIVSSSVRKIILEEFDKRKDTGKSIKEIFAAPFFNREYRTEIKKVFCLQKIGRGYMSTDGTFIVQHPLPTPKYEKRLLHDGYAYLEMVLENGKFKSAHPATQLEGQQKTTTSSTVETVRFFRSDTVMDSKNGKIYLVRQIKAQSGGMLIMAPITETLGVADLSSEYGLLTASGSALARFRIINDV

SEQ ID NO: 16905 - protein, 1362 aa, unidentified
  REGION 1..1362: note = Cas Enzyme sequence
MGNKNYYLGLDMGTSSVGWAVTDQNYQLLRKKGKDMWGIREFDEANSAADRRSHRIDRRRRQRQTARIGLLKEYFADAIMAVDENFFIRLENSKYFLEDKDQKLHSKNGIFDDDNYKDVDYYREYPTIFHLRKALLDLKGEGTVYDVRLVYLALLNMFKHRGHFLLSTENEELNTEQIDIAYQELIELVNRDYELGLECKPLEGVISIISDKETGRKRKHEAMVELFGIAKSNKKANEFLKCMCGLSVNANVILNPDAEEKVPLCFHDFSYTDKIPELMEQLGDTSYAVVEQMKIIYDYAILAGTLKGYDYLSLARVDAYEKHSQDLKCLKELYRKYKTPQEYDEMFRSNKDGTYSAYVNSLNSSDSTAESKKYRRNMKGRKAEDLYKTIQKAFKDNTEDSQVQYVFKQIEEEQFLPKQLTGANGIIPNQVHKKEMERILKNAENYLPFLKETDESELTVSERILRLFSFQIPYYVGPLGKHSKTGWAVRSEEGSILPWNIEEKLDMKATSEKFIEHLIRSCTYISGEKVMPKASLAYERYCVLNEINNIRIDGERIETELKQRLYKECFCKGKRITRKQLCKFLEAQGAIQSAEQVTGIDITINNSLSSYGKMYAIFGQKLKEDKYRDIAEDIIYWGTIFADSRERFQSHLTKYVEQDILTESDVKRISGYKFKDWGRFSKALLELQGCDKSTGELISISQAMWENSLNFMELVNSDAFTFKEALEEKKKRAVSSLADFKYEDLEDYYFSSPVKRMVWQTILVVREIEQVMGCTPRRVFIEMTRNDEEKGDRGRKASRGNQLLEAYKNIKNTEIHNWKEEISAADSSGKLRSKKLYLYYMQMGRDMYTGEEIDLARLFDDNLYDIDHIYPRHYVKDDSIINNLVLVNKAANEHLKKDLYPIPQQIVANPKVHELWSVLHRSKLISDEKYSRLMSRTPFTEKQMGDFIARQLVETSQGTKGVAELLKQLMSGMGTEVVYAKASNVSDFRNKNGFIKSRLVNDFHHAHDAYLNIVVGNVYYTKFTQNPWNFIQKDYARDKKKNHYNLDKMFTWDVVRGDETAWIAKTDKTEGTIATVRKVLSKNTPLMTRMNFEQHGEIANATLYSAKKAKSENYFALKTSDERMADVTKYGGYTSASIAYYFIVRHREGKKQNISIEGLPLYQKRAVEKTADGLEQYCSSKLGYENVEILCRKLKIQSLLEVNGYRMHLSGKTGNQLIMRNAMNLCISQDWVKYIKKLEKKAETDIQDKLISETANLELYGLLTEKHQSTVFARKPNPFGEKLKNGRTKFEELEVSKQCEVLHQILQLTQIGTTVANLTAIGESPNSGKILISKNMKETDNVKIICQSVTGLYEKEIQVYSL

SEQ ID NO: 16906 - protein, 1361 aa, unidentified
  REGION 1..1361: note = Cas Enzyme sequence
MAKKLFPNYYLGLDCGTGSIGWAVTDLNYNILRFNGKAMWGIRLFETADSATDRRVVRCNRRRNQRRTQRIDWLQELFAAEIAKIDPTFFLRLNESRYHIEDKTERQPNALFNDFNYKDKDFFKRYPTIFHLRKELIDGTASYDIRHVYLAIHHILKNRGHFLFPGEDMASVKNVTPLFEQVKRLLVDAFDVEFNYADIVEIETALRQRKAASRKESLQRLLAASDDVLLKAMIDTMTGYKISLSKMFQDENLANAEITSINFSEGTFEDNTELLQTILNSDQFELLTVLKGIYDWSLLANIMEGFQYISYAKVNRFVANKEELCKLKRLIKTYAPDKYDSFFYDTDKPYLSAYVGSYKSNGKKTAVNRCSAEDFNKAVVKILEGMPDTVKEEPDYTLLLGKAKDLTLLPLLISSNNSVLPHQIHLIELKAILKQSERHHPFLAQKDAKGLSVSEKIINILSYRIPYYVGPITDFHDDKINPNKFAWMTRKKTGRIYPWNFDEKIDIEKSAEKFISRMTNKCTYLQDKDVLPKNSLLYSKFTVLNELNNLRINETPISIEQKQAIFDDLFKTHRKVTNKKLHDYLITQGWYNKNQELIITGIDSNFANSLGSYIDFKDFIETKVLTRTDVENIIRWITLFGADRKLLKKRVKATMGQKLSDQQIDTIINKFHYKDWGRLSKEFLTDIFHMEKSTGEVKSIITMMWETNNNLMELMSPSFDYAGQISNNAPIEKLDYSVVEQLSTSPSVKRQIWQTLLIVKEIQKIMGHVPKKVFFEFARGEEKKKRTVSRKNKLKELYSNIKSPDTEAKELLQFLDATTDSQLRSDKLYLYYTQIGKCMYSGDRIDITDLYNTNIYDIDHIYPQSKTKDDSLDNRVLVKKEINGHKSNVYPIEDSIRIKQHAFWKTLYDKNYISKEKFERLTRNHPLTDEELANFISRQLVETRQSTKIAANVLSRFFGDSTKIVYSKARNVSDFRNEFDLTKCRTVNDFHHAKDAFLNIVVGNVYDTKFTGNPLNFIKSKTLYNLTTKKLFMDRVEKAWEPQGENSTLQLVKHTLQKNNILFTRQQIERGGSFFDAQVVKGGSYQGLLPTKMADKKLQRALQNTQKNRKEIITEWTDKYGGYNKLSVAYFILVKHKKGKKEVVSFEPMLNLYKAFCKTEASLENYCTKELELVEPHIILKKVLINTLFKIDGFPMHLAGKAGEKVKVRPAVQLCLSKEDEAYIKRLSNYNDRRLKQKVKELQIEPQYDHISCEQNMILYQHLVQKSNEPIYIKRPAGQSKLLEMATPLFEQLSIEQQSLLLLQIVKYFSCTGDTVDLKLLGGSAQAGFTLIPKTLPNTKIALFINQSPTGLFEQEVPISL

SEQ ID NO: 16907 - protein, 1569 aa, unidentified
  REGION 1..1569: note = Cas Enzyme sequence
MKNKNYFIGLDIGTDSVGYAVTDTAAQYNLLKSCGEPMWGVTLFDKGNLCDNRRAHRVERRRIDRRQQRILLLQELFAPAVSEVDVNFYKRIKESALVRTDSEEPYCLFNDKNYTDADYHRQYQTIHHLIAELISDSTAHDVRLVYIACAWLLAHRGHFLSDISTDNVNELRDFGSSYYGLMNFLQEYSQESDYRAPWVLDENGVKEFGEILKQKGVNRKIVRLQTLLNDGKKFKKKAGDETAFPFSIEGIIRLLCGGTYPLADLYSNPAYSDFGSVCLSADDESMENVIAAIGDDGELIIRLKAIFDWAILDDLLNNCSYISQAKVNIYEQHRADLRYLKEFVREKYPAETYNKIFRKFDKNNYVAYCGNIKNCPDTDKYKKCLSREDLCKYLRNVLELDNGTGENAIDPEILNRIRNNDFLPKQVSTENRVIPYQVYYVELKKILENASGYLPFLKEKDADGYVTREKILSIMRFRIPYYVGPLNKNNNEHAWIVRREGESGRILPWNFEKKVDLDASNEEFIKRMTNTCSYLAGEEVLPKSSLLYSRFEVLNEINNLKINGVSIDIKEKQMIFCDLFIKKKKVTPKAVKEYLILSNMCSKQDAETLSGIDVDIKSSLSSRIAFERLLASGALTEADAEKIIKAKTYTEDKNRFNKWLGENFGHLTADDRKYVGNLNFKDFGRLSKTLLSGITGRKIDIDSETGEIGSAENTVIGFMWESNATLSELLLSDKYTFAQTIQQMNDEYYSKYPKTLDDRMKDMYISNAVKRPIIRTFDVVNDIVKVMGGAPKKIFVEMARGGDKEKKNKRTVSRKQQLLDLYKSIRDTDLREIARELEISLEKEEENRLQSKRLFLYYTQLGRCMYSREPIDIRALMNGNKEYNIDHIYPQAKVTDDSIINNKVLVLSKINGEKKDVYPINREIQSKMHGFWSKLKANGLIGEEKYNRLTRTKGFSQEEEWGFINRQLVETRQSTKAVATLLAEKYPDTQIVYVKAGMVSDFRQEYKLPKSRALNDLHHAKDAYLNVVCGNVYHEHFTKQWFLKNRNNYTVNMKKLLEGPVYGGGVRVWDGAPSVAAVKRTILKNNCHMTFYSVKKKHGQNGGFFDQNPLRAGKGSFPRKADLPVEKYGGYNGLTTAFSVLVHYQLGKKPVAEFVPVALINAERFLADSDYALNGYIRQHLDPKAADIKLLLGGRPVKIGTEFALDGLHVLFGSQGTNDTRIGMKVFTPLVLFADAAQYVKTVESFVQKTEENEKLEYSENEAVSKDGKIVSFSYKGASPALMGKCAEAGVLLSFFTPFGRYLCDTGSCTNGNVYLRRTQFRWADDEAKRLFVIRNMIIGKLYNTKYLILHYMRDHPLQTDCDRIRLAADRIGAYLEAVKTAGDTASIRGTEGNAAAEYFGVFNELILQNKKVFAFDGRSRRPPTDPVNCLLSFAYSLLANECSAGLRSVGLDPFVGLMHTDRPGRCSLSLDMMEELRPIFADRFVLTLINNRIFNEKSFVFLDNGAVILTDDARKQFIAQWQAKKREEIIHPFLKEKIQWGLVPYVQALLISRLMRGDLDGYPPFLKK

SEQ ID NO: 16908 - protein, 1385 aa, unidentified
  REGION 1..1385: note = Cas Enzyme sequence
MSRKKIVPNYAISLDIGNASVGWAAFTPDYRLMRAKGRELIGVRLFEPAQTAEARRMARTTRRRYSRRRWRLHMLDAIFDAPLAEVDPSFLARRKYSWVHPADENNADYWYGGVLFDSKNQDKRFYKQYPTIYHLRKTLMEDDKQHDIREVYFAVHHLLKYRGNFLVEGDLDSSSVFDSKNLLNLIGEIILCVFDEQLDGSWTAGIDKKRLADTLCTTKGSRSMRVENALAVICESCELPKEQINVIKAIFAGLEGNKLDLAKIFPSEERTSDEKKALGIYFNKSDYEEVRAQVVDSGLLDDEQCELLDKMQKQYSAIALKQLLGNAKSVSESMCASYTRHQRNWDLIKKELRTEDNADEINKHYGELVGWTMVDGRRRSIRGTSTYEKTRQNANKYFSKLIEASNLSESKKLDLKHAIDEDRLFPVQRDSDNGVIPYQLHRNELRRILEKQGKYYPFLLDTFEKNGEQVNKIEGLLTFRVPYFVGPLVEREGMQPSDNGENHWMKRKKSGEITPWNFDKMVDKDESGRRFIERLVDTDSYLLGEATLPKNSMLYQEYEVLNELNNVRLSVRSGNRWENRRRQRLGREEKTLLIRNLFMKGGVVTKKAAENLLRKEYGRTYELSGLASESKFMSSMSSYGKLCRIFGAERVNKDSELMEQIIELQTVFEDKETLLHQLRMLDGLSDSDCELLARTHYTGWGKLSRKLLTTKVGECKIGDDFAPQKHSIIEIMRFEDRNFMEIITDKNYGFPEWIDEQNLGADKKQSLESMVDELHVSPKVKRGIIQSVRLIDDISKAVGKKPSRIFLELAGDIQASVRTTSRKNRLLELYKNAGLRKEFSDIYDRLEASDDKGLQDDRWFLYYTQLGKDMYTGEELDIDRLSSDYDIDHIIPQAVTQNDSLDNRVLVSRAANARKTDSFAYLPELVEARRGFWQELLDNRLISQTKFERLVRQNDFGRHEKERFVERSLVETRQIMKNVATLMRRRYGNSSAVIGLNSELTKEMRQYLGFEHKNRDINDYHHAQDALCLGVAGQFAVNRGFFDNGAVSDGAANAYNIYLQDYLRGYREKLKAGDRKHGIDFGFIVGSMASADENKRINPKTGEIAWSEADKDYLRRVMNYRKMLVTQKVGDSFGALYNETRYGAAVKEGHDGIAFDKNKADTSLYGGFSSAKVVYSILVELKGKVRLVNITMQEYSMLGDCPSDEALKKVLVAKKPEYAKAKILLRHIPSMQLIHYKGACMTIKSATELNNARQLWLDCDVYNALDDYLKCGTSKSSIDIMQIWDALFDAVNKHYPLHRVEESTLAKARTKFEKLDLDKQLDVLGMIVVALHADPGRANLSLVGLPSEWKRVRSVSFSDDDEFVFQSPSGLFETKITIAELKKAE

SEQ ID NO: 16909 - protein, 1046 aa, unidentified
  REGION 1..1046: note = Cas Enzyme sequence
MATRLALDIGTNSIGWSLFELDSEGQPRALQDLGVRVYPDGRNPQDKTSLAVARRQARSMRRRRDRYLRRRRNLMKALVAAGLMPSDETERKNLERLDPYELRARGLQEALTPHAFGRALFHLAQRRGFKSNRQADAGEDDDSGKIKEAVARLRTRMEEAGAPTLGAYFHYLRSRSSDPNNTPSVRARLMRLSEEDKQDNYPFYPSREMVEEEFEYLWQVQAKYHPELLTDSLRAKLHHIIFYQRPLKAPAVGKCLYIPEERRLPRAHPLAQRWRILQELNNLRIIEGVRDRPLTLSERDRLLEHLLRKPRMTFNQMRKELKLPGTTHFNLETEARKGLDGDQTADRIANGIKSKKNPRPGMGDAWWALSFEEKTRLVDTLLHEQDEEALVAWLMETHGLDEDLANSLANAQLPDGYAAIGPTAMRRLCDELEADVIAYSEAVQRADFPHHSDFRHDGSAAALPYYGAVLDRHIVPGTGDPEDDEADRIGRVTNPTVHIGLNQIRRLVNTVIERHGKPAQINVELARELKQNEKQRKEEQRRNRENQERHEAARKLFAEIGAHDTADNRLRHRLWLEQEKTCPYTGAAISARQLFSSEVDVDHILPFSRTLDNSAANKVVCLAESNREKRNKSPYEAWGHTNLWTAIDGNARRLPRNKRWRFAPDAMDRFENEERDFLDRHLTETRYLGRLAREYLTVICPEVYVTPGQLTALVRNKLHLMDLMGGHNLPEPPEGAVKHRDDHRHHAIDAFTVGLLDRSFLQRAATLAGRVEREGLKERIEIPTPFEGYREQLKEGLERLIVSHRPNHSVKGRMHNDTAYGLVRHIEDDLWEVVTRKPIESFQKMADLEKIRDDAIRETLLERCYGLSGKDLTAELAKYARESGTRRLRVIEPLSVIPIRDQSGNPYKAYKGDANHRIEIWRLPNGKWQSQIISMFQANQEAARKTLPARPHPAAKLIMRLYKDDMIAIENQGWRRILRVVKFSGSSITLADHNEGGNLKARDAEDVKVDPFKYLNTSASTLQKLGARKLRVDETGKVWDPGPLER

SEQ ID NO: 16910 - protein, 1057 aa, unidentified
  REGION 1..1057: note = Cas Enzyme sequence
MGTNSIGWCLTEDDGRIVGIGARIFSDGRDPKSGASLAVDRRDARSARRRRDRYLGRRSAFLDTLVEHGLMPGDANEGKLVAERDPYALRIRALDERLDPFDIGRALFHLNQRRGFKSNRKAERKTKDGEDGKIATGAKELDIAMTIAGARTLGEFLAMRLAAGNPARVRMNGESQAYDFYPQRRHVEDEFVEIWTAQARHHPALLTEGARAALHRILFFQRPLKEQEVGLCLFAGRYDVPKGDRRLAKAHPLFQDRRLYEEVNQLYVTTPGEIARPLSKGERDKLILKLRGVKAASFDSLAKLLKLQPGQSFNKASATRTQLAGDEIYAAMADKKRFGTAWPHLDRDRQWAIIERLIDEENPDTLYAFLTGDCGLDDDHAAATAKASLPEGYGRLGPTATARILDALKADVITYDKAVSSLGWHHSDERTGEILPQLPYYGELLTREIPPGTQDPNDPPEKRWGKITNPTVHIGLRQLEKLVNDIIKIHGRPDQIVVELARELKLNEKDKEEHEKRIRRDTAAAIGRGKKLDEEGFTDNGANRMLLRLWEDLNPYNPLDRRCPYCGELIGMRMLFSGGEADIDHILPYSRTLDDSAANKVVAHRRCNRTKGNRAPFEKWGQDDDRWGIISTQVARMHKSKQWRFGPDAMDRFEQDGGFIARQLTDTQYLSRLAGRYLSSLYADKDESNVYVIPGRMTAMLRRLWGLNSLLGDHNFVENKHSDAPKNRLDHRHHAIDAAVVGSTTRSLMQRIARTAGLAEDKNLDRLFEGLDPPWPGFREELRERLNAVTVSHKPDHGRKGQPAPGKDVTAGQLHDDTAYGLTGDFGPDGKTPVVVKRVDFFSLDAKDIADPDRIRDATLRDELQRATAGKIGNDFERALASFKRDHPQFKGIRHVRVLGERAGTPTLNVIPIKDNQGRAYKAYKGNANARFLIWRMPDGTWKHDTISVFKAHQAGFAPPRPHPTAKKILDLRQNDLIAIDRGGGPEFMRVVKFSESGQVTLAAHNEAGALKARDTASNDVDPFKYIAPTAGGLKKIKARQVRIDPLGRVFDPGPRA

SEQ ID NO: 16911 - protein, 1128 aa, unidentified
  REGION 1..1128: note = Cas Enzyme sequence
MDEKMDYRIGLDIGIASVGWAVLQNNSDDEPVRIVDLGVRIFDTAEIPKTGESLAGPRRAARTTRRRLRRRKHRLDRIKWLFENQGLINIDDFLKRYNMAGLPDVYQLRYEALDRKLTDEELAQVLLHIAKHRGFRSTRKAETAAKENGAVLKATDENQKRMQEKGYRTVGEMIYLDEAFRTGCSWSEKGYILTPRNKAENYQHTMLRAMLVEEVKEIFSSQRRLGNEKATEELEEKYLEIMTSQRSFDLGPGMQPDGKPSPYAMEGFSDRVGKCTFLGDQGELRGAKGTYTAEYFVALQKINHTKLVNQDGEIRNFTEEERRALTLLLFTQKEVKYAAVRKKLGLPEDILFYNLNYKKAATKEEQQKENQNTEKAKFIGMPYYHDYKKCLEERVKYLTENEVRDLFDEIGTILTCYKNDDSRTERLVKLGLVPIEMEGLLAYTPTKFQHLSMKAMRNIIPFLEKGMTYDKACEEAGYDFKADSKGIKQKLLTGEKVNQTINEITNPVVKRSVSQTVKVINAIIRTYGSPQAINIELAREMSKTFEERRKIKGDMEKRQKNNEDVKKQIQELGKLSPTGQDILKYRLWQEQQGICMYSGKTIPLEELFKPGYDIDHILPYSITFDDSFRNKVLVTSQENRQKGNRTPYEYMGNDEQRWNEFETRVKTTIRDYKKQQKLLKKHFSEEERSEFKERNLTDTKYITTVIYNMIRQNLEMAPLNRPEKKKQVRAVNGAITAYLRKRWGLPQKNRETDTHHAMDAVVIACCTDGMIQKISRYTKVRERCYSKGTEFVDAETGEIFRPEDYSRAEWDEIFGVHIPKPWETFRAELDVRMGDDPKGFLDTHSDVALELDYPEYIYENLRPIFVSRMPNHKVTGAAHADTIRSPRHFKDEGIVLTKTALTDLKLDKHGEIDGYYNPQSDLLLYEALKKQLLLYGNDAKKAFAQDFHKPKADGTEGPVVRKVKIQKKQTMGVFVDSGNGIAENGGMVRIDVYRVNGKYYFVPVYTADVVKKVLPDRASTANKPYSEWRTMEDKDFLFSLYSRDLVHIKSKKGIPIKNVDGSLGESKEVYAYYIGADISGAKIEGKAHDSRYTFRGIGVQKLELIEKCQVDILGHISTVKNEKRMGFS

SEQ ID NO: 16912 - protein, 1082 aa, unidentified
  REGION 1..1082: note = Cas Enzyme sequence
MAAFKPNPINYILGLDIGIASVGWAMVEIDEEENPIRLIDLGVRVFERAEVPKTGDSLAAARRLARSVRRLTRRRAHRLLRARRLLKREGVLRAADFDENGLIKSLPNTPWQLRAAALDRKLTPLEWSAVLLHLIKHRGYLSQRKNEGETADKELGALLKGVADNAHTLQTGDFRTPAELALNKFEKESGHIRNQRGDYSHTFSRKDLQAELNLLFEKQKEFGNPHVSDGLKEGIETLLMTQRPALSGDAVQKMLGHCTFEPAEPKAAKNTYTAERFIWLTKLNNLRILEQGSERPLTDTERATLMDEPYRKSKLTYAQARKLLGLEDTAFFKGLRYGKDNAEASTLMEMKTYHAISRALEKEGLKDKKSPLNLSPELQDEIGMAFSLFKTDEDITGRLKDRVQPEILEALLKHINFDKFVQISLKALRRIVPLMEQGKRYDEACTEIYEDHYGKKNTEEEIYLPPIPADEIRNPVVLRALSQARKVINAVVRRYGSPARIHIETAREVGKSFKDRKEIEKRQEENRKDREKAAAKFREYFPNFVGEPKSKDILKLRLYEQQHGKCLYSGKEINLGRLNEKGYVEIDHALPFSRTWDDSFNNKVLVLGSENQNKGNQTPYEYFNGKDNSREWQEFKARVETSRFPRSKKQRILLQKFDEDGFKERNLNDTRYVNRFLCQFVTDHMQLAGKGKRRVFASNGQITNLLRGFWGLRKVRAENDRHHALDAVVVACSTVAMQQKITRFVRYKEMNAFDGKTIDKETGEVLHQKTHFPQPWEFFAQEVMIRVFGKPDGKPEFEEADTPEKLRTLLAEKLSSRPEAVHEYVTPLFVSRAPNRKMSGTHKDTLRSAKRFVKHNEKISVKRVWLTEIKLADLENMVNYKNGREIELYEALKARLEAYGGNAKQAFDPKDNLFYKKGGQLVKAVRVEKTQESGVLLNKKNAYTIADNGDMVRADVFCKTDKKGKNQYFIVPIYAWQVAENILPDIDCKGYRIDDSYTFCFSLHKYDLIAFQKDKKSRVEFAYYINCDSSDGRFYLAWHDKGAKEQQFRISTQNLVLMEKYQIDELGKEIRPCRLKKRPPVR

SEQ ID NO: 16913 - protein, 1222 aa, unidentified
  REGION 1..1222: note = Cas Enzyme sequence
MKKVLGLDLGVGSIGWCLIEKDDNNVPKCILRIGSRIVPISSDEETGYTKGNAISKNADRTAKRTARKCYDRYQLRRQALVNLLKRLGMEPNKELMLGQTPMELWQKRADAASKEISLEELGRVLLHINQKRGYKHSRLSNSDSKETAYVQEVNSRYDDLKAEELTVGQHFAAKLKENEQISAEGKKYYNFRIKEQVYPRHAYEEETKKILEVQSRYHSDVLTPDVCKEMMDIIFYQRDLKSCKNLVSFCEFESYTITRDGKKITIGPKVAPRTSPLAQLSSILETANNITIRNKRNDELYISPEQRKAIADFLDNHDIMKLTDLYKILNIGRKGGWWAGKAIGKGLKGNTTKCQIREALSALPKEQVDSLTAFQLEFDEYVDEETGEVRKRINNTLAEQQPLYKLWHMLYSIKDNTELSGALHHLGIEDNESIEKLCNLDFRTAGYANKSAKAIGRILPYLMEGVMYSEACERAGLDHSRRIDPNRPLLKHLPQIQKNELRQPVVEKILNQLVNIVNALLEKEGAIDEIRVELARELKQSKDERNETFKRNNQNERQNKEYAERIKKHSLTPTRNRIMKLKMWEESEHACMYCEQPVDPIEFLKGADVEREHIIPRGLLFDNSFTNQVCSCRRCNSKKGMRTAYDFIADDKGLEGLNAYIDRVNDLFDKKKISRSKLNRLLVSHKAYISRKTQGKETEEDKELWENFIDRQLRQSQYIAKKSVEMLQQVCKNVYTTSGSVTDFVRHQWGYDELLHDLNFERFKKAGLTAMVKQLHSGEEVEVERIANWTKRLDNRHHAVDALAIACTTQSMIQRLNTLNASRDEMLEELNSKDQRLVDSERSMLEKWVFIQPHISYAEAKNKINKIVISQRPNTRITVPGKRYVAKNGKRTLAQTGIIVPRGALHAEFVYGRIMKQDTDGVTMTPQYVRKYKLGIGAQGFLFNGKEFYKEELKKDSKTGLSKIIVTDKIKDVLEKIVDGGIRQRILERLNRGFEEGTDYRANVAQALANLKNLDEDPIYSDDAKTRPIRTVRKYVSSSTMVAVRKDDKGKPVAFVEPDGNHHVAFYKDENGVITETIVTKWQAVQRKLNHIPIIIDNPSQTWSEVLGRNDVPEELLQSLPKDSSTFLLSLQIGEAFIMGMEDADYERALEEKDMQTLAEHLYFVQSISSCDYRFRRHEEAQYDTNDINKEDLRFLRIRNLQALFEYNPQKVKVTVLGDLIH

SEQ ID NO: 16914 - protein, 1198 aa, unidentified
  REGION 1..1198: note = Cas Enzyme sequence
  REGION 115..118: note = misc_feature - Xaa can be any naturally occurring amino acid
YTLIDKGVDIFQEGVARDKNNEKPAVQDRTSARALRRHYFRRRLRKIELLKILIRYDLCPPLPEELLTAWQKEKRYPQDNEFLRWQRTDDNGDRNPYHDRYVALSERLDLGNRTXXXXRWLLGRALYHLAQRRGFLSNRKEAGNEKEDGTVKECIKNLSAEIAAAGCRYLGEYFYGLYQHKERIRDKYTSRNEHYLAEFNAICDRQQLPDEWRKALHRAIFFQRDLKSQKGSVGRCTFEPTKSRCPVSHPRFEEFRMLSFVNNIRITGPGDNAPRPLTQEEFETIRSLFFRKSKPYFDFEEIARRIAGKGKYACKEERTEAPYRFNFARTATVSGCPVTASLQAIFGDDWITEIRSLYLLGAGKNEDQMLNDVWHALFSFNDEGRLRSWACEKLQLTDEQAKAFAAIKLPQDYAALSLNAIGKILVYLRCGYRYDEAVFLANLRAALPKEVYADESRRHEIEQDIASLLLDYKRNPYNKFDSKEHRIADYFSDHGLDASRLIRLYHPSKIETYPDAQPKANGILQLGSPRTATIRNPMAMRALFRLRNLINTLLREGRIDRDTKIRIEFARGLNDANRRKAIEQYQREREVENRKYAEEIHSQYAAETGREIKPSDDEVLKYRLWEEQQHVCPYTGRQIRISDFVGSAPDFDIEHTLPQARGGDDSQMNKTLCENRFNRETKRAKLPAELSNHVEIMERIESFGWREKMESLQKQIEAQVRRSKSAAIKSEKDDAIQRRHYLQMQLDYWRGKYERFTMAEIPEGFSNRQGVDIGIIGKYARLYLKTVFDRIYTVKGSTTAAFRKMWGLQEEYARKERTNHVHHCIDAITIACIGRREYDRWAQYVADEERYGYGESGKPRFEKPWPTFTEDVKAAADELLVARHTPDNMTKQTRRKLRVRGRIKLNADGEPIYQQGDTARCRLHQDTFYGAIKQDGEIRYVIRKSLAQLQPTDIDKIIDDAVRDRVREAIDEVGFKTAMNPDEYTIWMNREKGIPIRKVRIFTPSVKHPIALKKQRDLSAKEYKRDYHVVNEGNYCTVIYEGQDKKGKTKRTFELVSNLEAAQYFKASADREARPDLVPQTDTNGFPLKYILKTGTMVLFYENTPAELYECTRKELVKRLYKVTAMAAEGRVQFLFHQEARDQKTLTSLYGAGTSQFCQSNPSPKLRLSVSNFNMLVEGYDFELTVTGEIKFKDDRPC

SEQ ID NO: 16915 - protein, 1390 aa, unidentified
  REGION 1..1390: note = Cas Enzyme sequence
MFAENFSEKSKNGYYLGVDIGTDSVGYAVTDRDYSLCRFKGEPMTGVALFDKADQCADRRAHRTSRRRYARRQMRVNLIQDLFCVEMAKVDPNFFIQMNESRLWQCDKKPETLVGCEWLDREYNRRFPTVHHLIMELINEENSNTDVRHLYLAVAWLVAHRGHFLSDISCDKIRELYDIKPLYSAFIGWFGENGYSAPWECDADALMAAMSCRCGVRAKEAELKKLIYGGKKPVEDESCPLYQEAIIKLLAGGSIEIKKTLKWEEYKGVEGSICLDDAEKLEAVLAELGDDGEVIRLMSQVYDCAALSKMLSGHTYISEAKIEQYETHKADLRELKRLAKKYCSDDEYKNFFVSETGTYSAYSAYFKCSEKRKGKKITREDFYKGVKKLIAKIKERIGEGDDTDLVIANGVLGRIDAGTYMPKQVNPENRLIPYQLYYAELDVILSNAEKRFAFLSERDSDGLSVSDKIRSVFTFRIPYFVGPLEKSPGNKFAWIERKAEGRILPWNFDEMVDLDASEDGFIKRMTNKCTYLPGENVLPKQSLLYCKFTILDEINNINIDGVPISVELKQQIFHELFEKEKKVTKKKLIDFLVSVKAIAKGEEVRISGLGAEIKSSYKPYIDFRRLLAAGTLTAEDVDCIIERITCTEDTARLKKWLLKWSKENGKDLSDDDIKYISQRKYDDFGRLSGKLLNGIEAACTETGEVGTVMHFMWNTNDNLMQIIKGQKYRFEDRISEISKEYFSEHPTTLVERLDELGISNAVKRPVMRTLDIIADIVKAKKCPPEKIFVEMTRGEDKRIDSDKLNRGKRLRELYSKLDLEDAVRPRKELDALGDEADRKLQREALFLYFCQMAKCAYCGAPLDISAIGTNEYNVDHIWPRAYIKDDSILNNKVLVHSEENGRKTDTYPIESKIRSEMRGFWENLRNAKLINEEKFRRLTREHAFSTDERLGFINRQIVETGQSAKVVTNLLTDLYPKAEIVFVKAGNVSEFRHEYGEICNYALFGRTLTDAEKKSKCLVKSRTASDIHHAHDAYLNIVVGNLFHEKFTKRYYLDTLNDYSPKMHILFGRKCVIDGNVIWNPEKHLPTVDRTMANVHIHLTKYQTKQKGLLFDQQPLRAGSSDSLVPLKKNLDTAKYGGYNKPTISFCVLVRYRIRKKYELTIVPVELLVANKYLSEQGYPAKHVREKLPVNAEDISFPFGNRIIKVNTVFSLDGFEACVSGTSDGGSRILMRSLMTPRYTAEQIAYIKNLDNISEKRKKNPQYVIDETFSGISREKNVALFADLVNMMNGSVYSKQPGAKLGISADDQKKFEGLTIDMQYECLKNMILYLKTNRSGDCNMSAMGGNSSSGAVRLSANISNWKKNYSDVRIIDRSSSGLFEHRTGNLLNLI

SEQ ID NO: 16916 - protein, 920 aa, unidentified
  REGION 1..920: note = Cas Enzyme sequence
  REGION 817..819: note = misc_feature - Xaa can be any naturally occurring amino acid
MMFRIEYYVGPLNTYHHVDQGGHAWMVRKAEGKITPWNFDEKVDKEASAEKFIRNMTNKCTYLIGKDVIPKQSLLYSRYKVLNELNNLKVNGVPISVELKQKIYEELFKKQVNVTFKQLKTFLKAQGADADEIILSGVDEAAHKFTNNLQTYHKFHAIFGDKIEFEPQRSMVEDIIRWKCLMGDDIAMWKHKIEKEYGDQLSEEQLKKITRLNFNGWSRLSQEFLTDVPGVDIESGEVYSGIMDALWKTNENVMQLLSSRFTFAAEVKKQNQGTGRIEKITYDEVMKDTYLSPAVKRSVWQAITLVEEIRKIRKADPKRIFVEMTRQPDAKKERKLSRRTQLLNAYKAIGSDLAEYDKEHVSTLITQLESKKDEDLRRKKLYLYFTQMGRCMYTGERIDLSSLLRDTNSNIYDIDHIYPRSLTKDDSLDNMVLVKKVENLKKSNDYPLPDEMRKKRYGYWKGLKEKKLISERKFSRLIRTTKLTADELAGFISRQLVETSQMVKATADILEKIYPSVTIVYVKARTVSDFRHDYDLPKVRALNDCHHAHDAYLNIVVGNVYYEKFTKNPFRFIQNQKGKGKVEYNLYRLFDKDVKVGDRIIWNAKENLAHVKATLERDTVNVVRMPVEQRGQFFDATIQKKGATKNMLVLPLKGSDERLQDTSKYGYYVRPSGMSFMVVQHEVKGKRRVTIEPALLVYKNKLKSEEDYAKYCEDVLKLQKPKVLFRNIKFGSKILFDGYPFLLKARSGDRITVADAQSLFLANQELKILKKVTKISDDIAQKVKSRIKITDEEWITLWKSVVEQIVTGKFCNRLGSXXXVELSEDEKTRLNELDSKDQEEYLSHILLERFLQFNTEEKAHLLLQVISFSSNTRGVDLRLIGGSISTGVIRVGKDITDHSVILINESPTGLFTNRTVLNQT

SEQ ID NO: 16917 - protein, 1051 aa, unidentified
  REGION 1..1051: note = Cas Enzyme sequence
MKHYDYVLGLDLGVASLGWALIEIDDNAQPISLLDAGVRCWDLNNNTAEDVTRGKEVSPNKERRDARLQRRQIYRRAKRYKKTFRILQELGLFDQGPRDSLARKAYIDKIDQQAKLWLVAHVPEAANDPWLHHNYVYRLRAAALDHPLPPELLGRVFYSLAQRRGFLSNRKGTISSDEKGVVKQAITQLEKDIQQVGARTLGEFLTKLNPHEQRIRGHYTSRSMYIAEFELIYNAQRRHYPKLLTSRARKLLYEAIFYQRPLKSQRSRVGRCELEIYLKQDADGKVTVLHPFRRAPKASLEAQRLRYMQRINDLEIISPDGEIRPLTAEERQKLYDLAEHRPELKFNDIRKALGLPAGKQSEWRFNLEAGGENKLPGNTTAARIRNILGDAWDSLGEKQKKLVDDLLAFTQDDALYKHLQKVWGFDAQTADLLVNMPLEEGFAAFSRRAIRRLLPLLEQGMRLNAAIKVAYGGHNRSTEVHDLLPPVREVFREINNPFVIRTMTQLRKIVNGVIRKHGKPARIHIELARELKEPRKKRKLEYTRQRQRQQEREEAAIQIRKALGREPKSWEIEKYLLAEECNWECPYTGRKVPGASIQERIRALFSEPSDFDVEHILPFSRSLDNSFSNKTLCYHSENRSVKQNLTPYEAYSHDPVRWKEILSRVSKFKGPYAEDKLKKFQLEEIPEDFAQRHLSDTRYASRLAADYLGLLYGGRVDAEGQQRVFTVSGKLTALVRNAWKLNSVLGSDQKNRNDLRNHAIDAIVIALASPSLLYHYRELARVLARTSCNFVTLDPPWESFHQDVNRRIETMIATFSPNRRMSGALHEETFYSLSGENTVTVRKALKNMSIHEVEKIVDPAIRAKVKNKLKALGKNDPKIFTDEKNLPAIRVRKKGSKIKRFPIKSARIFVHQRVVPIGAGHRLRYVIPGNNHHAEVYAILDANGNELKYRVKAVSLLEAWERKRKGKPIICTNHGPGTRFKCVLRKGDYIKFVKDNRLLRVVSVSDNYIAGKDVNDGRKITDIKKNKELIVVCRKRMLWSAANERTGTPKA

SEQ ID NO: 16918 - protein, 1236 aa, unidentified
  REGION 1..1236: note = Cas Enzyme sequence
GHFLLQGQSFKAGNLNNLIKELLELDILHVGFEVTEKVVDKIADISLEKKTSKDKLNDIKELYPKEKQLLEVFRLIFGGKPSLDKLFAIDEYKELDAAIKSVSFKEKIYEEVRHDYEQVLSNYIELLDLAKLVYDSIILSDIKKEGKTLSESKVDFYNKHRDDLTKLKNLVKNDSKLSEDKKVELYTAIFKEDKDKGSNYVNYIRKSDEGKGCNYEDFKNFLVKELAKLEESAAKEEILRDLELELFLPLQRTKDNSVVPYQIHKEELVRILDNAAKYHNFLDEKDESGYSIREKVIQLLEFRIPYYVGPLNSSKKAREDGFAWSVRNKGYENTPVTPWNYEKVIDESASAEKFITNLTNKCTYLKGEDVLPKSSLLYSEFALLNELNALKYDGNRISLEARNAIMEKLFKQQGKKVTKTSIKNLLKAEGYIDGKGEITGIDITVKNDLKSYRDFKKILGNKFNSEHVENIILWITLYGESRKLIKAKIEAVYGDIYSKEEIAKMSRLVYKDWGRFSRKLLTELVSKKLYNEETGECLNIIGAMRQNNILFMELMADRFDYSQQIVKFNKELQEDVTEITPEILDDLYVSPSVKRSIWQTVRIVEELKKIIGCAPAKIFVETTRSNQGKKEPTSSREKQLKLAYKAVKKDVKELEKEIGAINFDVLNDRLSSEEQSKLKAKKLYLYYTQLGRCMYSGKQIDLENLYTPEYDIDHIYPQSKVKDDSFTNTVLVERELNAKKGDRYPLSSDFQTPSNRKLWKFLKEKGLITDEKYNRLVRTEEFSDEELSGFIARQLVETSQSVKAVASILGELNPETSICYSKAENVSSFRQNFGKIKDGNSKSNNNEQLVKVREINDFHHAKDAYLNIVVGNVYDTKFTRNVFNFIKDKKDGRKYSLNKVFYENVSDSKTVAWEMDKTIYQVEKVMNNNNILVTRRTSEQKGGLFDATVYKAKVAAKAKDGVYYPLKTSNSVVKDVAKYGGYTSIGIAYYSIFEYTLVNKKGEEKITRIIPIPIYISQNIKDSTALIEFGKSQIFCRASEKIKDFKLLYRRLCIGSKININNYQYYIGGKSDERFYYDSAIQVTLDKKSEKYLKILSKYQNWKKENKDGELWENITKENNIELYNKLVEKMNSEIFTKKKSNKYNELNSEEIRNNFIKISVEEQAKVLLEILNLLTNKKSIFDLKSIDIKAARGKISFNLTSLTQFSIIEQSITGFYEKEITIIGDKGNDMENNNS

SEQ ID NO: 16919 - protein, 1053 aa, unidentified; identical to SEQ ID NO: 15826
  REGION 1..1053: note = Cas Enzyme sequence

SEQ ID NO: 16920 - protein, 1567 aa, unidentified
  REGION 1..1567: note = Cas Enzyme sequence
MSIVLGLDLGTNSIGWALVEQDFKQKQGKILGMGSRIIPMSQDIIDNFGSGKSTETQTAERTGFRGTRHLRERSLLRRERLHRVLNILGFLPRHFAAQIDFEKKLGQFYENTEPKLAYNNKDFIFKKAFEEMLEDFKIHQPELVSGGKKVPYDWTIFYLRKKALTQKISGEELAWILLNFNQKRGYYQLRGEEDEDATRTAQTRIYFDTQIIKEIADTGIVYKGLKVIQIQLENGDSGKFFSKEIPNWVGNKKNIIATIDLDKEGNDKYEDDGTLKRRFSIPSEEDWDKKWKLVKIKTEKEIKDSQKSVGAYIYDALLQNPNQKIKGKLIRTIERKLYKDELIAILKNQIALQPELFTDELYNDCVRELYRNNEAHRLNLSKRDFVHLFVDDILFYQRPLRSQKSSVSNCTLEYRVFKTKDKEGNTVDKREYLKAIPKSHPLYQEFRVWQWLFNLKIINKDDDTDVTPLFLKTTEDLEKLFDFLMSQKEVNHKDVLNYLLTPLLKEKFPSAKPAAFNKELAKEIAKFRWNYVFDDTKEKEDDKSKTYPCNETGYEISRRLNKVENLPDGFLTPEKEYKLWHLIYSVNDKKQYEQALGSFARKNGLDEATFTENFRKFPPFKSEYGSFSEKAVKKLLPLMRLGKYWDEHKIDNESKSRFILIKERLEGLTDEKEIEKVADDDIQKRILKSFFKTKNQNLSGLQLYQASYLIYGRHSEPETVGKWNSVVGLEDFLRDFKQHSLRNPIVEQVVTETLRVVRDIWIKYGKGEKGFFNEIHVELGREMKKTADERKRLTNKISDNENTNLRIKALLAELFTDSNVENVRPFSPMQQEALKIYEDGVLNSSIPIPDDILKISKTAQPTKSELQRYKLWLEQKYCSPYTGQIIPLNKLFTHEYEIEHIIPQSRYFDDSFSNKVICESAVNKLKDKQLGLEFIKNHYGTEVQIGNRSVYIQTEEAYKAFIKDNYAKSPSKRSKLLLEEIPDKMIERQMNDTRYISKFISQTLSNIVREETNDDGVNSKNVLPGNGHITSILRQDWGLNDVWNELIIPRFERMQQLRTEKDIAEGVSFIALNKNGKPIPELQPITLQKGFQKKRIDHRHHALDALVIACATRDHINLLNNRFAKSKERFDLNRKLRKFVKAFYIDAKTGERIEKEVPKDFLKPWGTFTEDAKDVLGGIVVSFKQNLRVINKTVNRYQSYKDENGNVRIGKDGKPKKDFIKQVKGDSWAIRKSMHTPMPYSKRIYEFEILKISKNVGRREFIADEFIRSEVERVFIANNSKVTDTQKYLDKYPIIDKTNIPIISTAFKLKTEKFRRRQSIFELSNRGQGGIKSAEDAKKFIDKIPDFKIREELLEHLRISNDDIDKAFSIDGIGNFNSKRKVPIYKVPIAESGTSRFSVGIKIGTRHKWVEADKGTNLFFAIYQDENGKRSYETVPLNIVIERQKQGLDSVPETNEKGSTLLYCISPNDLVYVPTEEERENIKSIDIKNLTKEQKNRIYKLEKASGTESYFVRHDIAYLIKQYDAKTRLGELESQNKLQTTMTPDRMKISEFCIKLNVDRLGNITKA

SEQ ID NO: 16921 - protein, 1142 aa, unidentified
  REGION 1..1142: note = Cas Enzyme sequence
MPKDITKKDFFMAEKSSYSPKKYSLGLDIGTSSVGWAVLDLDKERIHDLGVRIFERPEDPQNGDSLAKPRRDARSARHRLKRRRQRLNHLKQFFVDQNILTKNQVEEVLDYKSDFNKLDVYGLRSKALTEELLPEELLKVLYQIAKRRGFKSNRKVVEESDKEGGRVTSALKTNEKFIADNNYTTVGEALSRDKKFASHKRNKRDDYINSFARDDFLHELEAIIKTQRNYALKNVPEQAINELIYGIDDGQVTNVSAIMYQRPFITKELIEKMVGDCTFEKNEKRAPKASYSFEVFRLASDLSHLVFIPRDASKRQAKRENLEVRLSSEQISKVIDLAKNQKSLTYKKVRSTTGISEDYVPKDVRGKKKEGDEFGEDNIFSGLKAYNDIRLAMKDLPEDWAKIDNESVINQIAYILTTQKADEGIRAELDSLPLSDKAKEAIIKIKPTNFKAFGHLSIKALRKITPHILEGVTYDKACEAAGYDFKKQSASLEQITNPVVKRAITQTLKVVRAIERKYGKPYFIKVETARDLAKNFKDRKAIENDNKENQARNQSIIQTLNENGVVTPTGQQIIKVKLYREQNGVCLYSGKPIDFETMLRDDNAYQVDHIVPFSRSNNDGITNKVLVLTEENQKKGNQTPFEYFGVDEKRWKEYVARIESTYKTRDIKTSDKATNAINYKYNGYAMKKKQNLLLQDYKNDSWNVRALNDTRYITRFIQNYLRQNVDFAEGEEKQRVIAPNGTTTAYLRKRWGLAKDRAEDVLHHAKDAAVVAAIDNSIVRQANLFAKRGEIAALLSAVKTMEEKTDKLTGEIIDEDEFDKAQRRKDAAIVLSSKYFPQPWDNFDKEVMKRTLNTDVTTLQNELRGLNNYDEDFRLSVKPIFVSREIRHKIRGEAHESKLRSNRSRNGQNLIRIPLTELSLKRLENSLAKEEFDSQKNKNGSSLYEKLLTRLNECSGDAKKAFNPPFKLYKGPKQDKNGNPISPVAAVKVYDKKGVVSVGRKANAPVALAGMVRIRVYKKDNQIYMIPDYRINILENKETMELLKPLKKVSKIDNSFNFIGYLYKGDLITIQKDSQTFVGYFVQFEGDNRITIKSHLAADSSRSSKSTVKRESLSGINYLKIHKVDVLGDVNFSEGIVWPGAS

SEQ ID NO: 16922 - protein, 1074 aa, unidentified
  REGION 1..1074: note = Cas Enzyme sequence
MKHPYGIGLDIGIASVGWAVVALNENAEPYGLIRCGSRIFDKAEQPKTGESLAAPRREARSTRRRLRRRSLRKADLYELMAQNGLPGRAKIEEAVQAGHLPDIYALRVQALDGPVTATDFARILLHLMQRRGFRSNRKADDAQKDGKLLQAIDANTRRMKENHYRTVGEMMYRDPVFAEHKRNKSENYLSTVRRDQIVEEAIQLFAAQRQYGAAWASPEMEAEYLTILTRQRSFAEGPGGDSPYRGMQKVGPCALEGKSERRAPKATFAFEYFTLLQKINHIRIAENGVNRILTAEERQELLSACYRTDKLDFARIRKLLALPVEARFNMVRYRENQTAEECEKKEKITVLPCYHKMRKVLNTLRKDHIRSISREQLDAAATALTNPENEEKLRAALEEAQFEPLEVDALMTLPSFSGFGHISVKACRKLIPYLEQGLNYSDACKEAGYDFQGNYRGEKSQFLPASTEEMEDITSPVVRRAVAQTIKVVNAIIREQGESPVNIHLELAREMSKNYKQRNELADAMEKNQAENARLMEELHDLFRGRTITGQTLVKYRLWKEQKEVCAYSLQMMKLDSVITDSSYAEVDHIVPYSRSFDDRRTNKVLVLTSENRKKGDRLPLEYLQGKRREDFIVYTKANVKNYRKRQNLLKEGLSKEESREFIQRNLQDTQYSASFMLNYIRNHLAFADCSAAGKQRVVAVNGAVTAFLRKRWGLSKVRADGDLHHAVDATVIACTTPSMVKRVTEFCKQEETNHVCNEYFPEPWPRFRDELMQRLSACPQENLMQINPVYYQNVDIASIRPVFVSRMPRHKATGKVHEDTIRSYVSEGITAVRTSITDLKLDEKGEIEGYFNKESDLLLYNALKRRLEEFGGNAKKAFAEPFYKPRADGTPGAQVRKVKIVDKTSNVICVRDGGGVSKSNNMVRIDVYYVPGEGYYWVPIYVADTVKSTLPNKAVLRNKGMDDWKEMNEKDFQFSLYNNDLVFIERDSPISFSLTNKKSTLPSKFSTEKTFAYYQKGDISNAAIKVETPDGAYVFKSLTLNTVRKIEKYQVDVLGNYTLVKKEKRQNFPAQRR

SEQ ID NO: 16923 - protein, 947 aa, unidentified
  REGION 1..947: note = Cas Enzyme sequence
MKHPYGIGLDIGIASVGWAVVALNENAEPYGLIRCGSRIFDKAEQPKTGESLAAPRREARSMRRRLRRRSLRKADLYELMAQNGLPGRAKIEEAVQAGHLPDIYALRVQALDGPVTAMDFARILLHLMQRRGFRSNRKADDAQKDGKLLQAIDANTRRMEENHYRTVGEMMYRDPVFAEHKRNKSENYLSTVRRDQIVEEAVQLFAAQRQYGAAWASPEMEAEYLTILTRQRSFDEGPGGNSPYGGNIVEKMVGTCTLEGQAEPRAAKATWSFEYFTLLQKINHIRIIESGAARILTAEERQELLSVCYQTDKLDFARIRKALALSEQARFNMVRYRDGQTTEDCEKKEKIVCLPCYHKMRKVLNTLRKDYIRSVSRDRLDAAATALTMYKNEATLRAKLEEAQFEPLEVDALMTLPSFSGFGHISVKACRKLIPYLEQGLNYNDACKEAGYDFQGNYRGEKSQFLPASTEEMEDITSPVVRRAVAQTIKVVNAIIREQGESPVNIHLELAREMSKNFQQRNDLDKAMKDNNAENERLMKDLHELFPGRNITGQDLVKYRLWKEQDGRCAYSLQPLELEKAITVSGYAEVDHIVPYSISFDDRRANKVLVLASENRQKGNRLPLQYLQGKRRDDFIVYTKASVKNYRKRQNLLKEKLSEEDSKGFMQRNLQDTQYIASFMLNYIRSHLAFADFPAAGKKRVVAVNGAVTAFLRKRWGLGKVRADGDLHHAVDAAVIACTTDGMIQRVSRFYTHIETSDTRGERFPEPWPRFRDELMQRLSACPQENLMQINPVYYQNVDIASIRPVFVSRMPRHKATGKVHEDTIRSYVSKGITAVRTSITDLKLDEKGEIEGYFNKESDLLLYNALKSRLEEFGGNAKKAFAEPFYKPRADGTPGAQVRKVKIVDKTSNVICVRDGGGVSKKQQYGTHRCILCTRRGLLLGTNLCG

SEQ ID NO: 16924 - protein, 1074 aa, unidentified
  REGION 1..1074: note = Cas Enzyme sequence
MKHPYGIGLDIGIASVGWAVVALNENAEPYGLIRCGSRIFDKAEQPKTGESLAAPRREARSTRRRLRRRSLRKADLYELMAQNGLPGRAKIEEAVQAGHLPDIYALRVQAMDGPVPATDFARILLHLMQRRGFRSNRKADDAQKDGKLLQAIDANTRRMEENHYRTVGEMMYRDPVFAEHKRNKSENYLSTVRRDQIVEEAIQLFAAQRQYGAAWASPEMEAEYLTILTRQRSFAEGPGGDSPYRGMQKVGPCALEGKSERRAPKATFAFEYFTLLQKINHIRIAENGVNRILTAEERQELLSACYRTDKLDFARIRKLLALPVEARFNMVRYRENQTAEECEKKEKITVLPCYHKMRKVLNTLRKDHIRSISREQLDAAATALTNPENEEKLRAALEEAQFEPLEVDALMTLPSFSGFGHISVKACRKLIPYLEQGLNYSDACKEAGYDFQGNYRGEKSQFLPASTEEMEDITSPVVRRAVAQTIKVVNAIIREQGESPVNIHLELAREMSKNYKQRNELADAMEKNQAENARLMEELHDLFRGRTITGQTLVKYRLWKEQKEVCAYSLQMMKLDSVITDSSYAEVDHIVPYSRSFDDRRTNKVLVLTSENRKKGDRLPLEYLQGKRREDFIVYTKANVKNYRKRQNLLKEGLSKEESREFIQRNLQDTQYSASFMLNYIRNHLAFADCSAAGKQRVVAVNGAVTAFLRKRWGLSKVRADGDLHHAVDATVIACTTPSMVKRVTEFCKQEETNHVCNEYFPEPWPRFRDELMQRLSACPQENLMQINPVYYQNVDIASIRPVFVSRMPRHKATGKVHEDTIRSYVSEGITAVRTSITDLKLDEKGEIEGYFNKESDLLLYNALKRRLEEFGGNAKKAFAEPFYKPRADGTPGAQVRKVKIVDKTSNVICVRDGGGVSKSNNMVRIDVYYVPGEGYYWVPIYVADTVKSTLPNKAVLRNKGMDDWKEMNEKDFQFSLYNNDLVFIERDSPISFSLTNKKSTLPSKFSTEKTFAYYQKGDISNAAIKVETPDGAYVFKSLTLNTVRKIEKYQVDVLGNYTLVKKEKRQNFPAQRR

SEQ ID NO: 16925 - protein, 947 aa, unidentified
  REGION 1..947: note = Cas Enzyme sequence
MKHPYGIGLDIGIASVGWAVVALNENAEPYGLIRCGSRIFDKAEQPKTGESLAAPRREARSMRRRLRRRSLRKADLYELMAQNGLPGRAKIEEAVQAGHLPDIYALRVQALDGPVTAMDFARILLHLMQRRGFRSNRKADDAQKDGKLLQAIDANTRRMEENHYRTVGEMMYRDPVFAEHKRNKSENYLSTVRRDQIVEEAVQLFAAQRQYGAAWASPEMEAEYLTILTRQRSFDEGPGGNSPYGGNIVEKMVGTCTLEGQAEPRAAKATWSFEYFTLLQKINHIRIIESGAARILTAEERQELLSVCYQTDKLDFARIRKALALSEQARFNMVRYRDGQTTEDCEKKEKIVCLPCYHKMRKVLNTLRKDYIRSVSRDRLDAAATALTMYKNEATLRAKLEEAQFEPLEVDALMTLPSFSGFGHISVKACRKLIPYLEQGLNYNDACKEAGYDFQGNYRGEKSQFLPASTEEMEDITSPVVRRAVAQTIKVVNAIIREQGESPVNIHLELAREMSKNFQQRNDLDKAMKDNNAENERLMKDLHELFPGRNITGQDLVKYRLWKEQDGRCAYSLQPLELEKAITVSGYAEVDHIVPYSISFDDRRANKVLVLASENRQKGNRLPLQYLQGKRRDDFIVYTKASVKNYRKRQNLLKEKLSEEDSKGFMQRNLQDTQYIASFMLNYIRSHLAFADFPAAGKKRVVAVNGAVTAFLRKRWGLGKVRADGDLHHAVDAAVIACTTDGMIQRVSRFYTHIETSDTRGERFPEPWPRFRDELMQRLSACPQENLMQINPVYYQNVDIASIRPVFVSRMPRHKATGKVHEDTIRSYVSKGITAVRTSITDLKLDEKGEIEGYFNKESDLLLYNALKRRLEEFGVNAKKAFAEPFYKPRADGTPGAQVRKVKIVDKTSNVICVRDGGGVSKKQQYGTHRCILCTRRGLLLGTNLCG

SEQ ID NO: 16926 - protein, 918 aa, unidentified
  REGION 1..918: note = Cas Enzyme sequence
VKDILQIKSTKDDWSLDESPLSASEIRERVKAIFQTLGICTKILYFDPLLPVKEFEQQYSYQLWHLLYSYESDDSTSGNETLYRILEKKYAFKREHARILANVALQDDYGSLSTKAIRKIYPYIKENQYSTACELAGYKHSKLSLTTEELEARELKNIIPLLRKNALRNPVVEKILNQMINVVNALIEKNSERDAEGKITKYFHFDEIRIELARELKKNAQERYEMTQNINKAKSEHQKISEKLQKQFGIKNPTKSDIIRYRLYKELEHNGYKELYTNAYIAPDVLFSKNIDIEHIVPKARVFDDSFSNKTLAFKEFNIKKGESTAFDYITSLNCEGELNQYLTRVENAYKTKSISLTKYKNLLKKASEIGDGFINRDLRDTQYIAKKAKEILFQVTKNVLSTSGSITDRLREDWGLVDVMKELNMPKYQSLGLTEVEERKDGNKVTVIKDWTKRNDHRHHAMDALTVAFTKPSYIQYLNHLNARKDENNKNYSVILAIEKKETIKVPTNNGKNKRVFIEPIPNFRQVAKKHLEEIFISHKAKNKVVTKNINKPAGTDKQQITLTPRGQLHKETIYGKYQYYVNKEEKVGVKFDERTIIKVSNPLYREALLKRLQANDNDPKKAFTGKNALSKNPIYLDEAKTKTLPEKVNLTYLEEDFSIRKDISPDNFKDLKSIEKVIDQGVKHILIKRLQAYDNDPKKAFVDLEKNPIWLNKEKGIAIKRVTISGVSNAQPLHIGKDHLGKTTLNKEGKEVPVDYVSTGNNHHVAIYQDKDGNLQEQIVSFFDAVVRAQQGLPIIDKNYKQAEGWQFMFTMKQNEMFVFPNATTGFNPTEIDLLDSKNKKLISPNLFRVQTISVVKYGNSVVRDFKFRHHLEATLQDDKILQGITFQQIKSLEPLRNIVKVRINHLGDIVNIGEY

SEQ ID NO: 16927 - protein, 1155 aa, unidentified
  REGION 1..1155: note = Cas Enzyme sequence
LAEALKRRSGVTAKTKELLKILLNGKKPEKSGTEEFPFSQDSIIRLLAGGQCKLKDVFCKEEYLDLGSISLDMDEDKFGEISGSIGEDYDLLMALRGLYDWSVLADLLNGHSKTISAAKVQMYEQHKEDLRVLKYFMHKYLPGKYNEVFRKAKADNYVAYTGHMDKETASQLKKKANVEDFSRYIQKLVRSINPEEKDQQTYQDMCERLELKCFLPKQRSTNNRVIPHQLYEYELIRILKNASLYLPFLNEVRNGVSEIDKVVSIFRYKLPYYVGPLNEESSFAWISRKQGKITPWNFKDMVDEDTSENVFIRRMTNKCTYLPGEDVLPKDSLCYQKFMVLNELNNLKIDGRKVPVEVKQGIYHELFEKKKKVRRKDIEEYLISNNYLAKGSTELISGIDEQVHSCLSSYSAFRNLLSREILSENDVEKIIERASYAEDKSRVKKWLRKEYPDLSQDDVRYITKIKIKEFGKLSRTFLTELKGCNKQDGEMTTILRIMWETNDNLMEILSDKYTFREAVEAFTQEYYTGKKKSLKERLDEMRVSNSVRRPVYRTLAVVKDIEKAFGKPDKIFVEMTRGGQTDQKRKRTKSRKQQILDLYDKCKDDVHDLMQQLESMGEYADSRLQSDRLYLYFMQFGKCAYSGAHIGFDQLMAGSVEYDIDHIYPQSYVKDDSLNNKVLVLSDLNGTKDNIYPVSPEIRGKMQGLWSWWNHVGAISDEKYKRLIRSAPFTDEEKMGFINRQLTETSQSTKFIADLLKERFPDAEVVYVKAGLVSDFRHEFDLPKSRSYNDLHNAADAFLSVVAGNVYDMRFSKKWFRIDEKYSVKVKTIFTHEVKCRGDIIWDGMPMLEKVEDTARKNTAHFVKYAAFKTGGLFDQNPVKKGTGLIPLKAGLPTEKYGGYNKAGIMFLIPVRYNIGKKSEILILPVELMHGKHFLEDKVFARNYTFTRLENILGKKVGEVSFPMGMRPWKINTMLSFDGFRVCLTGTSGRGKCLVAQPVMQFSADEHWRFYVKRLERFVEKIGINPDLLYDKDHDKVSKDENLKLYELYVDKLQNTIYKKRVNSPVQTLLKGKEEFKKLSIEEQCQVLLNIQSVFGRMTGGCDLTLIGGSAHSAATGSLSTTISNWKKKYSTVRIIDQSPSGMWEKSSENLLDFL

SEQ ID NO: 16928 - protein, 1404 aa, unidentified
  REGION 1..1404: note = Cas Enzyme sequence
MKKLKQMSGPYSIGFELSSTAHGFVATDPNGNVLYHGKQPVMGTRVFKEGQHAAEARMPRTSRRGIQRRRGREHEMERVFAPVISSIDPDFFIRCRMSYKLGKIRFESDPIGFSYSRLFHSFPTLAHLDVALMEADSAMDPRLIFEAVANHVVRRGHFLLENQNVSSTNSDIDTQVANYAEVLVSYFEDTLDERIELSLEALDINGNVTARELQKQFASAMCVSGDDIQKKTEKAQIKAIADLVAGYKADLTVLVPDAEKLPKVSISDGDALEEFLADSCPDSLVPVLMAAQALYTSWKLQGMLSYAPGKSLSHNQVAQHDVYGKQLRMLKDLALKYVAKQDANGNVDEDGFKDYVRFFGGPKREDGYRYDKVQVKKQDSPKNNMGYTAYNLNVLGYEEFAKRVELLFKDTDAVDDSQYKTMMEAFANHAFLRRIHTVDNAAIPYQLHAEVVNRIIDNQGRFYPWLIDAREHILKVLTSRIPYYVGPLDSTDHGKAGENGTRFAWVKRLAGHEDAFVSPWNYEDHIDIDTTAELFIRRMTGECSYLDGEDVLAKNSLLYEKYCFFNELASLSFTEDGDSWMPFDAGMRRAIYDAASDGKTMTVKRIESVLQRDFFIAHPHVRGTSNPKAMSSKRSNYAYFCRLFDVKALSASDMSMAEDLVLWNTVFEDRDILRRKILKTYGDLLTEKAVDDFCHKHLSGWGKLSERLLTGIWADTASGDMCVMDVLEQGRPYGRYRGSSMNLMQILNDDVLGFKMEIKRLNDSHMQTAEGFDLNALPGSPALRRGVSQAMKVLDDIVSVAGKAPDRIYLKVTRTASNSRKGKRTAKRCDKIKQALKALDADAAADLGAAKLLRELGMFDEKEINERIYLYFHQAGKCLYTGKPIDITRIASNDYYVDHVVPLAYRKDESLDNKVLVYAEASRYKSETLLVSPAVQRKMLPFWRMLRNAGLMSERKLNALNRTEVSEGMLKSIIGRQFTENSWEAKLFTAAIAAKYPGTVVIPVKAGVIGAVRSRIGIPKSLKANQFYHAHDALLAAEVGRYMELAKPALVHNRVKYEQYMRKIKLVDEENKKAPKSQLDFFAGGFFFDRVDKDTGEVYWNKDEEVERIYRACGWKNLRVTYAAFEDGGAFWKQTIYSPREKSKLIATKSDRPAEIYGGYSSQTFANFFVYEVMKKKVKQLRFGAVPAAIASKSDPDTYNAMLEMYARGLAKTAKEKFVRIVRARVLKNTMIELYGERFRIAGEKQVYPVRQMPLAIDEVYLLKGVETIAAAGNAGASAKIDFEKAAESLVGFWDLLLEKLPVNYPKLTVQLKLGSLKHPKDILAATSESEFPAIVYKIAEAEIQVMEQASGLRNMSDTKILGGNTFGGSLVFTFNKVLNDPKSKACFIDTTPAGLYEVKTKIW

SEQ ID NO: 16929 - protein, 1188 aa, unidentified
  REGION 1..1188: note = Cas Enzyme sequence
MGIDVGLKSVGLAAIAIDDSSCNPLDAIPMKLLSVMSVVHDGGIDPDGAKTDTSRMSSAGVARRARRLRKRATARKKNLQKLLEKYGFDFERANAIGDLAFSKDPYFSWYAREQAASSYIPNETQRNLAIAISLMAIGNHRGWRNPYSSINMLKGQSLKPSSFYLEFANELMELNRIPANTDINSEHRLTPAQLVVRANLLSPDVNFRGNPANRSKNRRDRSVNLGITLIPLGKLHQSDYYYEARTILEMQHVDETAKNEFLTELFSQINPKDVGAAASKVARDDLQPSLARASKASLEFQRFRILTTLQNIRIKTNDSTRRLSADELVSAYEYLCSEDASLDADLSWDDVALHISPSLKRSDLTGVGGITEDGEPISSKRPPVLTTQSLIVRAGKKEALRDVSQWWARASDDEKEMFINFLGNVGASAECQTNEEIMARNSVDEEMSRLEEDSLAELEKISIPAGRAKYSINTMRRLNHRMLHDNLDLHDARMREFGVASDWKPSAEELGTPTGNPAVDRTLRIVSRWVRACVDKWGIPESVNIEHVRGGFMSPKAAREYDKKLEFRYKENKKIREEIVKALSEEGSEGLLSNEYVRRSDIRKWQALQRQNCQCAYCGRRISFFTAQMDHIVPRKGAGSTNTLDNLVATCANCNKEKSNTLYSVWATAEQRKATIERVKHWNRDSYFANGKEFEQYKRAVIARLNQTVEDEPIDNRSIESVAWMARCLSEQIEGYLIERSAADSDPGRKNSVHVYRGWITAEARRASGIENELPWLGGASGKTRLDRRHHAIDAAVIAFLRPAVAQVLVERDSMRCASLDLGRDNDWKTYCGGLEEHSIYLNWRDNQMTALGMLLCRAMLSDKIAVTSPLRLKLSRGKVHEDTVQKAVYLRVGDAMTSEAIDKALSPAVWGALTHQPDYDSATGLAENNSRVLNVHGKVLPHDSKIGFMSDKAKLMKREYALRCSVRGGYANLGDSIHHARIFRIPGSRGKGFRFAMMRVAEIDLARYRDADLFSVQLPMQSISVRFADDSLKAALRDGTAEYLGWLVVNDELVINPDASLFSPKGKQAINLFMRAFPGTRHFKVTGFPQRSKIKIEAQMLSSEGLPDLSSIEDDAERSRIIEDVYGGLAWTDDEVDTIRKAFGDHAGLLLSVDVLFATKPLVVRRSTLGYPRWRSKSNMPLSWTVE

SEQ ID NO: 16930 - protein, 1018 aa, unidentified
  REGION 1..1018: note = Cas Enzyme sequence
MESNRMRYRLAIDLGSTSIGWAMIRLDAEHNPCAVIKTGVRIFSDGRNPKDGSSLAVTRREARAMRRRRDRLLKRKARMMKLLVQHGFFSEDPLQRKALEKLDPYRLRAEGLQRALQPGEFARALFHINQRRGFKSNRKTDKKENDSGALKQAIKQLRQSLLTEDCRTVGEWLHRHQSQGHGVRARYRERKVLREDGKARIDKSYDLYIDRAMIESEFDALWAVQSAFDPDRFCEQARIDLKDCLLHQRPLKPVKPGRCTLLPEEERAPLALPVSQQFRIYQELNHLRLLQSDLRETPLTLTQRNTLAHALESKGKLSFEQIRKLLGLPGSIQFNLEDSKRKELKGNATSALLSRKDLFGPAWLQFTPALQQSIVQQLLSEENETRLVQWLQAQTGIDEARAESIANAPLPEGYGSLSVRALERILPALEREVLTYDKAVQAAGFEHHSQLDYAATGEILERLPYYGEYLQRHVGFGTGDLQDPPEKRHGRIANPTVHIGLNQIRTVVNQLIQRYGHPSEVIIEVARELKQSREQRREEQERQAKNQKRNERMRTDIAEILGTTPDRVKASDIQKLILWEELSHNEADRRCPYSGAQISLGMLFSEQVEIEHILPFSMTLDDSLNNKTVATRQANRIKGNRTPWEARQDFEALGWTTEGMLDRAELMPRNKRYRFGAEGYARWQRDDKGFLARALNDTRHLSRVAREYLSLICPQGTRVIPGQMTAMLRAKFGLNDILGLNGEKNRNDHRHHAVDACVIGVTDQSLLQRFAQASASARQRQLGRLVDDMPLPWPNYREHVARAVERIWVSHKPDHGHEGAMHNDTAYGLIGNGQVSVRKVIDGRRLKTVETLRVIEMSDPRAHERHGQLPNGNPRPYKGYKGDSNYCMDIVRDEKGKWVGEVVSTFQAYQLARQHGLERLHDRRTSISGKPLVMRLMVNDCLRLMVDGQTLTLRATTISGNGQIFMAPHNEANVDARNRDKNDPFGYISKMAGSLQKAKGRKVSISPIGEMKDPGFKD

SEQ ID NO: 16931 - protein, 1320 aa, unidentified
  REGION 1..1320: note = Cas Enzyme sequence
MNDYYAGFDMGTDSVGWAVTDPDYNLCKFKGNAMWGIRLFDESNTAEERRGFRTSRRRTERKRQRIEWLQMLFDTEIAKKDIAFFQRLKESKLYLEDKSTAVPYAVFADEDFTDVDYHNLYPTIYHLRKELILSREPHDVRLVYLALHHLIKNRGHFLFDNMGSDFEKESSFEVLFSNLQEYLCTEYELSLECTDCTQIAEILKDKTKRKTAKSSEICKMLGISKKTHPKQTAVILLLCGQSVKLADLYGDDSYNNEEKPSITFEKGYDDNEEYYRDLLLERFELIEKVKALYDWAVLADILKGEKYISFAKVKTYEEHKSDLQQLKSFVKEKCKSEYNEIFRKTKDKLNNYTAYCGKFKEDGKNGAIIYRTNQIDFCKYLKGKFDKLDKTGYESMFEKIENATFMPKIVIKDNGVIPMQVNKSEVKAILKNASEYLDFLNDADENGVTVADKILQIFEFRIPYYVGPLNNSSDKAWLVRKEGKIYPWNFKSVVDVDKSAEEFINNLTAKCTYLPDKDVIPKNSILYCKFMVLNELNNLKIDGKKPDVSFKQAVFNDLFMRRKKVTQKALRDYIKAQTGNTPEITGIDGDFKANMRSALELIIYNLTEQDKEDIIKAITIFGDDKKLLKRRIKMKFSDKLSEDEIKKICKLKYKDWGRLSREFLTEIYDFDTTTGECRDNIINTLWNTNDNLMELLGSKYNFAKSVENAVLGSTHKASIEKMIEDMYVSPKVKRPVYQSMKIMQEIVKVKGGAPKKIFVEMTRHDGTKGDAGRTKSRKIQLEELYKKCKEDSGELWEELEKTEDDRFKQDKLYLYYTQMGRCMYSGESIGLKDLFNNNLYDIDHIFPRSKIKDDSLDNRVLVKKQINAHKDNDYPLDGSTREKMKNHWQYLYQHNFISKKKYERLTRVTPITDDELSDFIARQLVETSQSTKAVATLFKTLYPNTEIVYVKAGLVSEFRNEYKFTKCRDVNDLHHAKDAYLNIVVGNVYNVRYTHNKSIFIKGLQTKKYSLNKMFTFETKGTWDIENSKSISTVKKSMHKNNILFTRYSYVQKGGLFKINPLKKGNGQAPLKKDLPLSDISKYGGYDKPTAAYFSYVKYDGKKGKECRQLVAIDNYLKKYYEENPTEYLTARLGLKNPVVLIPIVKYNSCIEIDGFRVHMSAKTGKYISCKPATQLVLGADKEAYVKKISKLLSKPEEWKITSFDGISEDENIALFDAFVDKMTNTIFKVKFADMGSKISSHRDKFVSLDVRKQCYVLSEILKIIHCNVVTGDLTFINEAKKAGAIKFGMVVTDLKGINSIKLINQSVTGLFESKVDLLN

SEQ ID NO: 16932 - protein, 1320 aa, unidentified
  REGION 1..1320: note = Cas Enzyme sequence
MNDYYAGFDMGTDSVGWAVTDPDYNLCKFKGNAMWGIRLFDESNTAEERRGFRTSRRRTERKRQRIEWLQMLFDNEIAKKDIAFFQRLKESKLYLEDKSTAVPYAVFADEDFTDVDYHNLYPTIYHLRKELILSSEPHDVRLVYLALHHLIKNRGHFLFDNMGSDFEKESSYEVLFSNLQEYLCTEYELSLECTDCTQIAEILKDKTKRKTAKSSEICKMLGISKKTYPKQTAVILLLCGQSVKLADLYGDDSYNNEEKPSITFEKGYDDNEEYYRDLLLERFELIEKVKALYDWAVLADILKGEKYISFAKVKTYEEHKSDLQQLKSFVKEKCKSEYNEIFRETKDKLNNYTAYCGKFKEDGKNGAIIYRTNQIDFCKYLKGKFDKLDKTGYESMFEKIENANFMPKIVIKDNGVIPMQVNKSEVKAILKNASEYLDFLNDADENGVTVADKILQIFEFRIPYYVGPLNNSSDKAWLVRKEGKIYPWNFKSVVDVDKSAEEFINNLTAKCTYLPDKDVIPKNSILYCKFMVLNELNNLKIDGKKPDVSFKQAVFNDLFMRRKKVTQKALRDYIKAQTGNAPEITGIDGDFKANMRSALELSIYNLTEQDKEDIIKAITIFGDDKKLLKRRIKMKFSDKLSEDEIKKICKLKYKDWGRLSREFLTEIYDFDTTTGECKDNIINTLWNTNDNLMELLGSKYNFAKSVENAVLGSTHKASIEKMIEDMYVSPKVKRPVYQSMKIMQEIVKVKGGAPKKIFVEMTRHDGTKGDAGRTKSRKIQLEELYKKCKEDSGELWEELEKTEDDRFKQDKLYLYYTQMGRCMYSGESIELKDLFANNLYDIDHIFPRSKIKDDSLDNRVLVKKQINAHKDNDYPLDGSTREKMKNHWQYLYQHNFISKKKYERLTRVTPLTDDELSDFIARQLVETSQSTKAVATLFKTLYPNTEIVYVKAGLVSEFRNEYKFTKCRDVNDLHHAKDAYLNIVVGNVYNVRYTHNKSTFIKGLQTKKYSLNKMFTFETKGTWDIENSKSISTVKKSMHKNNILFTRYSYVQKGGLFKINPLKKGNGQAPLKKDLPLSDISKYGGYDKPTAAYFSYVKYDGKKGKECRQFVAIDNYLKKYYEENPTEYLTARLGLKNPVVLIPIVKYNSCIEIDGFRVHMSAKTGKYISCKPAAQLVLGADKEAYVKKISKLLSKPEEWKITSFDGISEDENIALFDAFVDKMTNTIFKVKFADMGSKISSHRDKFVSLDVRKQCYVLSEILKIIHCNVVTGDLTFINEAKKAGAIKFGMVVTDLKGINSIKLINQSVTGLFESKVDLLN

SEQ ID NO: 16933 - protein, 1320 aa, unidentified
  REGION 1..1320: note = Cas Enzyme sequence
MNDYYAGFDMGTDSVGWAVTDPDYNLCKFKGNAMWGIRLFDESNTAEERRGFRTSRRRTERKRLRIEWLQMLFDTEVAKKDTAFFQRLKESKLYLEDKSTAVPYAVFADEDFTDVDYHNLYPTIYHLRKELILSREPHDVRLVYLALHHLIKNRGHFLFDNMGSDFEKESSFEVLFSNLQEYLCTEYELSLECTNCTQIAEILKDKTKRKTAKSSEICKMLGISKKTHPKQTAVILLLCGQSVKLADLYGDDSYNNEEKPSITFEKGYDDNEEYYRDLLLERFELIEKVKALYDWAVLADILKGEKYISFAKVKTYEEHKSDLQQLKSFVKEKCKSEYNEIFRETKDKLNNYTAYCGKFKEDGKNGAIIYRTNQIDFCKYLKGKFDKLDKAGYESMFEKIENATFMPKIVIKDNGVIPMQVNKSEVKAILKNASEYLDFLNDADENGVTVADKILQIFEFRIPYYVGPLNNSSDKAWLVRKEGKIYPWNFKSVVDVDKSAEEFINNLTAKCTYLPDKDVIPKNSILYCKFMVLNELNNLKIDGKKPDVSFKQAVFNDLFMRRKKVTQKALRDYIKAQTGNTPEITGIDGDFKANMRSALELGIYNLTEQDKEDIIKAITIFGDDKKLLKRRIKMKFSDKLPEDEIKKICKLKYKDWGRLSREFLTEIYDFDTTTGECKDNIINTLWNTNDNLMELLGSKYNFAKSVENAVLGSTHKASIEKMIEDMYVSPKVKRPVYQSMKIMQEIVKIKGGAPKKIFVEMTRHDGTKGDAGRTKSRKIQLEELYKKCKEDSGELWEELEKTEDDRFKQDKLYLYYTQMGRCMYSGESIGLKDLFNNNLYDIDHIFPRSKIKDDSLDNRVLVKKQINAHKDNDYPLDGSTREKMKNHWQYLYQHNFISKKKYERLTRVTPLTDDELSDFIARQLVETSQSTKAVATLFKTLYPNTEIVYVKAGLVSEFRNEYKFTKCRDVNDLHHAKDAYLNIVVGNVYNVRYTHNKSTFIKGLQTKKYSLNKMFTFETKGTWDIENSKSISTVKKSMHKNNILFTRYSYVQKGGLFKINPLKKGNGQAPLKKDLPLSDISKYGGYDKPTAAYFSYVKYDGKKGKECRQLVAIDNYLKKYYEENPTEYLTARLGLKNPVVLIPIVKYNSCIEIDGFRVHMSAKTGKYISCKPATQLVLGADKEAYVKKISKLLSKPEEWKITSFDGISEDENIALFDALVDKMTNTIFKVKFADMGSKISSHRDKFVSLDVRKQCYVLSEILKIIHCNVVTGDLTFINEAKKAGAIKFGMVVTDLKGINSIKLINQSVTGLFESKVDLLN

SEQ ID NO: 16934 - protein, 1320 aa, unidentified
  REGION 1..1320: note = Cas Enzyme sequence
MNDYYAGFDMGTDSVGWAVTDPDYNLCKFKGNAMWGIRLFDESNTAEERRGFRTSRRRTERKRQRIDWLQMIFDTEIAKKDIAFFQRLKESKLYLEDKSTAVPYAVFADEDFTDVDYHNLYPTIYHLRKELILSREPHDVRLVYLALHHLIKNRGHFLFDNMGSDFEKESSFEVLFSNLQEYLCTEYELSLECTDCTQIAEILKDKTKRKTAKSSEICKMLGISKKTHPKQTAVILLLCGQSVKLADLYGDDSYNNEEKPSITFEKGYDDNEEYYRDLLLERFELIEKVKALYDWAVLADILKGEKYISFAKVKTYEEHKSDLQQLKSFVKEKCKSEYNEIFRETKDKLNNYTAYCGKFKEDGKNGAIIYRTNQIDFCKYLKGKFDKLDKTGYESMFEKIENATFMPKIVIKDNGVIPMQVNKSEVKAILKNASEYLDFLNDADENGVTVADKILQIFEFRIPYYVGPLNNSSDKAWLVRKEGKIYPWNFKNVVDVDKSAEEFINNLTAKCTYLPDKDVIPKNSILYCKFMVLNELNNLKIDGKKPDVSFKQAVFNDLFMRRKKVTQKALRDYIKAQTGNTPEITGIDGDFKANMRSALELSIYNLTEQDKEDIIKAITIFGDDKKLLKRRIKMKFSDKLSEDEIKKICKLKYKDWGRLSREFLTEIYDFDTTTGECKDNIINTLWNTNDNLMELLGSKYNFAKSVENAVLGSTHKASIEKMIEDMYVSPKVKRPVYQSMKIMQEIVKVKGGAPKKIFVEMTRHDGTKGDAGRTKSRKIQLEELYKKCKEDSGELWEELEKTEDDRFKQDKLYLYYTQMGRCMYSGESIELKDLFANNLYDIDHIFPRSKIKDDSLDNRVLVKKQINDHKDNDYPLDGSTREKMKNHWQYLYQHNFISKKKYERLTRVTPLTDDELSDFIARQLVETSQSTKAVATLFKTLYPNTEIVYVKAGLVSEFRNEYKFTKCRDVNDLHHAKDAYLNIVVGNVYNVRYTHNKSTFIKGLQTKKYSLNKMFTFETKGTWDIENSKSISTVKKSMHKNNILFTRYSYVQKGGLFKINPLKKGNGQAPLKKDLPLSDISKYGGYDKPTAAYFSYVKYDGKKGKECRQLVAIDNYLKKYYEENPTEYLTARLGLKNPVVLIPIVKYNSCIEIDGFRVHMSAKTGKYISCKPATQLVLGADKEAYVKKISKLLSKPEEWKITSFDGISEDENIALFDALVDKMTNTIFKVKFADMGSKISSHRDKFVSLDVRKQCYVLSEILKIIHCNVVTGDLTFINEAKKAGAIKFGMVVTDLKGINSIKLINQSVTGLFESKVDLLN

SEQ ID NO: 16935 - protein, 1095 aa, unidentified
  REGION 1..1095: note = Cas Enzyme sequence
VDIFSKYFVQRREAMNYVLGLDVGIASVGWAVLELNEEDNPIRIEGLGARIFDKAEVPKTGASLAAPRRMSRGIRRVIRRRRFRLQRVRSYLKRHNILPAEKVDHLYDVPSAIDIYELRKRALTEKVTAEEWARLLIFFAKHRGFKSNRKKASGDADEGEMLKAIAANAELLKNYRTVGEMLCDNEKFRKRKRNRDGAYNFTVSRAMLIEEIHTLFEIQRNLGQKFADEKLEEEYVILFVAQRKFDEGPGENSPYAGNQIEKMIGSCTLEGKKEKRAPKASYAFMAFNLWQKINHLKINRRGSERFLTEEERRRIADLAWKKEKLTYGSLREVLFLDPEDRFVGLRYDLKKEKEEDLEEPVSEAEKMSFSWVKDYHSIRKALDKVEKNRILKLSHEQLDTIATAFSVYKNEETIEKYLEEGGIEKADREALLERLSSFSKFGHLSLKACYKILPFLEKGEVYSRACERAGYDFRKSSLENINDIPNPVVKRSISQTLKVINAIILRYGNPVEVHIELARELAKNFRDRKKMEKGMQENQAKNEKIRQRLMSEFGVLRPKGMDIVKFKLCEEQNGECAYSQKHFDMEKLLRDPSYAEVDHIIPYSRSFDDSYNNKVLVLTKENREKRNRIPMEYLADATERKNRFIHWVKSTIRNSRKRENLLRTDYTETTENEWKRRNLQDTQYISKYLYNYLRHHLVLAKGYTERKRRIIPVNGAVTAYIRKRLGINKIRENGDLHHAVDAVIIACATQGIVNKVSRYSKSRELWDYEVDMETGEVLQKKNENRKDIFPEPWLNFRYELEQKVRVRPLDIPETADITEMEEPFVSHMPNRKIHGPAHKETIRSGRLKEEGYTISKTALTDLKLTEDKEEIKGYYNKESDRLLYEALKKQLQRYSGKAKEAFKEPFHKPKADGTPGPIVNKVKIMEKSTMPVPVNGGKGLASNGNMVRIDVFRVEEKGKKKYYFIPVYVADTVKEELPNRAVLAHKPYEAWKIMKEEDFIFSLYPNDLIFVDAGKEIPFKAALKGSTLDPEKKASRFLMYYKGADIAGGTINGVNHDSTYGIRIGLQRLKGIRKCRIDVLGNISLVGKEKRKTFR

SEQ ID NO: 16936 - protein, 1095 aa, unidentified
  REGION 1..1095: note = Cas Enzyme sequence
VDIFSKYFVQRREAMNYVLGLDVGIASVGWAVLELNEEDNPIRIEGLGARIFDKAEVPKTGASLAAPRRMSRGIRRVIRRRRFRLQRVRSYLKRHNILPAEKVDHLYDVPSAIDIYELRKRALTEKVTAEEWARLLIFFAKHRGFKSNRKKASGDADEGEMLKAIAANAELLKNYRTVGEMLCDNEKFRKRKRNRDGAYNFTVSRAMLIEEIHTLFEIQRNLGQKFADEKLEEEYVILFVAQRKFDEGPGENSPYAGNQIEKMIGSCTLEGKKEKRAPKASYAFMAFNLWQKINHLKINRRGSERFLTEEERRRIADLAWKKEKLTYGSLREVLFLDPEDRFVGLRYDLKKEKEEDLEEPVSEAEKMSFSWVKDYHSIRKALDKVEKNRILKLSHEQLDTIATAFSVYKNEETIEKYLEEGGIEKADREALLERLSSFSKFGHLSLKACYKILPFLEKGEVYSRACERAGYDFRKSSLENINDIPNPVVKRSISQTLKVINAIILRYGNPVEVHIELARELAKNFRDRKKMEKGMQENQAKNEKIRQRLMSEFGVLRPKGMDIVKFKLCEEQNGECAYSQKHFDMEKLLRDPSYAEVDHIIPYSRSFDDSYNNKVLVLTKENREKRNRIPMEYLADATERKNRFIHWVKSTIRNSRKRENLLRTDYTETTENEWKRRNLQDTQYISKYLYNYLRHHLVLAKGYTERKRRIIPVNGAVTAYIHKRLGINKIRENGDLHHAVDAVIIACATQGIVNKVSRYSKSRELWDYEVDMETGEVLQKKNENRKDIFPEPWLNFRYELEQKVRVRPLDIPETADITEMEEPFVSHMPNRKIHGPAHKETIRSGRLKEEGYTISKTALTDLKLTEDKEEIKGYYNKESDRLLYEALKKQLQRYSGKAKEAFKEPFHKPKADGTPGPIVNKVKIMEKSTMPVPVNGGKGLASNGNMVRIDVFRVEEKGKKKYYFIPVYVADTVKEELPNRAVLAHKPYEAWKIMKEEDFIFSLYPNDLIFVDAGKEIPFKAALKGSTLDPEKKASRFLMYYKGADIAGGTINGVNHDSTYGIRIGLQRLKGIRKCRIDVLGNISLVGKEKRKTFR

SEQ ID NO: 16937 - protein, 1171 aa, unidentified
  REGION 1..1171: note = Cas Enzyme sequence
MKNEENIYLGLDIGTDSVGYAVTDDKYKIMKYHGNAAWGSTIFDAGALGADRRVFRSARRRLDRRQERIQLLQEIFANEIAKVDERFFIRLLESGLWRDDAEDRYVFFNDKEYTDVQYMREYPTIHHLICELIYNSNKHDVRLVYLACAWLVTHRGHFLSNINTENIADLVDIHNVYNGFMRFFEENEIICDWREVNVEELGRVLAANIGINEKYRNLSTVLFATRKPDKKAKEGFPYSEDAIVRLLAGGTCKLKDVYIKEEYDEFGSITLGMDDEKMTEVMADIGDDFDLIKALRSLYDWGILANILVNENNSPLISQSKVKVYEQHREDLANLKYLVHKYIPHKYNEIFREIRGDNYVAYSYHYELKNDEKMGKKADVEKFSKFLLKILEGISVDEQDKVVYDNMIERLTLRLFLPKQKNTDNRVIPHQLYEYELISILKNTKNYLPFLKEKDSDGISNEDKIISIFKFKIPYFVGPLNCNSQFAWIQRKADGKIFPWNFEDKVDFDASEQAFIQRMTNQCTYLPEESVLPKQSLYYQKFMVLNEINNIKIDGRKISVAMKQELYNEIFEKKKRVRKKDVIDFFVSNGYLEGGKEALISGLDEQIHTNLSSFHAFHRLLQNHILSVEDVESIIERASYSDDKGRVLLFLKNKYSFLTDEDIKYICKIKIKDFGRLSKKFLVDFEGMCKETGEISTVLRLMWETNNNLMELLSDKYTFANGIKENRKKYYTEQQKTLDDRLDEMYISNSVKRTIYRTLSVVKDVTKAFGVPKKIFVEMARTNNPDLKGKRTRTRQQQVIELYAKCDEEDVRELKHQMESLGEYVDNKLQSDKLFLYFIQFGKSAYSGKMIDLEKLMSGSKVYDIEHIYPQAYVKDDSIINNKVLVFSEENGAKQDIYPIKTEIRKQMSGIWTTWHHVGAVSDEKYKRLTRSTPFNEDEKYGFINRQLTETSQSTKAIAQILNEKYPETEIVYVKAGLVSDFRHEFGLYKCRSYNDLHHATDAYLNVVVGNVYNMKFNRKWFSVDSKYSIKTKTIFSHSLVCNGKTIWDKEKMLPMVLKNAKKNNAHFTKYQFMKTGGFFDQMPCKKASGLVPRKKGLDTERYGGYNKSGIMFLTPMRYKIGKKSDIIILSVELLYGKLFLKDEVFAKKYAEERLKKIIGKKQMKYLFLWE

SEQ ID NO: 16938 - protein, 904 aa, unidentified
  REGION 1..904: note = Cas Enzyme sequence
  REGION 778..781: note = misc_feature - Xaa can be any naturally occurring amino acid
KKKRVRKKDVIDFFVSNGYLEGGKEALISGLDEQIHTNLSSFHAFHRLLQNHILSVEDVESIIERASYSDDKGRVLLFLKNKYSFLTDEDIKYICKIKIKDFGRLSKKFLVDFEGMCKETGEISTVLRLMWETNNNLMELLSDKYTFANGIKENRKKYYTEQQKTLDDRLDEMYISNSVKRTIYRTLSVVKDVTKAFGVPKKIFVEMARTNNPDLKGKRTRTRQQQVIELYAKCDEEDVRELKHQMESLGEYVDNKLQSDKLFLYFIQFGKSAYSGKMIDLEKMMSGSKVYDIEHIYPQAYVKDDSIINNKVLVFSEENGAKQDIYPIKTEIRKQMSGIWTTWHHVGAVSDEKYKRLTRSTPFNEDEKYGFINRQLTETSQSTKAIAQILNEKYPETEIVYVKAGVVSDFRHEFGLYKCRSYNDLHHATDAYLNVVVGNVYNMKFNRKWFSVDSKYSIKTKTIFSHSLVCNGKTIWDKEKMLPMVLKNAKKNNAHFTKYQFMKTGGFFDQMPCKKASGLVPRKKGLDTERYGGYNKSGIMFLTPMRYKIGKKSDIIILSVELLYGKLFLKDEVFAKKYAEERLQKIIGKKADEVSFPMGMKPWKINTVLSLDGFNVCITGIGGGGKCLSAQPIMQLSLPYELVKYLKKIEKFVEKNKNNANYIYDEQYDSVSVDENIKLYDVYLDKLENSIYNKRINSPEAILKNGREKFCKLNVLEQAVTLINIQSIFGRMTGGCDLENIGGKKHSAATVNFSSNVSNWKKYYNDVRVVYQSPSGIXXXXKVTEYFGAFMSWRVVIIENQAKLDYKMGYLVIRGLETKRILLDKIAVLLIENPAISITGICIEAMIGKKIKVIFCDSKRNPIAEIFPHHGCHDNPAKLRMQIEWEQSIKDIVWRDIASEKIRK

SEQ ID NO: 16939 - protein, 1116 aa, unidentified
  REGION 1..1116: note = Cas Enzyme sequence
VNDKPFGQPLTLGFDIGVASVGWAVLAPNRIVGLGVRAFDKAETAKEGQSLNLARRNARLMRRRLRRRAWRLKKLARALKRHGVIDDPHLFDPQHPYAPSLWWVRVEGLDRQLNPEEWARVLFHLCKHRGFHWISRAEEKKAESDGKGEGGKVKQGLAATARLMRDKGYRTAAEMVLTEFPEAQRNKQGDYGKALSRELLSDELSLLFQRQRVLGNPHASAGLEAEILGSGDRKSGLFWLQKPALSGAALLKMLGRCTFERAEYRAPKASFTAERHVWLTRLNNLRLFVNGRTRPLNDEERRIALPLPYLQVSDFKYRQLRAELVKQAGLPDNVRFAGLAYPSDAEKADGKAKDPEEATLVKLPAWHEVRLALKRAGLETEWEGMAAAAIDGRAELLDRIAYVLSVFKDDTEVEAELRKLQLPRADTMIDALLDLRFDKFHSLSLKALRGIVPHMEQGLRYDEACERAGYKHSQPQSIATGEHKYLPPFYAKRDKDGKMVFNEDLDVPRNPVVLRALNQARKVVNALVREHGSPHEVRIELARDLSRPLDERRQIEKEQHEYRARNERDRAVFAEHFGREPRGVEFEKWRLYREQQGKCAYSVTPIEIGRLLEEGYVEIDHALPYSRSFDDSKNNKVLVHAAENRNKGNRTPYEYLGGADDSARWRQFVAFVESSKAYRQAKRSRLLRRNFDADDAKEFRERNLNDTRYICRFFKNFIEQHLKLADESERKRCVVVSGQLTAFLRARWGLLKIREESDRHHALDAAVVAACTHAMVKRLSDYARTRELEHVRGGFVDMETGEIVEPAAFVRLERHFPQPWTDFRYELEMRLKEDDPVKLRAAMEALGTYPQASVAVLRPLFVSRAPQRRNGGAAHKDTIYGQPERLKAQGSVTQKVALASLTIKDLDRLIDPHRNEKLYAAIRARLEAHGGKGEKAFPPGDPLRKPDRDGNPTGPIVRTVTMVIDKLSGIPVRGGVAKNDTMLRVDVFTKDRKFHLVPVYVHHRVKGLPDRAIVAFKDEDEWTVIDDSFEFIFSLCPNDLVRVHQKGKQPFLGYYASCHRGTGSINIWAHDRNALVGKDGLLEGIGVKTAISLDKLHVDTLGNVYPAPPEVRRGLA

SEQ ID NO: 16940 - protein, 1035 aa, unidentified
  REGION 1..1035: note = Cas Enzyme sequence
MEKVFAFDVGTASLGIAVRKDFDMIRYESLLLPQEAGGMDELREARRQYRTRLAHAAREAYWKRICEEAGIEVLHSRIHGDASLHIPSSPGDPRLEREFAAPGDETIYTSCLLRIKLLQGAKLEGWQVFKAVRSALQRRGFDRNVPWKNRAASKTNADDDSKTAKNAMEYEKMLLEIVNQQREYLYPCYFDAFQMGLWNPRNNQILLRPSKISNRARGYTPPRELVIAELSALLQNAAKLFPKLVGKIDEVLWGPGKEQYASFFAEKRNALHLKEGSAGDWESLLGQKIPRFDNRQPGKCALIPRFHVCQASDTAIIESTFLLKVKNLRVLSPEGKEVFFSPETIRVILDTARIKARAKREELRLAQADKEAIQAAVASAYKIAKTDLKKTLRSMKYDILPGNEEVEAPKISGRARLSRPAAKIMRDLILSGESPRAFYQKLLQCPPKDIPGATLSDDLQFLLMMPDSWEGIHIPDMAGKKIQESAQSPDDLVRQLIAEQRSPIVRLRLEIFDRELKRLLDDPAIGKPDRIVMEFVRGDFLGEEKKRKLEAEIKRRHKENLEIRTTATEQGYSSGTDLLKLKLLKEQAYVCPYTGDVLSCFALEDLEVDHIVPRHGGKNGSDGFTNKVVTSRTTNQLKGARTPYEFLHGSGKWTAYCNRVMAMKVSKRKQRLLLSPDAEKLDQKYSDLCSTAWIARVFRDIAAVRCCWPEGAIGSERHIVVINGAITAALRRRYRIDSLLAPECKSADEIEKKNRDDKRHHALDAMVLTFTTFWMRNPALRDKLALPDKIDRYYFQKYIDEVNPRNIIFPRAGLEKTIYGKREIDGQSKMTKREDIVSFGIDNKGKFVEKSVLSNFRDVCDEKLRSYLQTSFANAKIDSTEKWMFWCQNLKSPDTGMPIKKVRIVKGGIEEYKNLSKDGDVFGGQYRKGDQHKGYFVYLDTKNKPRVAPVYAHASVSLEREKLCKLGFTVVDFFQSGCSVEIKVHAISGKNHVSPGVYMLTSIWTQGTIALFKNGEKYLVSLSSISDIASNLKRC

SEQ ID NO: 16941 - protein, 992 aa, unidentified
  REGION 1..992: note = Cas Enzyme sequence
MSKILGLDLGTNSIGWAIIDDAAEEIIDSGVRIFQEGVNRSNTGSELSKNADRRNARQIRRQFQRRRMRRQSLAKYLEEIGLYDTNQKNEINQINPYEVRAKGLDKMLEPFELGRALQHINQRRGFKSNRKTGDNEDSKVFTGGNEGVIGINETQKAMQEQNCRTLGEYLFQLDSKTSRRRNRYTHRAMYIHEFNLIWDHQQPFYPEILTDEHKDFIYHKIFDQRKLKSQKHTVGKCSLEPKKHASPKSSPVFQHFRILEQLSRITISTPERDRSMLTTEEWEILKTALFQKKEIKFPTIRKLLGLPSNCHINIEDLGKLEGHKTYYSLKACFGQEMWAKLSDEKKYEIWHTLHFSDSEEWLKRYASDKWGLSTEQTGRILKVQLEQGYARLSHKALSKLIANWKPGLTYDKVVEASGYHFSQNTNAENLKEKLPIPENIRNPIVMKALYEVRQVVNCLIDEFGKPDVVRVELARELKQGKRIRDKQRIENFKRQRKADSVRSFLSTELEFQHPTREDVQRYLLWEECDKICPYTGKSISVNALFGTEFQIEHIIPYSRSLDDSMANKTLCYWEENQEKHNKTPYEAYSGDEKRYAEIIHRVEKKLKHKLHKFLLKTVDDDFVSQQLNDTAYISRATAQYLREVFPKVQGVKGGTTARLRHFWGLNSILSGSIELKNREDHRHHAVDALVVANTTPSYVNSLSKYHEYDQTPRMERFPDPWKTFRTDSTKSIANILVSHKVRKRVRGKLHEETNYGKINVNGVEHFVVRKPIESLTPKMIGNIVDHAVRDRILSRLKDLQVDTSGKYTIPKETFTKPAYMRGGKVQIKSVRVKIPASNMILLRPDQNLYVEPGSNHHIDIFRNEDGKHKGIVTSLYSEAQSILKGTQSKHNEPIGGSWTLWNSFSINELILLDVDEEQINWKNPPEGYILGGQLFRIQKMDVNSNITLRHHTIASLKNSEGIELGRVNKRGGSLKGTKVTVDPIGKLQRTDE

SEQ ID NO: 16942 - protein, 1140 aa, unidentified
  REGION 1..1140: note = Cas Enzyme sequence
MSFILSLDLGANSIGWALFDDEENKYLKTGVRIFQDINTDNDNTQGNTNQDRREQRQRRRLIFRKKYKKLLLYKKLKKIGLINSDIQNYSEFIQSIFYLNPYQLRYEALTRKLTEQELCRVLFHIAQRRGFLSNRKSSREKIGEVKQQIKELEEKIQNKTLGQFLFELYPLEYQPYEYKERIRQRYTSRYMYYDELIKIWEFQSKFYPEILNEDNKKAICDFKKGIIFYQRPLKSQKNLVGKCIFEKNKTRCPKSRYEYQEFAFYQFINNIEILDHNGEIRQLNKSEIGNILEGIIATKKSSKNLTIGDLQKKHKLNIISQHSKNLEQELPPISFVHFVHNLFPQSYIEKHFANDFYGKIEDLWELLNFINDTDFLVEKMKLDKHFPEDPQLGFIYDQKRIELIDNYYHTDGYGSLSLKAIKNILPFLKMGFKYHIATILGGIKKAFGNEYEKLSNEQKSYIISKVQEIYCAQQTSTSKPDLVKDFLSKEFNLSDDALNKIYIHSQVDGEHEILDMLPKFNLNIRNPKVTRAIDETRKIINELLDRDYKIDKIVVEIATELKKSSEDLKKFKNEQFKNRKANIAAYEYLTNVLKIVNPTREMIQKFRLYTEMLNVSERDKSSYYKPMCPYTGKEITIDNLFEDGKFDVDHIIPFSRSFNDSLGNKVLCDAHFNRHIKGNQTPYEYFQKKDPTEWKFIKQRAEKILPKEKYKRFVAETVPDEEDFASNKLNDTRYIAKVAVDYLKQIGAKVQVVSGSVTGIVRRYWGLNSILNELNKHINIEKENMLDYDIKNRIDHRHHAIDAMVLCLISPKIIKDISTLKTRKLYETGIKTLPYPWQSFKNDIEKIVSELIVSHKRHNPVASIASKYILVKGKKIKIKTLAPRGPLHNETFYGLRTNPDTKKEVFVHRVSLSNLDNENKINKIMDNNVREIVLKHFKNKASNKNVFFTLDENKRSVPLVYLPNKTGNPVPIKKVRVFEEKKNIRQIGDYNKWVEPSNNHHAEIYQKPNGKIYQKLVTLWEAVERVKNKQPVYKDINNNDKLIATIERNEIFALGLPNNLDLAKFKEIKHINKYLYRVQKVSFISNLEIPRYTFRNILAATLKYKEQEIEIDSFKKLKDINLYKIIVNNLGEIVNVIEVL

SEQ ID NO: 16943 - protein, 1498 aa, unidentified
  REGION 1..1498: note = Cas Enzyme sequence
LDTGVRIYPEGVTAKTIGLGDKEVSRNATRRDARQLRRQFYRKRLRKIKLLELLIEQDMCPLKRAELFEWKNWDKTKKSEGRVFPNSPEFVDWIKLNPYQLRAKAINKQVSKYELGRIFYHLIQRRGFLSSRKGGADPQTLFERGKPEENILPIKETKEKIKGTSLGYYLNSIANKENEAYKFQELRLRGRYTIREMYIEEFDKIWTEQNKFYDLDSKTTIFTKIRETKGSINNKKNTTRLNYLKEKYGEANVEVVEITDKNNLSNNDETQSVKKETRHKIITKEEISLKYVLAGDIEYITDDDGERKVKFKSNESILYWQRPLRSQKGLLANCRFEDELPVINKNGEFSKDENGEIIKRSKKPCPLSHPEFEEFRAWQFINNIYFGKRNPLSDEQKQIVLDLINKKKKNFNFTEIIKALKLNYEKFNYDEKFTVTANTTISQLSELFEPEVWKEKYDEIWHCFYFYEDDDKLYEKLKKSYAYSGNLETVSKIKLKDGYCNVSLKAIRNILPFLKQGYLYDKAVILGGVKNAFGKRWEYFQDYHYDIINKVVAVLKEDNKEGEAILKIKEVLSSKTNRYGFSVDDPRFFHLYHHSQSVEQKKDLNDRLPVVENLRNPIVQQGVNEMRRLVNALMKKYQIEFGDYFRFDKIKVEMGRDLRNTKSARQDMTIRIRENEKKNDEARSRLQEYGLQPSRNNVQKYLMWKEIADVSGTPRCPYTGKTIAISDLLGSSNTVQIEHIIPYSISLDDSFGNKTICESHFNNLKGELTPYQFYQKNPDVKLWGVSSWDAVADRAFQILPYAKAKKFTIKSELKLDDFIERQLNDTRYIAKKSVELLSNICSDVRVMPGQLTAELRHLWGLNNILQDNIPNLQEELGKVKNIENNNCFLVLNEDNEIIEIVPKQNSRPKTNSDEILLPIIVKGKKLVSDSFNLDIDLENYPDGKYWAKLKVDNDFLIIPRYVQKPLVSEDRIVFRGKIEKQTFKNDTSGNIKVTNKEDGVYWVDIAIKNKEFKNAQTQKSRPDVKPKSKIVLFGNVKDEKFSCYIYNCKTNLPDGKYWLILELDINDVNFTKAVNDKPDLDANNQICLNATVNDLQELVLDIDNLSNFKVNEAAGKYFTKIKIKEINPNLNLIENNPPILKEKTHKILEGVIWADKYSGEIKFDPKKKRDDHRHHAVDAIVIALTEQGFLQKLSTWHASDDIKYKERLDDSEKFPMPWDEFYTDTKKAVNSILVSHKKQNKTLTRNKKGFSVRGQLHKETVFGLRQAPKQEQAHHFRVKVTSIEDEKKYKKIVDEGIKEIIRNYLLAKYGKDIKYAENFKIPKDAFYENNEWTLFLPNKRGDKVPIKKVRIKENLSNTVQLKSDLNQYVNPRNNHHVIIYKDLEGKLQEDVVQFWTAVERKQKGESAYQLPEDGLEIIEILEINDMFLLGLSEEEYEDNKNNKEFLSKYLYRVQKVTSKFYTFRKHNASTLDNSEYEFRIQSMSAWEKANPIRYKISL

SEQ ID NO: 16944 - protein, 1395 aa, unidentified
  REGION 1..1395: note = Cas Enzyme sequence
MKHYNLSLTPSSSAVGYAVCDDNLNLVQLVHHKPALGSRLFTEGKSKADRRLFRASWRNNRRTKARIKALNSVMEKEINRVDPTFFDRLNQSGLSPLDNNKKYRTVIFDKPAVESYYHKKFPTIYHLEQYLMTTNEKADIRLIYWALHSLLTNRGHFFNTTPVSQFKPGTLNVKDKMLELKSLNTISELDYAVENAPEIEHVLKQKNVSKKYKIKQLKEDLFEPASDRNIQKRNDKIATAISKAILGNKFQFNEIIGITADKNERKSWSIKLSDKDLDTKIGELSEKISDNQLRILEILQEIYASVALLDVLQGASSLVEAKIKSYDKHKKDLHLFFKVLNNMKNKDAAKTLREAYTLYIGNHHRNLVEARKDLGVNTATNFARDDFYKLINKTLGNEDDQNVAKVKELIKKGDFLKKKRVTDNAYVPYQLNAIVVNKILANQGKHYSFLVEPNPALPDRKEAPYKISQLMQFTIPYYVGPLATPAEQKNLPEGSKFAWLVRKEKGKITPWNFYDKVDVMATADAFIKRAIGKDTYLLSEPVLPQNSLLYQKYTVLNELSNISLVDANTKKVNKLNANVKQLLYRECFKKKVTVTKQFAMKVLNDHNIPVSDIEGLSDGKKFTSALTTFNSWKKHFPEEIDNPHFAQDFENMIEWSTVFEDRKILADKLRQEIDWLTNEQFKFIVESRLTGWGRFSKKLLVGLKDAKGKSVLDNLYNTKKNFNQIIARADFRTQIDEIAYRTTQNQSLDDILDAMYASPANRKAIHQTLRVVEEVVSWAKSAPDKIFVTFQRSKEQEGKLIDNRATQLLKIYRGIKDKDPWVDSDLIDQLSQAVYAKDPRDKLNNKRYLYFQQLGRDALTGEIIDPSKINEYSVLHIIPRSKIIDDSINNLILTKIKSHSDSIMKEFGSNKILREKMTIKEFWNKLYNLGLLSKAKLNNLELDLGSLNKYQRKGYIARQLVETNQVTKAIAMILQTKYPHSKIIEVRHDQIANVRYCFDLYRIKNLNTYYRAMDAYIAAVVGTYVYTVYPKARRFFVYGEYLKPKVKPNQDFNTKETGHGFNFLWRLLYGKEDEVYVQGTNNIAFSRAEIIAKLKQVYNFKYQNISIATATKRANMFNQTLYPRHERDVQKTRTLIRKKKNLDTDIYGGYTGNVNSFFVLVQTKRKNKPDKFNLYGVPRRFLDVLEASKSTGNYEQKLHEIVDPIVKSNNNKMTSYRIIKDKVPYYQAILDEGSKFCITSDQYRYNCRQLILSQEAQKSLMDYVVDPNFYQHKKTKDVVFDKDTKLVKVYDEILHQVDTYLPLYTIRSISTKLKKAHSAFEKCSLKDKAYVLDRLLTSISSNPTMPDLKPIGLTPLTLIKKNCPLTENAVFIYTSPTGMKSKKVSIKQMIEKFKN

SEQ ID NO: 16945 - protein, 1069 aa, unidentified
  REGION 1..1069: note = Cas Enzyme sequence
MAVIAIDEQDNPSAVLSMVSLIHDSGLDPDQIKSAVTRLASSGIARCTRRLYRRKRHRLQKLDSFITSHGWALKDFEEYPDPYLPWQVRAELSTSKITDQGELGEKLSVALRHIARHRGWRNPYSKVNTLLTQVPHSSGFVAVQEEFSKLLGTSFPEDVTLSEMVVSVPTGSKALRGPKGLLSARLQQSDYANEILKIAQLQDLSEGLTKEIIRHVFAAESPKGSGEGLTGKDPLQPNEDRALKASDAFQKYRIAALIGNLRISDKSGQHRLSKEQVNVVFDHLCNLSFKEEPSWITIANLLNIDRGQLLGTAKITDDGERAGAKPPVHDTNRRIEGSKITPLVNWWKQANEEERAAMINAMSNGKVDDYDSATGAKVQAFFSDLPDEEHTKLDALYLPIGRAAYSEDTLQRLTAQMLDNALDLHEARKAEFNIENDWAPPAPAIGEPVGNPAVDRVLKGVARWLKAAESTWGAPVSINIEHVRAAFMSELKTRELDRDNKNRAERNEKLVAEMYTNLNIKGRPRAADIWRYQSIQRQNGQCAYCGVPIDFKNCEMDHIIPRAGQGSTNTRDNLVAVCKPCNSEKSNAPFAVWAAKTSREGVSVEQAVERTRHWIADPGLNKKQFDAFVKSICNRLTRKTIDEEIDSRSIESVAWMANELRSRIAQRYKTTGTKVRVYKGALTAEARAASGISGNLRFIDGVGKSRLDRRHHAVDAAVISFISDYVAETLAQRSNLKFSQELRRKAPQWKEYQGSNAAHRAEWNRWLQRMHHLSQLLSQALEQDRVVVMSNLRLRLGNGAAHEDTIGKLTSIKVGDVITTEEIDRASSEALWCALTRHPDFDQKTGLPANPERSIRIHSTHLAADDTITLFPVNAGCIALRGGYVELGSSFHHGRIYKVPQGKKFAFYMMRVYTIDLLPYRKEDLFSVTLKPQTMSVRQCHPKLRQALENNTAEYLGWLVTDDELLIDTTKFNTGQVAGAQQEFGQIKRWRLDGFVSDSKLRLRPLHMSKEGLKPDASSDSKKIIDNPGWRPAVNKLFTDGHVTVIRRDALGRPRLQSTAHLPITWQVK

SEQ ID NO: 16946 - protein, 1095 aa, unidentified
  REGION 1..1095: note = Cas Enzyme sequence
MKYIIGLDIGIGSVGWAVVRNDDDCKRLEDFGVRIFESGEIIESNKNIRKSQRRRKYRGMRRRIRRRNHRKERLKNYLENIEFVSRAELSEFFAKNNHDIIDIRVRALDEKVTPVELTAALLHIAKRRGYKAFYELSDENNNAKDKKAKEEEEKDIYKALTNTADVIKNGGYRSIAEAIMKDAEHFSDKISGRYKYRNIKEKDEKGKKESSGKISENDILFPTEMFEDEVRKILGKQKEFYPQLTDESIDKIFDIIFSRRDFEDGPGNADDENRPYKGFVDSIGNCPYYKNEKRGHRYTVIGDLFALANKLSQYKYVEKNTGEVVKLPRDLMRNIVSQSLQSGSITKTKINELAKELNIVILNTKTAKNENIADCIKYLKAVKPIFESYGFDWDKLISEEYTDQNSLLNRVGDTISFNITPKRRIDALNKIDELKGKDELIKKLSKQNFSGTAKVSDKYMIDAINAFFDGTLVGEFQANVQQDEFSVSIKTEKLLKLKPFDNNSEYAQNPVVFRAINETRKVVNAIVQKYGAPNAMNIEIASELNKSFDTRQKISTQQNKNEKERKNAIKQISLITGLDEGEIRPQYIERYLLGELQGWRCMYSNEEITNKKEAILNKEKQYEIDHIVPFSRILDDTLNNKALVLARENQKKGARTPLMYLSAEKEKEFKQRVNKLFKDNKITEKKYRYFMLESLVGEDAEKILGDWKTRNLNDTRYIAKFLVKYFNDNLYFAREKCDDKRPAVYAVKGAITSSLRRQWLNKETWGRYDKGELKKITYFDHAVDAIVIANCLPAYVIIAAENHKLRDIYYSAGKIKTEEYRKSLDNCVDTLMKYYGMSPTVSRKLLEKVKETPSLLKNIRFEVEYRVRDYELMKYFFNYDTKVGEDTLDQIFRNDLYKIYDHQFADSIEMPIVSIKPERKYSGQMVKDGFIKKKDAISGKNSVKTIGENNSTVLNDSRFYCVDVYRTCNDETNLSFIKYTDLLKRNNHLYLRSDYRYPDDYAMHEMYLFYGDYIEITKKNKICCGYYFSLKNSLRNELYISKGNTRRRLNNMKENEVCSITKKDTVKKFEIDILGKKLGEVKKCGEPLSLLPEKN

SEQ ID NO: 16947 - protein, 1098 aa, unidentified
  REGION 1..1098: note = Cas Enzyme sequence
MEYTLGLDIGIASIGWAVLRNDIKGEPCHIEDLGVRIFEAAEHPKTGASLAAPRREARNTRRRIRRRRHRKERIRALLIQNGVITKERLDTLFLQSGFAQDVYVLRVQALDRRLEPEEWVRVLLHLTQRRGYRSNSTAEAAKEKDTGVLKAALDANQRLIAEKGYRTVGELFCLDPKFQMIGADGKTWRKTRNSPGDYSFTITREMVAQEVSALFEAQRNHGNPYAGPEFQSAYENILFSQRHFDEGPGGDSPYQKGDLRGRCTFEPEEKRAFKACYTFEYFKLLQDLNHIRILSERATPRGLTHEERQTLIALALKSPGLDYAKVRKALNLPQENSFNVVRYGENTPEEAEKKHKFQQMQSFHKLRKALDGISKNAILQLNQDQLDEIGTILSLYKADDKRRAALEALGLNAEMISALLPLSFNKAGNLSLTAMKKLIPYLEQSENYDAACRAVYGDHRGLSSGQRYKTLTLNRELRESGALDAITNPVVLRALSQTTKVLNAIIRKYGSPQRICLELAREMRKNFEERRKVDKQNEENRNKNEQIMAQIEKLKGGRPTGLDLVKFKLFQEQNEICLYSGTKLDVRRLFEPGYVDVDHIIPYSISFDDSYRNKVLVRSGENRQKGNRLPLEYLSCDPKRAEAFVTLVERHIRDYRKRQKLLKRSLCEEDAQAFKQRNLVDTQYITRSIFNLLNDYLEFSPSASKKPVRAVNGAITDYMRKRLGLKKNREDGDLHHAMDAAVIAITTDRMIQRISNYAKRREWGKKILGQYVDPETGELLSRDAFDEKYAPTFPEPWAGFRKELLARLSPDPETEIRALGLPGYDSQTVIRPVFVSHMPRRKVTGAAHKETIRSGKLPGYSIAKTPLTALKLDKEGEIANYYNPQDDRLLYEALKARLHAFGGNGGKAFAQPFYKPKKDGTPGPVVNKVKTVEKSSLNVEVCGGIADNGGMVRIDVYYVPEDGYYLIPVYTSDVVKGVLPQRAAVAGKPYDQWVQMSDEHFIFTLYPGDLIRVEAKKEINLKLKNKNATGEPELLRKEWMVYYVGANISTGAITVTTHDRKYEKGSLGIKTLLALEKYEVDPLGSYHRVQLPETRQHF

SEQ ID NO: 16948 - protein, 1092 aa, unidentified
  REGION 1..1092: note = Cas Enzyme sequence
MKYIIGLDIGIGSVGWAVVRNDDDCKRLEDFGVRIFESGEIIESNKNIRKSQRRRKYRGMRRRIRRRNHRKERLKNYLENIEFVSRAELSEFFAKNNHDIIDIRVRALDEKVTPVELTAALLHIAKRRGYKAFYELSDENNNAKDKKAKEEEKDIYKALTNTADVIKNGGYRSIAEAIMKDSEHFSDKISGRYKYRNIKEKDEKGKKKSDSKISENDILFPTEMFEDEVRKILGKQKEFYPQLTDESIDKIFDIIFSRRDFEDGPGNTDDENRPYKGFVDSIGNCPYYKNEKRGHRYTVIGDLFALANKLSQYKYVEKNTGEVVKLPRDLMRNIVNQSLQSGSITKTKINELAKEFNIVILNTKTAKNENIADCIKYLKAVKPIFESYGFDWDKLISEEYTDQNSLLNRVGDTISFNITPKRRIDALNKIDELKGKDELIKKLSKQNFSGTAKVSDKYMIDAINAFFDGTLVGEFQANIQQDEFSVSIKTEKLLKLKPFDNNSEYAQNPVVFRAINETRKVVNAIVQKYGAPNAMNIEIASELNKSFDTRQKISTQQNKNEKERKNAIKQISLITGLDEREIRPQYIERYLLGELQGWRCMYSNEEITNKKEAILNKGKQYEIDHIVPFSRILDDTLNNKALVLARENQKKGARTPLMYLSAEKEKEFKQRVNKLFKGNKITEKKYRYFMLESLVGEDAEKILGDWKTRNLNDTRYIAKFLVKYFNDNLYFAREKGDDKRPVVYAVKGAITSSLRRQWLNKETWGRYDKGELKKITYFDHAVDAIVIANCLPAYVIIAAENHKLRDIYYSAGKIKTEEYRKSLDNCVDTLMKYYGMSPAVSRKLLEKVKETPSLLKNIRFEVEYRVRDYELMKYFFNYDTKVGEDTLDQIFRNDLYKIYDHQFADSIEMPIVSIKPERKYSGQMVKDNFLKKRVANSENKYVKTIDKNNDAVLDNSYYYCVEVYRTRSGNIDLQGIKYTDLVNKNKKLYLKPCYKYPENYYKYIMYLFKGDYLRIKGPKSTRLGFYKAVNNINQNSIKITRYNSKYTKAFREESTTISADAEIEKIYVDILGKKGKVLTKHGEPLSLLPEKN

SEQ ID NO: 16949 - protein, 1094 aa, unidentified
  REGION 1..1094: note = Cas Enzyme sequence
MKYIIGLDIGIGSVGWAVVRNDDDCKRLEDFGVRIFESGEIIESNKNIRKSQRRRKYRGMRRRIRRRNHRKERLKNYLENIEFVSRAELSEFFAKNNHDIIDIRVRALDEKVTPVELTAALLHIAKRRGYKAFYELSDENNNAKDKKAKEEEKDIYKALTNTADVIKNGGYRSIAEAIMKDSEHFSDKISGRYKYRNIKEKDKKGKKKSDGKISENDILFPTEMFEDEVRKILGKQKEFYPQLTDESIDKIFDIIFSRRDFEDGPGNADDENRPYKGFVDSIGNCPYYKNEKRGHRYTVIGDLFALANKLSQYKYVEKNTGEVVKLPRDLMRNIVSQSLQSGSITKTKINELAKELNIVILNTKTAKNENIADCIKYLKAVKPIFESYGFDWDKLISEEYTDQNSLLNRVGDTISFNITPKRRIDALNRIDELKGKDELIKKLSKQNFSGTAKVSDKYMIDAINAFFDGTLVGEFQANVQQEEFSVSIKTEKLLKLKPFDNNSEYAQNPVVFRAINETRKVVNAIVQKYGAPNAMNIEIASELNKSFDTRQKISTQQNKNEKERKNAIKQISLITGLDEREIRPQYIERYLLGELQGWKCMYSNEEITNKKEAILNKEKQYEIDHIVPFSRILDDTLNNKALVLARENQKKGARTPLMYLSAEKEKEFKQRVNKLFKDNKITEKKYRYFMLESLVGEDAEKILGDWKTRNLNDTRYIAKFLVKYFNDNLYFAREKGDDKRPVVYAVKGAITSSLRRQWLNKETWGRYDKGELKKITYFDHAVDAIVIANCLPAYVIIAAENHKLRDIYYSAGKIKTEEYRKSLDNCVDTLMKYYGMSPTVSRKLLEKVKETPSLLKNIRFEVEYRVRDYELMKYFFNYDTKVSEDTLDQIFRNDLYKIYDHQFADSIEMPIVSIKPERKYSGQMVKDRFIKKKDAISGKNSVKTIGENNSTVLNDSRFYCVDVYRTCNDETNLNFIKYTDLLKRNNHLYLRSDYRYPDDYAMHEMYLFRGDYIEITKKNIIRCGYYFSLKDSSKNELYISKGNTRRKLNNMKEKEACSITKKDTVKKFEIDILGKKLGEVKKYGEPLSLLPEKN

SEQ ID NO: 16950 - protein, 1010 aa, unidentified
  REGION 1..1010: note = Cas Enzyme sequence
IRRQLRRRAARQSELFRLLQSHTLLPGYEGAEADASQQRHAILNALDLELAAKWTKLGGAGAQVAIELPLYLLRKTALDAALDPFELGRVFYHLSQRRGYKSNRREQTEDKKATGKAKKAEDLGAVEGGIRDLEEAMLSSGARTLGEYFAALDPHAQKIRGRWTARKMYEEEFAAIWTKQAIFHPALLTEELHHQIKHLLFYQRPIKAQSHLIGGCELEPGERRAAWATLEAQQFRVQQKVNDLEIILPGNVTGIPLTSEQRKVVLDLLEHSSEATFKKIRKALGLAENIGFNLQRGGETRLKGNLTNTLMAEAFAERWHEMSDEDKKQVVEDWRNIDLEESLIRRAIEHWKLDEAGAKWLAQKPAPSGYCMYSRKAIIKLLPLMVTGMRFKAAEKEVYGNRLTGGEVHDRIPPVRDALKTLRNPAVERALTELRKVVNALIREYGKPTEVRIELARDLKKPRHERAQAITYNRNREKQRNTAKEKMLKEMGSGFQHPSRADVEKALLWDECQGECPYTGKRFPFSSLFGENPPLQVEHIIPFSRIPDDSFQNKTLCYHEENQHKGNRTPFEAYTDPVQYEAILNRVRNWRTPNPGKQRRFELRTLDELEGFSERQLNDTRYASKLACELVGTLYGGRDIKTDTGSRQVVFASSGMVTATLRKGWGLEAILREAAPSANGQNRGKPRTDHRHHAIDAITIALSRPKMIAALSRNNAQDQNWPWNGRSAPRIQSPWKDFVDSIRPHFEQMQVSHRPEHRLTGALHDETNYGKPRKDGGKDIVHIRKQIVGMSAGDIENIVDPAVREVVRAKASSFGGDLKKWTPKEGSEDWPQLETKSGKYIPVKRVRIKKALGVETIGKGERTRNVALSSNHHVAIFALLDERGRERRWESEVVSLMAAMERKRQLKPIIQTKSASIPDSIFKLSLMWGDTLLIHKDCEHSKNICKPSFWRVRSIWEQGTLTLVRINDARQLNEIRAAKDWLLPSADTLRKLDSVKVVIDSLGRIHEAGG

SEQ ID NO: 16951 - protein, 1090 aa, unidentified
  REGION 1..1090: note = Cas Enzyme sequence
LTSANVNYRVGIDVGSYSIGMAAIAIDDDGKPTEILSAISLIHDSGVDPDSAKSAATRLATSGIARRTRRLYRRKRKRLAKLDKFIRSQGWPLKEFEEYEDPFYPWRVRAELATTPITDKQELGEKLSIALRHIARHRGWRNPYSKVTALYTVTEPSDALVSIQEQCATELGRPIPPTTTVGQLIASMNLGKTRLRGEDSLLAARPRQSDNANEIHAIAKVQGLSNELVKQIIDHVFAAESPKGSAAERVGKDPLQPTKKRALKASDAFQLYRIAALIGNLRIRGGKKNRRLTAEETRLVFDYLRSLPAKQEPTWQLVAEQLKIDRGNLVGTAIMTDDGERAGAKPPVHETNRLMESTKIKPLATWWKSADADARAAMVKALSNAEVDDFDSQAGTQVQEFFFGISDKDHEELDKLHLPIGRAAYSEDTLVRLTKRMIGEGMDLYEARQAEFKIPNDWAPPAPEIGEQVGNPAVDRVLKATARWLNAAERQWGAPKSVNIEHVRDAFMSESSARELDRDNQQRAKRNAKVVAEMQEKLGIEGRPSRADVWRFQSIQRQNGKCAYCEAQISFKNSEMDHIVPQAGEGSTNTRDNLVAVCHECNSSKSNIAFAVWAENTSRPGVSVQKAVEQTRHWVTDSGLRESEFKKFRKQVCDRLQRKATDEPIDARSLESVAWMANELRSRIAQKFKDGDTKVRVYKGTLTAEARRASGISGKLEFVDGKGKSRLDRRHHAVDAAVVAFTSNYVAETLALRSNMKFDQELRRKAPQWREFTGSDHVHQVEWTKWKYRMQALVELLNNALAQDRIVIMHNLRLRLGNGAAHEDTIGKLTRLKVGDAISTTDIDRASSEALWCALTRDPDFDPKTGLPENPNRTIRIHGTHLTASDEITVFPVAAASVPIRDGFAKLGSNYHHVRLFRVPSGKKYNYFLMRVYTIDLLKFRKEDLFTVELKPQTISVRKCSSKLREALANGTAEYLGWLVNDDELLIRASSASTEKPIAKLQEQYGPTKRWRFAGTDSESRILLRPLQLSAEGLPSDVEKDIREIVEKRGWRISINSLFNGARVTIIRRDALGRPRLYSAAHLPICWEVK

SEQ ID NO: 16952 - protein, 1408 aa, unidentified
  REGION 1..1408: note = Cas Enzyme sequence
MGFLPSHYEKAIGWNREEATTYGKFLDNGEPKLAWERQEDGSMRFLFMDSFHEMMADFAKCQPGLVADGRKIPLDWTLYYLRKKALTQAIKKEELAWILLNFNQKRGYYQLRGEEDEEDPTKREEYYELKVVSVEAAEEGKGGNTWYNVTLENGWIYRRQSKIELNDWTGKIRQFIVTTEYEKDGITIKKDKNGEVKRSFRAPSEDDWGLRKKRTESRLEDSGKTVGEFIYDHILSEPADKIRGNFIRTIERKFYKKELEAILREQSKYHKELKDLNTLVNCIKELYPNNKAHQDSLMKKDMIYLLITDLIFYQRPLKSKKSLIADCPYEYYEYVIKETGEIKRQGIKCIAKSNPYYQEFRLWQFIINLRLFDRTNDKEITSEYLSSMEDYTKLFTYLNDRKEINQEILLKDFFIQKKVKMGMEKEFPIRWNYIEDKEKKYPCNETRHELLAALDKAGIDHSWLDDKERFYRLWHLLYSVESKEEAEGALRKLNDNEDFVNAFLKIKPFKKEYGAYSEKAIKKLLAVMRIGTQWNEDDICEQTRNRIQSIINGDIDEKIKERMGRTFSQLSDFQGLPEWLACYVVYGRHSETTDIQRWTKPENLMSYIKGFKQHSLRNPIVEQCILETLRTVHDIWKEAGHIDEIHIELGRSMKSTADQRARMSKSILQNENTNLRIKSLLMELKNAKEFENVRPYSPMQQEILRIYEEGALQELTKEDDQYPEISKISQMAQPSAKELLKYRLWLDQKYCSPYTGKPISLSKLFTSAYQIEHIIPQSRYFDDSFSNKVICEAEVNQLKSNMLGYEFIKKHSGEIVHCTMVGDVKILDAKEYYNFVTEHYANNRRKKEKLLLEDIPQEFLNRQMNDSRYISKKVMALLSNIVREEGEQEAKSKFVIACSGGITDRLKHDWGLIDVWNSIVYPRFERLNKLTNTENFGRWENKEGKQVFQTSLPLELQRGFSKKRIDHRHHAMDALVIACASNNIINYLNNESAKSQEKREDLRKKLCDKNRIIRKPWETFTQDVRTALEDVVVSFKNYVRVINKATNYYEKYDKNGKKGIAEQKGQDMWAIRKPMHKETVFGQVNLRRKVTVKLKDALEKIPAIYDKELRDYINILVAKQFNKKQILAHFKSINYRLNMKSVDKVDIWQFSDEKEPMVATRKSVDTSFDTKRIATITDTGIQKILRNYLETKDNDPNIAFTPEGIAEMNKHITEYNNGKQHQPILKVRVSEPKGAKYQVGETGNKTSKFVEAQKGTNLYFAIYEDKEGNRSYSTIPLNEVIERLKQGLSPVPDTNEKGIPLKFHLSPNDLVYVPKTDEENEIKTGQIYKFVDSSGTTANFVPHRVSNLIYNVDKKIAENFCNHEIIQNEYGIGSQQSKNQKSITGEMIKAVCWKLEVDRLGNIHKIIK

SEQ ID NO: 16953 - protein, 969 aa, unidentified
  REGION 1..969: note = Cas Enzyme sequence
MDLFPTGPWSSTARKAFLETLDQKAQEWLRTNVPDANDDGLLAHTFIYRLRAAALDHPLPPELLGRVFFHLAQRRGFLSNRKAQPKDDKEPGVVKQGISQLQDEIQKSGARTLGEFFSRLNPHEQRIRNRYTSRKMFQDEFEKIWNAQQLHHPNALTDSNKKRLYEAIFFQRPLKIPRSFVGRCSLEILTRKLANGQIEYIYPFRRAPMASLEAQRIRYMERINNLEIITPDGECRPLTPEKRKLLYDLAERNEALSFSDIKKALGIPTRKTKAGIWRLNLETGGEKRLLGNTTAAQIRKVLGDAAWEALESAKQIALVNDLIAFISADALKKHLRKKWGFTPEIAEQLAELPLESGYHSLSRRAIRRLLPLLERGERLPSAIHQIYGRNREKVGKYEKLPPVVKVFPTLRNPQVIRALTELRKVVNAVISKCGKPTCIRIELARELKLSEKERSEYTKRMRENEAQRKAAAEAVEQKLGRPAQPWEIEKYLLAEECNWLCPYTGKQITFEKLLGENPEFDVEHIWPLRRSLDDSFANKTLCYHEENRSVKAGLIPYEAYSADPVRWNQIIERVKKFKGPLAKKKLQRFLAKEIPDGFVNQQLSDTRWICKAATEYLECLYGGKADENGKQRIFTTTGGMTALLRKAWNLNSILGGAVEKNRADYRQHAIDAIVIALTEPSIIQKFSNQVAKLLRSNDARAKRGYGLLADMLDDEFREEIKQHIEKLIVQFRIKTGLSGQLHDETFYKFVAPKKAIVRKALSAMSQNDVENIVNAKVKKLVKEKLEALDIDDPKKAFALPQNLPYIRGKNNSVFPIKSALVFVNYHVVPIGREPHRRRYVRPNNNHHVEIFAAYDENGKVKGLGRVVTVLEACERRCRGEPVISKDFTCEEQQKGKFSSIEFKFALFKNSLLKCRINGEEKTVRIIAISDNLIDAKEHYDARSTKEVREQGERIRLRYAVVCGVPGNNG

SEQ ID NO: 16954 - protein, 1355 aa, unidentified
  REGION 1..1355: note = Cas Enzyme sequence
MKSIRKESQEPYYIGLNVGATYAAYAVTNTSYNLSRFKGKDMWGVYKYDEAETAEDRRRFRQGRNSNLKEKERIRLLRSYFFDEIQKVDENFFVRLDNSFYYSEDKDIRLNGDRNVLFADKDYSDRQYMSEYPTIYHLRSELAHGSKKPDIRCLYLAVSNMMKNRGNFYTKNLEDTDKSLGEVYENICTKAAEYDIVLKMEVPAEKIMDIMINPGISGKVKATLVTQLVDATSKPALSIIKLMCGLKAKIADIFPELAESLEEDEKKLSFSFKDEDYFERADSIEKLIGENEYSLIESVKEMYDAAIIKNIIQDYRYVSDAKIASYEKHANDLEILKAELKTILSKNEYKRFFSKEEPGTYSAYVHFSNHNNQITRRKSDKGRTQEDLYHTIKKYLADADDEQAEYILDEIDKGTFLPKQRIKDNSLIPNQLYSVELKAILENASKYYDFLNSRDESGLTVSERILSLFTFTMPYFIGPVSPYNSRGWAVRKEPGKVYPWNLKDKVDMGQSAKQFIEKIIGKCNYLSGEKVLPNASLLYEKYRVLNEINSISVDGEKISVEMKQAIVNELLAGGKTVSKKKILSFLVKKGSATSDSIIIGIDDKLNNSMASHRFFADIFGSLNKDNEAVAEDIILWSTIYGSSKDFVTEQILNKYPDMFDEEQLRKIHNLNCKDWGRLSREFLNMKGLDKDNNELISVIDAMWSNNLNLMELMYDTRFDFSARVKDKTENAVKNLFSFDYDDLNDLYATTAQRRTIWASVKIVREIVKIKGYAPESIFLDTVKSRPNDIPKESRKGKLTALYKGMKGVSADWKKKMISLIDQCDADGSLKAKNVYLYFLQMGKDMYTGEDISLEELKSPDKRKKHNIDHIYPKHFVKDESIDNLVLTNTDLNRDLSDRYPVPQDIYDNMHEFWQQLRRSGLISAEKLARLSDRNTLSDEKRASFIGKLYNQAGSSTRMMADIFKNILPKDTKVIYAKTSETNEFRHKFDFPRTTIINDDYLAKDAYLNIVVGNVWYTKFTASPIWYIKEEYRKKKSEYNLNRMYDFNVIRDDRIAWITDKTNPEAATIHTVNKVMNRNTVITITRTIQGHGGLTNATITRADKAKEGVYLPLKTSNERMSVTKYGGKTSITSAYMFLAEHTLKKSRVRTIYSLPLHLVSQIKGKKDLEKYCTDVLHLIEPVIKIAKLMLYSELIIDGYSYLLGGKAGVQYYLRNNVPMKVNAEWQKYVSKIEKYINFKSLDKDMSADKNIELYDELVDKHTNSIYSKRRNTAGDMLKKGRDTFIKLSVKEQLEVLNQIFTLTRMGTNIANLSGIGAGQHVGSITMGCNISTFDSVKLVNRSVTGLFSNEVDLLHI

SEQ ID NO: 16955 - protein, 1325 aa, unidentified
  REGION 1..1325: note = Cas Enzyme sequence
MKGEYYLGLDMGSSSVGWAVTNEKYEILRAHGKTLWGVRLFDSAQTAEERRGFRTAKRRLDRRNWRIELLQKIFAEEVEKIDDGFFRRMKESRYWPEDKRDRQGKCPELPYALFADDDYTDKEYHKQFPTIYHLRKWLMETDETPDIRLIYLALHHMMKHRGHFLLNGNIEQVREFQTTFEQFLEAVRAEELGFSSEIGVERSKEIEAILKDRTLTKSAKKTKAVKAMRAETSCEKEWLGLITGGTAKLGNLFGEKQMDTLERPKLCFADAGYEEYAGEIEAELGEKYVLIEHAKAVYDWAVLADILQNYSSLSEAKVALYEKHKKDLKDLKKLVRENLSREEYQRLFAKKDEKANYYAYIKAPKQCSQEDFYGYLKKNILGKISDVTKASCMQKEMEMGTFLPKQTVKDNSVIPYQIHLYELNAILKNLEDKVPLLKENGEKIQKIFTFRIPYYVGPLNGIRKKGEKSNWAVRKEGKIYPWNFDEMVDLEASAEQFIRRMTNKCTYLPSEDVLPKYSLLYSKYEVLNELNNLRLDGEKISVEQKQKIYEEVFQKSRKVTQKKLKNYLVKEGITGKEVEITGIDGDFKSSLTAYHDFKEKLTNLSLNQAEKECIILNVTLFGDDKAILKQRLKKLFPELTEKQRDSISKLPYRGWGRLSKVFLEETEAPAPETGEAWSIIRALWETNDNLMQLLSEKYLFASAIEEKNGNEQKKRDISYELVEELYVSPAVKRQIWQSLLIVKEICKVMGNPPKRVFIEMAREKTDQGRISSRKKKLLELYKKCKAEEKDWIDEIEKRSDAEMRRDKLYLYYTQKGKCMYSGETIELEELWDNQKYDIDHIFPQSKVMDDSLDNRVLVKKKCNQMKEDKYPIDETVRKKMQPFWKSLVDAGLISEEKYKRLIRGNGFEPSELAGFISRQLVETRQSTKAAASILQQVIPDTQIVYVKAPTVSKFRKDFKFLKVREMNDYHHAKDAYLNIVVGNAYFVKFTSNPIHFIKENPGRSYNLKKMFEQERIERNGEIAWEGGNGTIVTVRKFMEKNNILVTRRSYEATGALFDQQIVKKGKGQVPIKSSDERLCDIQKYGGYNKEAGAYFVLAESEGKKGKKIRTIEYVPIRLKKEIQKSEENIIRYLEEERQLKNPRVLVPEIKIDTLFCVDGFYMWVSGRSGDQLLMQGANQLVLSQEETEILKKIVQYVERKKQNKELKIYDSDHLEEKKVVMLYETFLNKLTNTVYAKKLGAQAKTLTEKREKFKELCIEEKCIVLYEVLHFFQCQSAAADLKLIGGSGRAGILCLNKNITDCSRIEMIHQSPTGIYEQTVDLNAL

SEQ ID NO: 16956 - protein, 1011 aa, unidentified
  REGION 1..1011: note = Cas Enzyme sequence
LRGNAGEEVYRKFFKSTKEKANYVNYVGYTKKGGDKIKVKHCSDGDFFAELKKLITGIENVTDTEIRDDILSKINSGTFLPKILHSDNGLFPHQVNQQELEKIVENMVKVHPETHEIADKILKVFLFKIPYYVGPLTGKNSWAVRTDEKITPWNFDTVVDKAQSNENFMRRMTNKCTYLRGEDVLPQASVFYQKFNVLNQLNKLKINDTPISVELKQKLFDDVFKVKNKVTDKTIINFLVREGAISEYQTQEVKITGKDSEIKANMSSYIRLKQILGSFVDDDLMSGGGVCENIILWHTLNTDKNIVEKLIEKNYGKIRVIKDNIKSLKGLTFQKFGRLSMKFLTGLKVNDPPVGENLSILDLMYFTNQNLNEILFNEKYGFEEIIKKENGETDSEIRYKDLENLYVSPAVRRGIWQSLRMADEYILNIGRAPDKIFVEVTREEGTKGAAGRTVSRKNRLLELYKNVAGYDEIRSELTSEGLTDLRLRQERLYLYFRQLGRCMYSGERIDLSQLNTDMYDVDHILPRTYIKDDSLDNKALVLRKKNVEKRDAYPLPQGFTEQQNFWKMLLTKGLISDVTYGRLTRTEPLNEDDYSGFINRQKVITDQTAKAVAELLKRKYSSTKIVYSKAKNVNDFKSKFDLFKCRETNDLHHARDAYLNVVVGNVFDTCFSSPMAMFRNDGDRWRMYNLKTMFFRDVDGAWNGGSLSVVKSVFAKCSMCVTKYSYCVKGEFYNQTVYSNNDSRSKIPRKGSGVLGNIQKYGGYSGLNTAYFAVVQSEDKKGKIIKSIEAVPVLIQQQTKGDLNRLKEYFEEKGLKNAEILVPKIKINQLVSFKGMPVYITGISGIRILVQNAVELFTDNKTDEYVKALTEFYERYKSKIDEESSEVYIIKTNRMGEIKLKISKENNLSLYNFLVGKLDDKIYSGIGYCATYQKILKDGLDKFKCLTTAKQVKVLLQALNFFRCNAMLSDLSLIGGNTLNGKLSFSKYITEDDFKIIYKSNCGLTLKERKV

SEQ ID NO: 16957 - protein, 968 aa, unidentified
  REGION 1..968: note = Cas Enzyme sequence
MADQINNSKYSSKLAERIREFNSAFKLGVDLGTKEGGIALVKDNQVLFAKTFLDFHKKKLKERRTHRRNRRSRLAKKRRVALLRSWLLRQKVNGKQLPDPYKIKDTPLFKRTNAKNWIDAVVSKQDTSPEAFVKALTTVFRKRGQSYKEVAKRIEDMDYRELKDYINSLGSITEEEFNALSEEIKYRNESSETSSEKNRYAGLVDILETKLSNKENIKNRRKREEELEQVVKIFCKANNVDESDKWISQLKSLLNKPIRKVRFTNRIVIRCNICDRPTPKKSRPDIRELLYMDAIRNFLRAGRVDPNEEAINYYKTLYKKAAEIRKSIIKKVPLTEEQKKLKKELSKQLKKYINKDYRASAQKKMLEQIKVLMFEKLSGRSRYCTEHLKARANGEDVEAGYHGHVQKRHDMNIAQKNHDKRVINLIEYMLFRRDESLAKELKNKGIMCITIEAPEPDTKKAKKRETTKRDERNIKEKLLDEQFDVEGQRFICIYTGQELSKDRLNEYEKDHIFPESRDGPSIRDNLVITTKEINKEKGDRTPWGWLHDDPVKWQEFKNRVMHLYVSGKITERKKELLLYEGSEFLGDNPTELARAGARVNNFIADLNEMLKKHGLPEAQTLFEKGKPIVQIVRGSETQRLRRQWHAIDPSFIPLKDRTVSFNHAEDAVIAASMPPTSWRSQIYRYTWYFTPSKERSDFALPDIAPHWDDFIAKRNSPIIAVLGKTKYSWKNSGSIFDDTLYKKYNSSAFFKEIYKQLPPKENDDDKINQQTKPILTNDHYMKSNYKYYHVKVDNKRFLIKSHKGGSLITIKPKHTLWPRQIQVNPTYGSVVLTKRDKGEIEPHYTPISPIMSMYKQGIILDMDERLKRALSDKMRYEGPKKELRVHDIIYLPATKHHGEGYFLVTKLGRSGVKVVPEDKLKIRYTKQNSEDLGSESEKDKAKDKSAEIELNKEDLLYLYNNPDSIRIK

SEQ ID NO: 16958 - protein, 968 aa, unidentified
  REGION 1..968: note = Cas Enzyme sequence
MADQINNSKYSSKLAERIREFNSAFKLGVDLGTKEGGIALVKDNQVLFAKTFLDFHKENLKDRRTHRRNRRSRLAKKRRVAILRSWLLRQKVNGKQLPDPYKIKDTPLFKRTNAKNWIDAVVSKQDTSPEAFVRALTTVFRKRGQSYEETAKQIEDMDYRELKDYINSLGSITEEEFNALSEEIKYRSESSETSSEKNRYAGLVDILKTKLSNKENIKNRREREKELEQIVKAFCEANNVHESDKWISQLKSLLNKPIRKVRFTNRIVIRCNICDRPTPKKSRPDIRELLYMDVIRNFLRAGRIEPNEEAINYYKTLYKKAAEIRKSIIKKAPLTEEQKKLKKELSKQLKKYINKDYRASAQKKMLEQIKVLMFEKLSGRSRYCIEHLKARANGEDVEAGYHGHVQKRHDMNIAQKNHDKRVINLIEYMLFRSDESLAMELKNKGIMYITIEAPEPDTKKLKKGKPQKKDERNIKEKLLDEQFDVEGQRFVCIYTGQELSKDRLNEYEKDHIFPESRDGPSIRDNLVITTKEINKEKGDRTPWEWLHDDPVKWQEFKNRVMRLYSSGKITERKKELLLNEGSEFPMDNPTELARAGARVNNFIADLNEMLKKHGLPEAQTLFEKGKPIVQIVRGSETQRLRRQWNAIDPSFIPLKDRAVSFNHAEDAVIAASMPPTFWRSQIYRYTWHFAPSKERSDFALPDIAPNWDDFIAKRNSPIIAVLGKTKYSWKNSGSIFDDTLYKKYNSRAFFKEIYKQPGPKENDDDKINQPTKPIPIDEHKMDPNYKYYHVKVGNKRFLIKSQKGGSLITIKPKHTLWPRTIQVNPTYGSVVLTKGDKGEIELHYNPISPIMSMYKQGIILDMDERLKRALSDKMRYEGPKKELRVHDIIYLPATKRHGEGYFLVTKLGRSGVKVVPEDKLKIRYTKQNSKDLGSESGKDKAKDKSVEIGLNEEDLLYLYNNPDSIRIK

SEQ ID NO: 16959 - protein, 949 aa, unidentified
  REGION 1..949: note = Cas Enzyme sequence
MRDSITAPRYSSALAARIKEFNSAFKLGIDLGTKTGGVALVKDNKVLLAKTFLDYHKQTLEERRIHRRNRRSRLARRKRIARLRSWILRQKIYGKQLPDPYKIKKMQLPNGVRKGENWIDLVVSGRDLSPEAFVRAITLIFQKRGQRYEEVAKEIEEMSYKEFSTHIKALTSVTEEEFTALAAEIERRQDVVDTDKEAERYTQLSELLSKVSESKSESKDRAQRKEDLGKVVNAFCSAHRIEDKDKWCKELMKLLDRPVRHARFLNKVLIRCNICDRATPKKSRPDVRELLYFDTVRNFLKAGRVEQNPDVISYYKKIYMDAEVIRVKILNKEKLTDEDKKQKRKLASELNRYKNKEYVTDAQKKMQEQLKTLLFMKLTGRSRYCMAHLKERAAGKDVEEGLHGVVQKRHDRNIAQRNHDLRVINLIESLLFDPNKSLSDAIRKNGLMYVTIEAPEPKTKHAKKGAAVVRDPRKLKEKLFDDQNGVCIYTGLQLDKLEISKYEKDHIFPDSRDGPSIRDNLVLTTKEINSDKGDRTPWEWMHDNPEKWKAFERRVAEFYKKGRINERKRELLLNKGTEYPGDNPTELARGGARVNNFITEFNDRLKTHGVQELQTIFERNKPIVQVVRGEETQRLRRQWNALNQNFIPLKDRAMSFNHAEDAAIAASMPPKFWREQIYRTAWHFGPSGNERPDFALAELAPQWNDFFMTKGGPIIAVLGKTKYSWKHSIIDDTIYKPFSKSAYYVGIYKKPNAITSNAIKVLRPKLLNGEHTMSKNAKYYHQKIGNERFLMKSQKGGSIITVKPHDGPEKVLQISPTYECAVLTKHDGKIIVKFKPIKPLRDMYARGVIKAMDKELETSLSSMSKHAKYKELHTHDIIYLPATKKHVDGYFIITKLSAKHGIKALPESMVKVKYTQIGSENNSEVKLTKPKPEITLDSEDITNIYNFTR

SEQ ID NO: 16960 - protein, 1346 aa, unidentified
  REGION 1..1346: note = Cas Enzyme sequence
MKDYLLKTAPNAGEQTWNATHPFYQSATVLAIDIGIEGIGLALRKGPQPLWTQTFEVSLPKAAPLEDRRLKRGGRRTRSSRRARDIQFKAWCVEFGLLTQEQADKLWKDQNRIEEEPAREANRVFDHRLRAVTTGVGSRECVAVCLRHIVKHRGFDYHQTEEGTHPWGDEWKFADILDWLRKTPINQEYADELRREMRDLPDIFNEDKFNALSRAMDGAVERYKDNPVEKMLREHCAEKGHPNLRVSGRRHNFPRELLKLHAFAILNHPKQKEMIATEKWEAAVLRLLGRRDADGNWALTERIGKGKAMTDPGCIMDYHRRTRKEAEELWERKIGKCPYSEHLNKMGHPISLEMTRSLKRDLRIRHFMLLQFLAERTFVASNYQRLHAHPDTIRWALDFLAEDEAAMSAKAARPKMTITELKTRWREAFQVRLAKDNESHNKDYFEQLKDLLCATQSDLSGRASLSAESAAILYAVATLHDTDLEAKGARGRLTGLGYYQWRVNNVSNWGLYPQVEFLLGSRTQYDAEGNSRDKRDSQACLRRGENRAAWGCALADGRAQEHGILRRLFAGQLKDAHGRPVAVRQQMNREDGLPDYVVIEVVGDMPRNLDDKRELQTAAKAKRKAKDEIFEHYHLPSGASDNLKKKTLLFDQQVNADGHLICPYTGMVLKELTPQSTELEVEHVFPQMRGGITVMDNLCVTLRTINAAKGNQTPFEIAGQTIDGVKFLQWAEMKTALSAFRWGKGKRGIFEWDQQGVPDFQNMTRMAQLARQLRTEITNWLGIRKRAAAENEDPTQCAKAIQHEIWERIGTPVGGMTHACAEVWCPKEKFPDYWREVKYGTRIDWVKERLCQRHHLWDALILSHIPPGVGMNNTFCGGIFRVTQHEETGTPVLKPLPELAPDLDTLNKKHQDECLVVSPRQRNSKQSRTLETIQSRADGSGRHWSREPLSKYTAKPTMTEAGIIQLLTDAGLPPKSFTPDGDESAGLKYLRAWWNERNPEKFSLTELEKFLEHNSVLTPEVKTLLPDWWKTDDEKSPPEKKVSVASIGDLLKKAGNSKADLSDEGRFSKSTRQAWLSARASLAELRLPSFKSGHPGQPVRRIPVIQDRKAAASYIPHHNLESRLEQHEPIGVKTTNEACRSFKLYERVTKDVSGSVVNREYWRLKIPPPRNLHNYAKMHGEPWQPEAEDMPPAEAVFVGELVKGQLLRIPIGAKMVPASRGEPATHGWWWYRVASLKDSNGQVEFKLAEYKQPKEPPSDKPDRRSANEKLIAKIWKTAPSGADVLAHFIELNQPQRVQAEGWNIFAADPKPIKKTATRVGNKKAAKPDNNLHLPYMDDPPPDTAGG

SEQ ID NO: 16961 - protein, 1505 aa, unidentified
  REGION 1..1505: note = Cas Enzyme sequence
MTKILGLDLGTNSIGWAVVDKENNKIEDCGVRIFPEGVVNISEGEEREKSKNALRRENRQTRRQVARRRMRKIKLLELLIEQGMCPLTHEQLMVWKHWDKHKKSEGRHFPKTEEFIRWLKLNPYELRYKGINGELTKMEFGRFLYHIIQRRGFLSTRKEKETGKIYAGKENMVGIDDTKAALNGNTLGEYLYSIYPEENESFKYILNREGEDLRIRGRYTLRDMYVEEFEKIWQKQAPKLGLDKIYVTKQKVVFLNGSKNRNRNVKKIEYLQKNRDKVDVEEIVVEREKTNKTLTRVTSYEKISLHDHLGGQVIINDDKIKFDNKDSVLFYQRPLRSQKSLLGKCRYEKNKTPVSISHPDYEIFRAWQYVNTIKFGNNIPLPLEQKKVIVDYLKTKKTAVKFADIVKLIQLSHENFNYNEDDKVEGCPTIAQLSKLFSNKGWNYYYHKIWQDFYFFDDSEKLFKKLSKTKEYELKENIQLEDIKKVSIKDDKYSNLSLKAIRNILPFLQRGLLYNQAVVLGGVVNAFNYKIQDDEIPRWKRFTDYHEIIIKDILSILKENNKQGETIEKIKKYLSNPENHYGFENDDPAFKKLYHHSQEVVEKEKSDKISEIENLRNPIVQRAVQEMRRIVNELLAKYGKFDRIAVEMGREMKLSKKGRREVSQMIKQNFEANENVREILKEYQLAPSRENIQKVLLFNEIQAKAGKVICPYTGKTLNISDLLGKENKVQIEHIIPRSFSLDDSFANKTICDAKFNQLKGNLTPYQFYQKNKDKKLWGVASWEAIEQRAYSVLPFNKAKRFTTRKTEWKTEEFISRQLNDDRYISKKTKEILSEVCNEILVMPGAVTADLRKLWGLNNILQPTIGLPDGDFSIDREKDLNYWAVTDGKRNIKKLYPMDNPRPDVAAEETVVTGYVTKNKFKAHRLNLEFEAPDIPDGKYYVKFQVSKPLKTLRQYVDKPDYGDDEIILRGMINRNKFNHDSLKQRVNAPENIDDGSYWAKFKIIEKRFEEPEKNKRPENKNGICLFGKVKDHVFTSYIYQCETELDDGQYWVLLDLDFENIDFIATKNEKPEIENNQLLVLGDVNEEGTFTALHDIQLQFDWNEKPGRYWAVLNILSDKPEFTAVENKPPVVANDEKLIEGKIWVDHKKIRFDPKKNRDDHRHHAVDAIAIALTDYNIINQLNRYNAQKDALEKGIASERPSFDEPWDNFFQHAKEAASKILVSHHKDNTVTKKVTMIIEKNGKKHRSEGQAVRGQLHKETVYGKRKPLQKEQAFHVRKPLISLKDNQLDKIVDDRVKSIVKYGREREKFIDEQIKALKKDRTKAEDEEEKRIDEQIKLLEEENRQLYTLPNKKGDRVPIKKVRVRENLGNTEMLKPSENTNQYVNPRNNHHVMIYKDSEGRLQESIVTLWEAAERKNQGNSVYQLPNDGVEIVSILEVNDMFLLGLDKEQTNDIRNLDKQILSKHLYRVQKLSSMYYTFRHHLSSTVSNPDEEFRIQSFGHGKK

SEQ ID NO: 16962 - protein, 1131 aa, unidentified
  REGION 1..1131: note = Cas Enzyme sequence
MNYSLGLDIGTTSCGWSVINLDKKRIEDLGVRIFEGAENPKNGHSLAEPRREKRGMRKRLHRRRIRLNFLKQFFIQQKILSNQQIESLLAPHKNQIDPYTVREKALSEKLTPEELFVALYHISKRRGYKSNSRAESSGDADENKKTLSAITANQVFLKEYQTVGEALNHAEKFKSHKRNKPNDYSNSFARADFEDEIKKILNKQSEFYPVLNEEKIQELLYSENFGVLFQRRFMTPELIEKMRGKCQFEKEKPRAQRASYSFELFRLASDLVHLTYNMGNKLTIDEIASCIEKAKELSVLKYSHIQKILDEDMEDEINFDYVRGLKRKDLLKDEVETKKKALEQKFGELKFYHAIKKALKDQPTEWAEIESNIELFDNIGFVLTANKEDDSVREELEKLGLKPQVIDSISNIKQSFSGFGHLSLEALRKITPFILQGETYDKAVVDAGYVFKAKLAGGLNRLPALSKEENNQITNPVVKRAISQSIKVVNAIILKYGAPTRLHIECASELAKSFNKRNDIIKIQDENRENNEKLVARLKEEFHILSPTALQITKFKLYEQQDGKCLYSGKPIDLNRLFSDEHYCEIDHIIPISRCGNDGMINKVLVLNQENQEKRNQTPFEAWGSDEKRWQSFVARVESNPKIFAKKRARLLAKTPPKEDWNVRALNDTRYITRFLANYFKQNLKFADHTEGKKVVYTPTGNITSYLRHVWHIGKKDRSKNLHHAVDAVITALVTDEVIRQCALMNKMIELGAKYRTKGINLANYQNGMLAATDPVTGEIVDLAKYEEVRESVLPWPNFDHEVRFRTTPLACFITEDKEDKKKTESGQLSEEAKTHLQNASINTLAEWRDQFREIYKDQDEEFRSSIHPIFVSRMPKRKGIGSLHDDTIRSPKGILIDEKTGVISANPNRSSFIRKRLQDVKIADLENSILKQSDKVLYQQLKNLLEANGDDPKKAFKEPVYKNNVKFDKNGHPLSPVTTIKINDDKSVKSGISLNHGTQFVNNGSMVRLDVYQKDIKGEKKLFYVPIYTHQVRKGSNRILPTTCGYNFADNTFTKLCSVYPNDYLIMKKGDEILQGYYIKYNVNNSAIAYTSNIKEGRSDFVNATGRALSELYRLDISVLGDNYPWERMY

SEQ ID NO: 16963 - protein, 1131 aa, unidentified
  REGION 1..1131: note = Cas Enzyme sequence
MNYSLGLDIGTTSCGWSVINLDKKRIEDLGVRIFEGAENPKNGHSLAEPRREKRGMRKRLHRRRIRLNFLKQFFIQQKILSNQQIESLLAPHKNQIDPYAVREKALSEKITPEELFIALYHIAKRRGYKSNSRAESSGDADENKKTLSAITANQVFLKEYQTVGEALNHAEKFKSHKRNKPNDYSNSFARADFEDEIKKILNKQSEFYPVLNEEKIQELLYSENFGVLFQRRFMTPELIEKMRGKCQFEKDKPRAQRASYSFELFRLASDLVHLTYNMGNKLTIDEIAACIEKAKELSVLKYSHIQKILAEDVEDEINFDYIRGLKRKDLIKDEAEAKKKALEQKFGELKFYHAIKKALKDQPAEWKDIESNIELFDNIGFVLTANKEDDSVREELKKLGLKPSVINGISNIKQSFAGFGHLSLKALRKITPFILQGETYDKAVVDAGYIFTAKISGNSNRLPALSKEENNQITNPVVKRAISQSIKVVNAIILKYGAPTRIHIECASELAKSYDKRNEIIKTQDENRENNEKIIARLKEEFHVLSPTATQITKFKLYEQQDGKCLYSGSPIDLNRLFSDEHYCEIDHIIPISRCGNDGMINKVLVLNQENQEKRNQTPFEAWGSDEKRWQSFVARVESNPKIFAKKRARLLAKTPPKEDWNVRALNDTRYITRFLANYFKQNLKFADHTDGKKVVYTPTGNITSYLRHVWHIGKKDRSKNLHHAVDAVITALVTDEVVRQCALMNKMIELGAKYKTKGINLADYQNGMLAATDPVTGEVVDLAKYEEVRESVLPWPNFDHEVRFRTTPLACFITEDKEDKKKSESGQLSEEAKTHLQNASVNTLAEWRDQFREIYKDQDEEFRSSIHPIFVSRMPKRKGTGSLHDDTIRSPKGILIDEKTGIVSANPNRSSFIRKRLQDVKIADLENSILKQSDKLLYQQLENLLEANGDDPKKAFKEPVYKNNVKFDKNGHPLSPVTTIKINDDKSVKSGISLNHGTQFVNNGSMVRLDVYQKDIKGEKKLFYVPIYTHQVRKGSNRILPTTCGYNFADNTFTKLCSVYPNDYLIMKKGDEILQGYYIKYNVNNSAIAYTSNIKEGRSDFVNATGRALSELYRLDISVLGDNYPWERMY

SEQ ID NO: 16964 - protein, 1370 aa, unidentified
  REGION 1..1370: note = Cas Enzyme sequence
MEEIKRILGLDLGTTSIGWALVNEDLTNKSNSEIIKLGVRVNPLTIDEQTDFEKGKPLSTNADRTLKRGARRNLQRFKLRRNDLINLLVKNKIIKSESILTEVGKNNTFQTLVLRAKSAVEIIELEEFARVLLTINKKRGYKSSRKAKNDEEGSLIDGMSVAKELYDNNLLIGEFVYEKLKKGEKYIPDFYRSDLQNEFDAIWNYQKQFYNEILTDEFYLSLKGQGQQSSRKRFLAIHQIYTAENKGKREDVKLQHYKWRSDAIKKKLLIEEVAYVLVEINNNLNKSSGYLGAISDRSKELYFNKETVGQNLLKQILKDSHTSLKNKVFYRQDYLDEFEKIWETQAKEHKVLTKDLKIEIRDIIIFHQRKLKSQKHLISECEFEKHHKTIPKSSPLFQEFKIWQNLNNLEFENKDDKSKIRLDEDERLLLFNELNLRGNLTAKEVLNLLNINAKKWNVNFKTIEGNRTNEGLYNVYQQIVENEGFTIDWATLTAIEIKEELTTIFKHVGINTEILDFDYKTHDKSLNYQLWHLLYSAEDDDKINAEDIAIYGNSNVSLKKNLQKKYGFKPEYGNLLANVSFQQDYGSLSSRAIKKIMPFLEAGHEYSEASQFAGYNHSKSLTAEELAKRTLNDKLTLLKKNSLRNPVVEKILNQMVNVVNEVIDTYGKPDEIRIELARNLKQSSSERENETKQINDSKRIHEGIYKLLQKTPFFIKNPTRNDIIRYKLYEELSANNYKSLYTNQYIPKEKLFSKEIDIEHIIPQAKLFDDSFSNKTLAYRNVNLNKKDSTAYDFISVKYPDQLEEYEQRIKKLTESGVLSKAKSAKLLMPEKDIPDGFIDRDLRNTQYIAKKAKELLETTIRTVNTTTGKVTDELRSDWDLINVMQELNLPKFKAIDESLIEKVEKKDGSFKVRIKDWSKRNDHRHHAMDALTVAFTTHNHVQYLNNLNARKDEQNKRHKTIQNIENKIKGNGKFIPPMVNFREEAKKHIESILISFKAKNKITTKNKNKIKLKGKNNFIIQETKTPRGQLHKETVYGKHNKIVIKEEKINASFDKDKIMLVTKPSYKIALLKRLEENANDPKKAFTGKNALSKNPIYFDENKLLTLPEIIKTQQFEEVYTIRKDISPDLKIEKVIDPKIRAILQKRLDFYRGNSKEAFSNLEKNPIWLNQEKGIAIKKVSISGVSNVEALHYKKDHFGNAILNENGEKQAVDFVSTGNNHHVAIYKDENGKLQENIVSFYEAVARVNKGFDIIDRNFNKHLGWEFLFTMKQNEMFIFPTESFNPNNFDLMDEKNKNIISNNLFRVQKISTKNYMFTHHLETISISGDYLKKNKSLSGVTYNFIQSTEPLRNIIKVRVNHLGNIVKVGEY

SEQ ID NO: 16965 - protein, 1065 aa, unidentified
  REGION 1..1065: note = Cas Enzyme sequence
MATEKTASASEGILLGIHLDIGHSSIGWAVTQSILPPVFVGCGTLLFPKDACLASERRANRRQRRHIRSTRQRIARLRHLLRHTGALTEEELNLPGCGWPWKLAAEAIGGQRILSWPEMWGVLRWYAHNRGYDGNILWQRRTDSVKEDKETRESVDNALNLMRSHKTSSMAATVCAVMGVAPGDGKCASMIRFKKARASFPRDVVRSEITKILHLHLNRLPHLDEALITAIVGSPADDPDAWQAVPCPAIKLPRRYAGGLLFGQLIPRFDNRIIGSCPVGGEKKPLKSCPEFLEYRWAMQLANVRVRRIDDKILRPLLPAERIAITAELRRQGYFTRSSFKKAVSEATKAHEDNLDDMLLHPDAEQALVLYPAIREIRSRDLAFFWDVLPPKVQSHITKRLAKGKALTLRDIRALSSESEAFEQKLSEFEKKNSKKKADILDRAFKADFPAGRAPYGRNVMRQAVSEVMAGKDPRAEGGVLYAASKAKALNELAIDRETNNHLVRNRLRIMRRLVEEIVVQYAAGDKARIEAITIELNRDVKELSGQTAKQIAQDLGLRLKNHTAAVEYAAEKLQVPAHKLGGALIRKVRIAMDLQWKCPYTMMEYDIHQLRGGAVDLDHVIPYSKRASDSLDSLVITFKAVNAWKSNSTAMDFIHSNAGLPVPGMPNLSVVSPKRYEEFVADLKKTRLPHPDDQRRRDNRCKRMLTRFSDDCAEKGFTPRDLTVSSHLVTLAAAVLRDVFAGQPNPPYINSVPGRITKHVRMSCEIMGVLASVNPLVVDSDGHLKTKTEIRDITHLHHAVDAVTLGLATTLVPVNGEIWALMLKRNLTPYEQRQLLKTKAFRSDDCGRVCLKALDVETLQSIKKCIMECRVATHQPARRHGAALEKNTWRIVARDGDSVTIRQRTRDEKTGTISTKTEIVNSKRLLGIDPKGASKLKSIKGGIIISENYGVALDPIPEVIPYHHVWRRIGEIKKRNNGVMPRIIRNGMLIRVRNGKNAGIWKVFSVKHAQVGILLDIGKPDVVRLENKTEGHRINVRLAAIARDGLELPVACLTGTPCHVAPSD

SEQ ID NO: 16966 - protein, 1336 aa, unidentified
  REGION 1..1336: note = Cas Enzyme sequence
  REGION 644..657: note = misc_feature - Xaa can be any naturally occurring amino acid
MGKDYYVGLDSGTGSLGWSVTNETYEIQRSHGKALWGVRLFDAAETAEERRGFRTNRRRLDRRNWRLELLQEIFAEKINQVDDGFFLRMKESRYLPEDKRGKDGNCPELPYAIFADHDYTDKNYHKQFPTIYHLRKWLMETSDTPDIRLVYLAMHHLVKHRGHFLFSGNIDEIREFHTAFDAFLALVRGEELGFERTFDENCYQETERILKDEHLTRSMKKSHLVKCLDAGTAAEKELIGAISGCTVKLSSIFADGELDACARPKFSFSDISYDEYAGELQDILGEQYVIIESAKAVYDWAILADVLGSYRSISEAKTALYEKHKKDLQYLKKLVKKHLSTEAYKEIFVRSSEKKSNYPAYVGMTKKNGKKVPIQGKQCSQGELYVYLKKSVIDQIADENAAQYLRDEIEHGTFLPKLVSKENSVIPYQIHLYELNRILENLQDRIPLLKQEGEHIRQIFAFRIPYYVGPLNGVRKDGKETNWVCRRQEGKIYPWNFSEIIDTEASAERFIRRMTNKCTYLPAEDVLPKNSLLYGKFMVLDELNNLRLNGEPISVELKQAIYQDVFKRYRKVTQKKLLAYLIREGIAGRETDITGIDGDFKSSLTAYHDFKEKLSGIELSPSEKETIILNITLFGEDKKLLQKXXXXXXXXXXXXXXIAVSNLSYKGWGRLSGKFLEGITAPDPETGEVWTIIRTMWETNDNLMQVLSSKYQFAEAIERENDTDEKKEISYWLIENLMVSPAVRRQIWQMLLVLKELCKVQGAPPKRIFIEMAREKADSGRTRSRKKMLIDLYKKCKSEERDWINELEQTEDSRLRSDRLYLYYTQNGRCMYSGDPIELKDLWDNTKYDIDHIYPQSKVMDDSLDNRVLVKRVYNGEKEDRYPIEKSIRDARHGFWKSLLDKGFISREKYKRLTRTTEFEEAELTGFIARQLVETRQGTKAAASILKQVFPDTDIVYVKAPVVSRFRQDFKFIKVREMNDLHHAKDAYLNIVVGNTYFVKFTKDAGWFVRKNPGRTYNLKKMFLSGKVERNGETAWISGDCGTIGTVRRFMAKNNIIVTRRPYEVTGGFYDQMLMKKGKGQIPIKTGDVRLQDIAKYGGYNKETGAYFVLAESDGKKDTRIRTIEYVPVRLKKELGDEKKLCSYLEQRGLKNPKILLKKIKIDTLFRVDGFYMWLSGRTGNQLIFKGANQLILSQEDSAVLKKIQKFITRRKQDKSVQIYDTDGLSEENLSHLYDTFLEKLRTTVYAKRLGTQEKTLSEKKKDFLALGKEDKCIVLNEILHLFQCQSGSANLKLIGGPGSAGILVLNSDITKCQDICIINQSPAGIHEQIVDLKAL

SEQ ID NO: 16967 - protein, 1510 aa, unidentified
  REGION 1..1510: note = Cas Enzyme sequence
MKKILGLDLGTNSVGWALINQDESKSEVVGLGSRIIPMSQDILGEFDRGNSVSQTAERTGYRGTRRLRERYLLRRERLHRVLNILNFLPEHYGKSIDFEQHFGKFIDESEPKIAYRRNEVTGKMEFAFMNSFNEMVANFKLTQPHLVGEGRQVPHDWTIYYLRKKALAAKIEKEELAWILLNFNQKRGYYQLRGEEPEEEQKKRVEFYSLKVVNVEEGEESRTKGEKWYSATLKNGWVYRRTSKTPLDWIGKTKDFIVTTDIDENGEVKRDKDGVEKRSFRAPLEDDWTLIKKKTEADVEHSNKTVGTYIYDALLLNPTQKIKGKLVRTIERKFYKTELEAILTKQREFHKELNSRELYQACLEELYGNNEAHRNSLGARDFTHLFLNDIIFYQRPLKSKKSLISNCPFEFRIYIDKSTGTEVKESIKSIAKSHPLYQEFRLWQFLQNLKIYAKERIVDGRVVADVNITQELLITEEDWVALFRWLNDRKDVDQKALLKYPAFGLKKEIDKYRWNYVEDKTYPCNETRALINSRLSKVANVPTDFLTRGIEEALWHILYSVEDRHEIEKALKHFAILHQLADDFVDNFKKFPPFNKDYGSYSAKAIKKLLPLMRQGECWHKDAIDSNTLLRIDKLLTAEFDPTIRDRVRDKSINLKCLDDFKNLPLWLASYVVYDRHAEANDIKRWEKPSDVEYFLHNEFKQHSLRNPIVEQVITETLRVVKDIWTHYGNGAENYFSEIHIELGREMKNPAEKRKSMTQKISENENTNLRIKALLAEFLNDSSIANVRPNSPSQQEILKIYEEGVINAENEIPDDIQKISKLSLPTISELIRYKLWLDQKYHSPYTGEMIPLAKLFTSAYEIEHVIPQSRYFDDSLSNKVICEAEVNKDKDNATAYEYIKNNSGKKIELSFGKEVTLFTLTEYEENVKRSFSRNRGKLKKLLMEDIPDEFIARQLNDSRYISKVVKGLLSNIVRVDDEQEVTSKNVISTSGAVTSILKKDWGLNDAWNEIISPRFERLNQLTNSTNFGHMRNNLFVPYVPLELQKGFNRKRIDHRHHAMDALVIACATRNHINYLNNSYAMAGKRDLRFDLRANLCYKSPNDDGSEGYRWVFKKPWNTFTQDAREALSNTVVSFKQNLRVINKSVNRYQKWEVDEHGQKQKVEVKQVKGDSWAIRKPMHKDTVSGRVTLRFQKAVNLSVAIDTPEFIVDKSLKAKVKELLAIPYDKKQIAKYFKENDNQWNGKPVSKVEVYYFDGENAASRIKVDETFNSEKIKKITDTGIQRILLNHLQQYSENQNGKVVEHPEIAFTSDGLEAMNRNIQNLNNGIYHQPIYKVRTYEPMGSKFAVGTIGNKGTKFVEAAKGTNLFFAIYLSPSGKRSYETVPLNVVIEREKQGLSPVPEHDEKGNALLFYLSPNDLVYIPTQEEQDSPQSVDLERLTKEQVLNVYKVVSFTGNRMYAIPANVAQSIVDKVEYTQLNKVESDVILKRSIKEICWKLKVDRLGNVVDVIR

SEQ ID NO: 16968 - protein, 1510 aa, unidentified
  REGION 1..1510: note = Cas Enzyme sequence
MKKILGLDLGTNSVGWALINQDESKSEVVGLGSRIIPMSQDILGEFDRGNSVSQTAERTGYRGTRRLRERYLLRRERLHRVLNILNFLPEHYGKSIDFEQHFGKFIDESEPKIAYRRNEVTGKMEFAFMNSFNEMVANFKLTQPHLVGEGRQVPHDWTIYYLRKKALAAKIEKEELAWILLNFNQKRGYYQLRGEEPEEEQKKRVEFYSLKVVNVEEGEESRTKGEKWYSATLKNGWVYRRTSKTPLDWIGKTKDFIVTTDIDENGEVKRDKDGVEKRSFRAPLEDDWTLIKKKTEADVEHSNKTVGTYIYDALLLNPTQKIKGKLVRTIERKFYKTELEAILTKQREFHKELNSRELYQACLEELYGNNEAHRNSLGARDFTHLFLNDIIFYQRPLKSKKSLISNCPFEFRIYIDKSTGTEVKESIKSIAKSHPLYQEFRLWQFLQNLKIYAKERIVDGRVVADVNITQELLITEEDWVALFRWLNDRKDVDQKALLKYPAFGLKKEIDKYRWNYVEDKTYPCNETRALISSRLNKVANVPTDFLTREIEEALWHILYSVEDKHEIEKALKHFAVQHQLADDFVDNFKKFPPFNKDYGSYSAKAIKKLLPLMRQGEYWRKDAIDAKTLLRIDKLLTGEFDPTIRDRVREKSINLKCLDDFKNLPLWLASYVVYDRHAEANDIKRWEKPSDVEYFLHNEFKQHSLRNPIVEQVITETLRVVKDIWTHYGNGAENYFSEIHIELGREMKNPAEKRKSMTQKISENENTNLRIKALLAEFLNDSSIANVRPNSPSQQEILKIYEEGVINAENEIPDDIQKISKLSLPTISELIRYKLWLDQKYHSPYTGEMIPLAKLFTSAYEIEHVIPQSRYFDDSLSNKVICEAEVNKDKDNATAYEYIKNNSGKKIELSFGKEVTLFTLTEYEENVKRSFSRNRGKLKKLLMEDIPDEFIARQLNDSRYISKVVKGLLSNIVRVDDEQEVTSKNVISTSGAVTSILKKDWGLNDAWNEIISPRFERLNQLTNSTNFGHMRNNLFVPYVPLELQKGFNRKRIDHRHHAMDALVIACATRNHINYLNNSYAMAGKRDLRFDLRANLCYKSPNDDGSEGYRWVFKKPWNTFTQDAREALSNTVVSFKQNLRVINKSVNRYQKWEVDEHGQKQKVEVKQVKGDSWAIRKPMHKDTVSGRVTLRFQKAVNLSVAIDTPEFIVDKSLKAKVKELLAIPYDKKQIAKYFKENDNQWNGKPVSKVEVYYFDGENAASRIKVDETFNSEKIKKITDTGIQRILLNHLQQYSENQNGKVVEHPEIAFTSDGLEAMNRNIQNLNNGIYHQPIYKVRTYEPMGSKFAVGTIGNKGTKFVEAAKGTNLFFAIYLSPSGKRSYETVPLNVVIEREKQGLSPVPEHDEKGNALLFYLSPNDLVYIPTQEEQDSPQSVDLERLTKEQVLNVYKVVSFTGNRMYAIPANVAQSIVDKVEYTQLNKVESDVILKRSIKEICWKLKVDRLGNVVDVIR

SEQ ID NO: 16969 - protein, 1109 aa, unidentified
  REGION 1..1109: note = Cas Enzyme sequence
MSRSLTFSFDIGYASIGWAVIASASHDDADPSVCGCGAVVFPKDDCQAFKRREYRRLRRNIRSRRVRIERIGRLLVQAQIITQEMKETPGHPAPFYLASEALKGHRNLAPIELWHVLRWYAHNRGYDNNVSWSGGFSEDGGNKEDTERVQHAKDLMDKHGTATMAETICRELKLEEGKADAPMNVSTPAYKNLNTAFPRLTVEKEVRRILELSAPLIPGLTSEIMELIAQHHPLTTKQRGVLIHYGIKLARRYRGSLLFGQLIPRFDNRIISRCPVSWAQVYEAELKKGNSEQNARERAEKLSKVPTANCPEFYEYRMARILCNIRADGEPLSAEIRRELMNQARQEGKLTKASLEKAISSRLGETETNVANYFTLHPDSEEALYLDPAVEVLKRSGIGETLSPSVCRLAANRLRRGKSVTPNYLLNLLKSRGESVEALEKKIEKERHQQANRKKAKKTDPDYAATPLKPRYATGRAPYARPVLKKVVGETLDGEDPTRPARGEAHPDGELKAHDGCLYCLLDTDSSVNQHQKERRLDTMTNNHLVRHRMLILDRLLKDLIQDFAGGQKDRISRICVEVGKELTAFSGMDSKKIQTELNLRQKSHTEAVNRLKRDLPGKALSANLIRKCRIAMDMNWTCPFTGATYGTHELENLELEHIVPHSFRQSNALSSLVLTWPGVNRMKGQRTGYDFVEQEQENPVPDKPNLHICSLNNYRELVEKLDDKKGHEDDRKRKKKRKALLMVRGLSHKHQLQNHDAMKEIGMTEGMMTQSSHLMKLACKSIGNVLPDARIDLIPGAVTAEVRKSWDVLGVFKELCPEAADPVSGKILKENLRSLTHLHHALDACVLGLIPDIIPAHHNGLLRRVLAMRRIPEKLIPQVRPVANQRHYVLNDDGRMILRDLSISLKENIREKLMEQRVVKHIPADMGGALLKETMQRVLSVQGNGEDAMVSLSKKKDGKKEKNQVKASKLVGVFPEGASKLKALKAAIEIEGNYGVALDPKPVVIRHIKVFKQIMSLKEQNGGKPVRILKNGMLVHLTSSKDPRRTGVWRIASIKDGKVGVKLDLQRAHCAAPTNKKHECNWREVDLISLLKKYQMKIYPTSYTGTPR

SEQ ID NO: 16970 - protein, 1384 aa, unidentified
  REGION 1..1384: note = Cas Enzyme sequence
MSFKENSKIYYGLDIGTDSVGWSTTNEKYELLRYKNNLMWGVSLFEAASLAEERRGHRTQRRRYDRRQQRVALLGELFAKEILKTDPDFFLRLKESSLYPEDRTSKNVNTYFDDADFKDSDYFKMYPTVHHLIKELSESNKPHDVRLVYLACAFIVAHRGHFLNGADENNVQAVLDFDSSYCEFTDWFKSNDIEDNPFSESVKNEFSVILRKKIGITAKEREIKNLLFGTTKTPDCYKDEEYPIDIDVLIKFISGGKTNLAKLFRNPSYDELDIQTVEVGKADFADTIDLLASSMEDTDVPLLSAVKAMYDWSLLIDVLKGQKTISDAKVCEYEQHKSDLKALKYIVRKYLDRAQYDEIFRTAGEKPNYVSYSYNVTDVKLKQLPSNFKKKNSEEFCKYIKSKLEKIKPESDDEAVYNELIEKCNSKTLCPKQVTDENRVIPYQLYYHELSMILDKASAYLDFLNKTEDGISVKQKILTLMKFRIPYFVGPLVKRNETDNVWIVRKAEGRIYPWNFENMVDFDKSEDGFIRRMTCKCTYLAGEDVLPKYSLLYSKYTVLNEINNIKVNGEKISPELKQDIFNELFMKTSRVTVKKITELLKRKGAFSEEKGDSLSGVDINIKSSLKSYLDFRRLLENGSLSENDVERIIERITVTTDKPRLVSWLKAEYSDLPAEDIRYISRLSYKDYGRLSAKLLTGCYELDTNTGEIGSRSIIDFMWAENINLMQILSDSYGYKSFIEEENKKYYMINPTGSIAQTLREMYVSPSVSRAIIRTMEIVKELRKITKKDPDKIFVEMARGGKPEEKGKRTSSRREQIEKLYDSAKAFVSDEDISHLRSQLGSLSDEQLRREKYYLYFIQFGKCMYSGEAIDFSRLGDNHCYDIDHIFPQSKINDDSLHNKVLVKSQLNGEKSDDYPIKAEIRNKMHPLWKNLFYRDPKNPADKVKYERLTRSTPFTEDELAGFIERQLVETRQSTKAVATLLKEMFPDSKIVYVKAGQVSEFRHDFDMLKCREINDLHHAKDAYLNIVIGNVHDVKFTSNPMNFVKNADKHYTIKVKETLKHKVSRNGETAWNPETDFDTVKRMMSKNSVRYVRYCYKRKGGFFNQNPDRAGNPDLARLKKDLDPVKYGGYNSKSISCFSLIKCTGVGAVIIPVELLCEKRYFSDDNFASEYAYSVLKNALPAKNIAKISIDDISFPLKRRPIKINTLFEFDGYRVNIRSKDSYSVFKISSAMAAIYSKDTSDYIKAVSSYVDKSDKGSKFKPGEAFDVLSNLKVYDEIAKKCISEPFCKISKLAEAGKKMEEGRDKFAELSIIEQMKTLLLLVDILKTGRINTCNLKSVGGVESYHTERMSAILKNTKYSDIRIIDQSPTGLYEKKSDNLLEL

SEQ ID NO: 16971 - protein, 1022 aa, unidentified
  REGION 1..1022: note = Cas Enzyme sequence
MDGLAKFLRKELGYDNSYSTDLVEKKVRALTEQIDTNILCHILMDYCRYRGYSELYDEVPADDASTDYMARMNDVATWCHDNNKTISHFLVDHGMKAHRKDDDERASGGLPVDRSLYKSELALIWETQSKHDARLTSDLFQRACDIIYHRRPLKSQKHLKGKCELETNKQVCARSHPLFEMYRTWIELRNLRAWHNGVPVEINEESLRDLYRIAEEREATKTAIANAIIKHLSFDVDKGSLRINKEKIPVMNTLSSINKIVDVGNDMVKLTDIWHCIHSEPDRLHRKNALIKHGYGAEESDVLSKVRLAASTSSYSHKALVKLLPYVNGTEERFDEYHAREAVYPKQAPSDKVELKTISNGKLRNPLVQSMVNEAIRTVKDYITAIGVQPDEIVVEMTRSLSRSPKQRKNDHKNNKDRKKENDMADNVLAAMNVPKTHNKRRRYLLWKEQGGVFDPNTKTQKSPAICIYSGSEISIEQAFDPTSTENEHTIPRSRLFMDGFHNLTLATQLENKAKGNMTAHEYMSGKTKEQRSAFLERVQKYYGNSRKGDMFTKQGNDLNDMLGENHLTMTGYIATQLKEKFCASFDKVIPSNGSVTSLIRGHLRVNDMFKTMVSKQRGEDQKDKRMDLRHHGMDALICSMVRPSYIQRLSTANALDDKQKTEGALTTINRELDDHVPLIMEAIERTIVVQPRERGPLFQRKNGTNGKSYGVRGQLHDQNPVRKYLLLVSSTELTISEKQIIIGESIQDAKKNKIPIDPIDVDATYKTVDLTKEHVKFLKRHGILHGKDAEIQKKALIKREKEMKKSGRDLHEEFAPLFRSKYVNGIAQEYRDNGKGLKGMFEDVRLAHMKSIRMIDANITEDGYLRRDGHYLKNCTNHRLMIKGGETTVEAMHQYVSKVMGRNRTSSVAGPTMTSDADIIIHLKSLILLGSDRNDLQTMISKKDDSFLKSLYWVSGIEADGRIKMYPHNMTSSDGNKDFMIRMSYQSLLREHKKLTILDQREIGMSWVGSFASRNKKKAKV

SEQ ID NO: 16972 - protein, 1439 aa, unidentified
  REGION 1..1439: note = Cas Enzyme sequence
MKYIKYILGLDIGSNSIGWALIQLDLLQKTKRIIAAGSRIIPMDQKVLSDFGKGITISPTAQRTSYRNARHCRERHLLRRERLHRVLHILGFLPTHYDKQIDFSKRYGKFVDNTEPKIAYNEGKFLFMDSFQEMLADFKIHQPDLFYTKKNGEESKIPYDWTIYYLRKKALSRKISKEELAWIILNFNQKRGYYQLREEEEEENKENDFEIISSKIISVIKKDKDKKYNKYWYDIILENGLVYQAAFYNDFVYNWINQDREFIIERTSLKNGAEKVKLSYLPTFDEIDKMDKKEQDKYYKKIKIKTENSIGNKTVGCYIYDHILQNPNEKIKGKLVRTIERKYYKEELKAILEKQIALQPELFTDQLFADCIRELYSKNEAQQRNLAARDFVHLFVEDIIFYQRPLRSQKSTLANCSLESRSYIDKDSHTRKEVPLKVCPKSNPYYQEFRVLQWLQNLKIYEIESDQEVTHEFIKTLEDKQQLFDFLMDQKEIDCEELLKYFLNQTYPNAKEKALKSELKKWKDTYRWNYVYDIGEKSSKKYPMNETRYELKRHLEKVANLPDDFLSSEVEYLLWHLIYSVKDKVAYEKGLKTFAQKHHLDKDSFVESFKKFKPYPSEYGSFSEKAIRKLLPLMRFGSYWDFNHIDKNTQKRIEDLITGVENEEIRTILREKAEKYQLEKETDFQDLPLWLAQYIVYNRHAEASSLEKWTSVNDLETYLNEFKQHSLRNPIVEQVVMETLRVVRDIWQQYGQGQASFFDEIHIELGRELKKTAKEREKLSKQNQKNEDINLSIKEKLKELEKYNTRAYSITHQEKYKLWLEQKHISPYTGQIISPENLFTDNYEIEHIIPQSRFFDDSLSNKVVCESIVNKAPYKDRQLGLEFIKNQGGRIVKELSTENKTIKIFTEEQYRTFIKEHYSNNPEKTKKLLLEEIPEKMVARQMNDTCYISKFISEILSKIVRSDEQDEGVHSKNVILCTGKITSILRQDWGLNDIWDNLILPRFERMNNLLQKEKFTIYSIEKQKKIPVVPINDQFKSFQKKRIDHRHHALDAIIIACVTGEHINYINNQHALEKGKDKKEKQKEHDKLREKLCIKKYNKGSEENYSWIFKKPWAHFTQEVRTALEGIVVSFKQNLRVINKATNYYERWVEENGRYIKKMVKQEGTNWAIRKPLHEETISGKIYLDREEITKNDILTATRKTVDSSFDEKRIKKITDTGIQKILLNYLKYKGSPEIAFSPEGLEELNKNLSIYNDGKPHKPIYKVRIYEKGSGRFALGEKGRKYKKYVQGAPNLYFGIYQGANKRSFATIPLNEVIERQKQGRPYVPEYNEKGDPLLFSLSPNDLVYVPVEGENIEDIDFQNLSKEQKERIYNVNDFSSTCYFTPNRIAKAIFPKEVDLQRKGDKLSGSYDTKTASLEGIQIKEVCIKLKVDRLGNISKA

SEQ ID NO: 16973 - protein, 1521 aa, unidentified
  REGION 1..1521: note = Cas Enzyme sequence
MKNILGLDLGSNSIGWALVQQDFENKQGKIMAAGSRIIPMDQGVLGDFERGNTVSQTAERTAYRSARRLRERHLLRRERLHRVLHILGFLPPHYDSQIDFNKRYGKFIDDAEPKIAYNKGNFIFMDSFNEMIEDFKKHQPQLFYKKSNGEESKIPYDWTIYYLRKKALSQKITQQELAWLILHFNQKRGYYQLRGEEETEGNDMEIISSKVLSVIKKDKDKKYDKYWYNITLENGLVYKAAFYNDLVYSWIGQEREFVVKRTPLKNGDEKIELSYLPTFDEIAKMDKKQQDKFYQKIKVKTESSIGNKTVGAYIYDHLLQNPNQKIKGKLVRTIERKYYKDELKAILAKQIALQPEFFTENLLADCIRELYCKNQTQQQNLLSKDFLHLFVEDIIFYQRPLRSKKSTIANCPLEKRSYIDKETNERKDAPIKVCAKSNPYYQEFRVLQWLQNLRIYEIETDREVTAEFIETAQDYEALFNFLMSQKEIDNEGLLKYFLLTKNPQIKDKAAKSELKKWLTTYRWNYVYDAADNSSKKYPMNETGYDLQRYLQKVEGLPVNFLTFDITYRLWHLLYSVKDKVEFEKALKKFAQKYQLDEVSFVESFKNFKPYPNEYGSFSEKAIKKMLPLMRFGKYWNFKNIDVHTQKRIDALINGVANEDIRTIIREKAEKYQLNNETCFQGLPLWLAQYIVYNRHAEATNIEKWTSVSDLEAYLEDFKQYSLRNPIAEQVVTETLRVIRDIWQQYGGGQANFFDEIHIELGRELKNTSKERERLSKQNQENENTNLRIKKLLTELKEDANIQNVRPYSLVQQELLKIYEEGVFSSTDEIEEDIQKIRKKAEPTTPEIQRYKLWLEQKYKSPYTGEVISLTKLFTEEYEIEHIIPQSRYYDDSLSNKVICESAVNKLKINQLGLEFIQNHHGEKVRIAGNKEVTIFTEEQYKEFVKKHYANNSAKQQKLLLNEIPEKMVARQMNDTRYISKYVSEILSKIVRSEEKDEGVNSKNVIPCTGKITTALKQDWGLNDVWNELILPRFERMNQLTQTQLFTSYNDRLQKNLPTVPIKYSQGFQKKRIDHRHHAMDALVIACVTREHINYMNNQHALDKSKDKKEKQQSRIDLRTILCEKKNNNWQFKKPWRTFTQEAKEALEHIVVSFKQNLRVINKATNYYEKWEEKDGILVKKKVKQEGTNWAIRKKLHEDFPYGKVKYQVNFLKISENISKIDLIVDEFIKRQLEKIYVENHRKVNLTKKYLKENPIRDQKGEEVISTDFREENIKYRKRKPISVLSDRNRKTGITSIEKMLKTIAKVADNVLKRELFLYLEECNNDIDVAFSPEGIEQFNSKRKIPVYRLPFFEEGEKKNELGNKGKYVEAAKGTNLFFGVYQGKGKRTYATIPLNEVIERQKQGLPSVPERNEKGEPLLFSLSPNDLVYVPMEGESTETIDFSNLSKEQKERIYKTVSFTGKECHFVKSTIASLIKSYDAKSKIGELGSLNKLEVTISGDSRIKEVCIKLKVDRLGNITKA

SEQ ID NO: 16974 - protein, 1070 aa, unidentified
  REGION 1..1070: note = Cas Enzyme sequence
VQAAPQTGLGIRKGKGSWCARPSESHHDILRFARPAMPNPRLAKRINEFLPQVRVGIDFGEGAGGIAVVRGQKILHAETYVDFHGATLEQRRQLRRGRRTRHAKKMRLARLRSWVLRQKLPGGSRLPDPHVVMAEKRFQVQPGVFQIAGQNPLAAPSWVHLAKEGKVDAQGFVKALTLIFQKRGYKWDAIALEEMTDARWKDFLTTARIPNDELQASVTHQIELRKDDPSNPKRGKTKIPPDELLDLLRKARERGNLPPEPRVAEHRSVKETELREVIAGFGKAAGIPTQTVERWQRELCGGATPQGRPTPGLLNKVLRPARFENRLKTGCAWCGKPTPRKSKVRYIAYAAAVCNLRAREGRRVRRLNDQELEFFWSWWRLGERAAAPSTDAPEVTGCSPQAQSAQRRAEKGPPKLAGIQSHLRRLGAQEKMARQIFDLLWNDEPQGRASLCKQHLEMAAKGMTMKEAGVEWQTIAVRRAPNPCGQQHDARVLHRLEQILFRPGKTGERAWRYGPVQFISMEVPKPQTEQARKGEQKERKVESFTERLNKETGGICIYCDPAHPRPAEDKDHIFPQSRGGPDVWDNLVPACKSCNTEKGDLTPFEWFGRRDAQRWAAFALRVEELARKGVPGPGLGEGAKERGAAPHICISERKRALLLSQEPDFPENPTALAHVGSRPRQFLVEIRRLFESRGVKPPRAECQLGEPVAQRIDGRTTSQLRKSWLRKEGDALHNFPAKDRWDLANHAQDAALVAACPPHTWRETIFRHRALRPNREGKWVEQPELAVPELAPDWAEYMASRAWPLVQVLGRYPVNWKRSFADQTLWRKPQAREESELSVSRPIESIKVRQIRRVQSLYYRPRLAELAKRLGLPENKTLPIEELQKEFPGLRHLKLSVPKGGKVFPVRPGDGPLRKMQAKPAGEGLILWDLPAERGRKAAPRVSLLRPKPLQKFGIPRVDPPLEPGARILGKLERHDMIWLDRSLGRPDGFYRAKEFSDSGIVALPENAVPDELARKMSLKRADTDTAPRAASREIKLGKKDLAAYFASLSGEDRDAPSVDEPFDAGEPSV

SEQ ID NO: 16975 - protein, 961 aa, unidentified
  REGION 1..961: note = Cas Enzyme sequence
LPGGQRLPDPYGVMHWPFKTKKGHTIKTGLASRQDGKRTIIQKCKIGTATPEEFVCSLTLLFQKRGFVWEGSDLCELSDQELAEELMTVRITEAVAAAIKEEIERRKKEPEDNKEGEIENLETVLCDAVKRARSPRTPEHRSIVESDLKDIVDGWTRKNCPQMTDMWKKELSCLLNKHVRPARFENRIVAGCSWCGKMVPRKSKVRELAYKVVVKNIRVEDFTSRQPLTAQEAEYFSQLWVDKEAKPPARTAIENKLKKLKASPKMANQLYELLAPSEPKGHTNLCQQHLEMAARGAFMCNRHHAICENNNGDHQTIDSVKEGRKRAGPRNPCREDRDRRMIRRLEQILFETPGKPGKPSHSIPRLITIEFPKPNTAQTAGCPHCKEKLSLDARVRWKMARPMKLEASNDSTPFFCPSCAAGIKITLYKKMRIKEKEIVQKYSPKDTDVLVRKTAAGGLKKLKYDMYLKETDGTCVYCGTSIGSGQIDHIFPQSRGGPNIDYNLISCCRTCNGNLKKNKSPWEWFGNIDQRWREFEDRVKKLPAPQRKKAILLSRESAYPENPTALARVGARTKEFIGRIKQMLLANGVKENEIADNYEKDKIVIQTIDGWMTSRLRGCWRTFPDGTANFPPKNDADKRNHAQDAVLIAACPPHTWRERIFTWKPENPYFSVLQKIAPRWKDHQATMKILGRYFPRWHNQNSDIQFVHQHKTQNGTSYTMRDTVESIDVGTDKKGGSIERIYSKSFRDFFSRTFKSLGIKMAMNEIPKLKSQWLNERRAAWMKKNPATPVPNQRERAWEASFPRRLQFDMGYGEDVAEVNPKNGPSRFVRAQPVNDRIEVWTNDVRQAQIRTVKNRILFRHIQDNSPQGRTLERIFRRNDMIQLDAVQKRGRKGITGKSYEAGEYMVVKIEKGGKFTAVPAHRGKGRENQRQVSQREIAKLCGVSLSPKRRKPSRSTSESG

SEQ ID NO: 16976 - protein, 953 aa, unidentified
  REGION 1..953: note = Cas Enzyme sequence
LLTPRLQERVNSFLPTIRVGIDFGESAGGIAVVRDNRILHAETYVDFHASDLEQRRQLRRGRRTRHAKKMRLARLRSWVLRQKLPNGARLVDPYVVMKDPRFHVQPGIFQTPGKNPVDVSSWVDLAKQGKVDAMGFVRALTLIFRKRGYKWDAIELANMTDVKLKDFLLSSRVPDSLAPQIRSEIQRRQQDPDNSVRGKKRISSDDLLGELEKALHRESEPRKAEHRDVKEADLCSVIDGFGSSINLSKDTIQRWRRELCRLLNKILRPARFENRLKSGCAWCGKPTPRKSKVREIAYEAAVRNLRVREGRVVRPLKPEEFAIFRQWWNLRGQSIESQQSGSQQKRSRKDSSQTVPKLKAVQSHLKKLGAQEQMARQISDLLWNEKPQGRASLCHRHLTEAAQGRTMKDVVGEWHRVKVRKASNPCREQHDDRVLHRLEQILFKPGKQGQEAWRYGPVQCITLEVPKPQTEQARKGEQKPRKPEPFMERLKHETNGICLYCDSSSPHPAEDKDHIFPQSRGGPDVWDNLVPVCRTCNTAKGNQTPFEWLGADTDRWTRFIQLVEGLATQGVRIAKEDGKEETVRIADRKRMLLLSQEADYPENPTPLAHVGARPRQFVVALGELFEKRGVAVPKVNYQSGSSFVQRIDGRTTAQLRKSWLKKADGTDNFPLKDDRDLFNHAQDAALIAACPPHTWREAIFRCRAIRPRWDGIPTEQDGLAVPEVAPDWAEYMERRTWPLVKVLGRYSISWKRKFADLTFSQNPDSLDDKRLVQNVPSENQENSPPGSRHMKVEKQPGGRLARVHPDDGPARKIQLKGASEAVVFWLHQDEPLKSLKWSIRYPAIFGKFGVPRHDPGIPQGAKVLATWYRHTVIHLNVETGYVPGFYRVIKLQKTGLTLIPENSITKELEDRMKIGKPTSDDEKDAKKVSLGKGNLIKYFQLNSGRYYGTEPSR

SEQ ID NO: 16977 - protein, 1060 aa, unidentified
  REGION 1..1060: note = Cas Enzyme sequence
MAVNSKLRERLGEFLPLVRVGVDFGEGAGGLAVVKGRTILHAETYVDFHQTTLEQRRQLRRGRRTRHAKKMRLARLRSWILRQRLPDGSRLPDPYPLMRDPRFHVQPGVYAAPGARPTESPSWIALAQQGKTDAAGFVKALTLIFQKRGYKWDAIELEQMTDAKLKDFLATARVPEGLYEKIRGLIEKRKDEPDSPVRGKEKVSPQELLGLLEEARKRPRGPRQAEHRDVKAEDLRKVIDGFGRFAGLPAETIERWQRELCGGTNSNGKRKPGLLNKVLRPARFENRLKSGCSWCGKPTPRKSKVRQIAYAAAVMNLRVREGRARRPLNEAERKIFWDWWEAREAAAAAPTSGRESSSKSENAGKGAARDAPKQAAIGEHLRRLGAQEKMARQLYDLLWNREAKGRASLCRQHLEMAAKGMTMKDAGVEWQTIAVRKAPNPCREQHDARVLHRLEQILFRKGKTGSEAWRYGPVSFITLEVPAPATEQARKGEQKERKPEPFMERLARETGGVCIYCDPANAKPAETKDHIFPQSREGPTVWDNLAPACTACNLEKRERTPWEWLGPTARWAKFEERVLLLASKGVPVREEEDGKGKSKAARFIRISERKRDLLLRREPDYPDNPTALAHVGARPRQFVVGLGEIFTKHGLEPPRVDYQLGKPHVQRIDGSTTAQLRKSWLKQPDGVTDNFPTKDRWDLLNHAQDAALIAACPPHTWRDTVFCRRAIRPNFAGQWVPQDGLAVPELAPDWAEYMARRSWPVVRVLGNYPVGWRSTFADQTFYQRPKQLDDKRLRLHVPLVGLKFKEKSPDAKRSPSETKILNPRVAAEFPALAERLAEERKAWEAAHPKWKREKDLKGEHKKLGLTPGRTVPKEILEKELPGIRHVTVERQKGGAALACVEPRDGPPRKIQLKGASEAVVIWVPKGKPLEKLQLSIRWPAIFRKFGVERLVPHIPPGARILEAWERYKMIWLDEDCGQAPGWYRVKEFSSGQVTVLPENAVTDELAKRLQLKAEKQDAATPGEDAEKQGAKANGASARLKEIQLRKRQLAAYFRSQEGGQ

SEQ ID NO: 16978 - protein, 1103 aa, unidentified
  REGION 1..1103: note = Cas Enzyme sequence
MLNPRLQGRLKGFLPLVRVGIDFGEGAGGIAVVQGNKILHAETHVDFHQTTLEQRRQLRRGRRTRHAKKMRLARLRSWVLRQKLPDGSRLPDPYDVMRDKRFQVQPGVFETPGQNPAQSPSWIDLAKEGKTEPAGFVKALTLIFQKRGYKWDAIALEEMTDAKLKEFLTTARIPSDELAGDVRAQIERRRSDPDDPVRGKPKVSPDELSELLRLARERGTLPPQPRLAEHRSVKQTELRQVIAGFGTSAGLPQETIERWQRDLCGGPTGRGREKPGLLNKVLRPARFENRLRTGCAWCGKPTPRKAKVRYIAYAAAVCNLRVREGRRVRPLNPTEQEVFWHWWRLQEAATAQPAQPPTESQADKTPEKPKSETVPKMAGIEGHLRRLGAQKEMARQLYDLLWNPQPKGRASLCKRHLEQAALGKTMKDAGVDWQTISVRKAPNPCREQHDKRVLHRLEQILFKPGKTGEEAWRYGPVQFITLEVPKPQTEQARKGEQKARKVETFTERLSKETGGVCIYCGPAHPRPAGDKDHIFPQSRGGPDVWDNLVPACKACNTEKGDRTPFEWLGTNPRRWDAFSARVEDLALKGVAAPSEDSEKSKVARYLRISERKRALLLSPDSEYPENPTALAHVGSGPRQFVVELRRLCGRYGVKPPRADYQLGEPFVQRMDGRTTSQLRKSWLKKADETTDNFPLKNEWDLLNHAQDAVLIAACPPHTWRDTIFCHRALRPNREGKWVVQPELAIPELAPDWAEYMERRTWPLVHVLGRYPVNWKRTFADQNFYQRPEKLDDKRLRQHVPLVALKYKPKDPGKKPSASETQILNPYVAAQFPVLAESVLEEREQWQKAHPKPDKAERKKLRELGLTPAHTIAKEKLQAKFPGIRHVKVEKQPGGKLARVEPKDGPPRKIQLKKASEAAVFWLKQGKTLNEKNLVISVRWPSIFQKFHVPRHDPPIPGGATILDVWPRHKLIWLDQATGHDPAFYRVKEFSEAEVTVLPENAVTDELAKRLNLRRQRAKKKSPTAALASEPEGPEATPAAEDEDPEPSARTQEIKLHRKDLAAYFESQRGEDANESPGDGSCRTGFCTDSRSAKNGRSKIHKPD

SEQ ID NO: 16979 - protein, 1105 aa, unidentified; identical to SEQ ID NO: 16632
  REGION 1..1105: note = Cas Enzyme sequence

SEQ ID NO: 16980 - protein, 1446 aa, unidentified
  REGION 1..1446: note = Cas Enzyme sequence
MIKLLYLEKLKQYTMKKILGLDLGTSSIGWALVNEAENSDEVSSIIKLGVRVNPLTVDEMQNFEKGKSITTNTDRTLKRSMRRNLQRYKLRRDALIELLKKVGFITDKTILSEQGNRTTFETYRLRAKAAEEEISLEELARVLLMINKKRGYKSSRKAKGEEEGALIDGMEIAKKLYDEDLTPGQLCLQLLESGKKFFPDFYRSDLQEEFNKIWNFQKQFNPFSFCDVAKEEVKGKNKSQTWAILAKYFVETKKVNVWNEHEAQTENREEVYKLVGLKRTVKGEELKKENYRWRVQALTEQLDLEKIAVVLQEINGQISASSGYLGAISDRSKVLYFNRQTVGQYQMAELNKNPNMSLRNMVFYRQDYLDEFNVIWEKQAEFHKELTPELKKEIRDIIIFYQRRLKSQKGLISFCEFENREVVVEKEGKKQTKIIGCKVIPRSHPLFQEFKIWQTLNNIEVFVGEKKGKRKKSNVSSDLFGDTEDALITEGRRFLYQEEKKILAKELSIKKGLTKAEILRLLFENPQELDINFKQIDGNQTGFALFSAYSNMIEKYGYEPLDFKKPAEDLISQLKTVFTDLGWNTDLLFIDLDKENKEWEKQPYFRLWHLLYSFEGDNTPTGNGKLIEKIMQLCGIEKEYAIELANVSLQDDYGSLSAKAIKKILLYLKEGNQYDMACEYAGYRHSKSSLTKEEIENKVLKDKLEILPKNSLRNPVVEKILNQMVNVINTVMEVYGRPDEIRVELARELKKSAKEREELTKAVAKNTREHEEIRKVLQSEFGMINVSRNDIIRYKLYEELKDNGYKTLYSNQYIPREKLFSKEIDIEHIIPQSRLFDDSLSNKTLEYKSINIEKGNKTAYDFVKEKYGEEGLQQYLNRCENLCKDKKAKLRKLKMELNEIPDGFIDRDLRNTQYIAKKALSMLTEICRRVVATTGSITDKLREDWQLVDVMKELNLPKYEALGLVEVYEDKDGRKIKRIKDWTKRNDHRHHAMDALTVAFTKDVFIQYFNNKNAAWESDSKEHTNIVGIKTRYFESGKAVPPIPLGQFRVEAKCHLENLLVSIKAKNKVVTTNVNCIKKKGGTYKNTQQTPRGQLHLETIYGSHNQYVTKIEKVNASFDAVKIATVSKQDYRNALLKRLEVFGNDPKKAFTGKNSLEKNPIYLDRAQTIQVPDKVQTVELETAYTIRKPVDPTLNVDKVVDKKIRLILEQRLKEYGGDAKKAFVNLDENPIWLNEEKGISIKRVTIRGISKAQALHDKKDKDGNFILDGTGKRIPVDFVNTGNNHHVAIYRKPVLDKKGQVIFDDEGNPMYELDEDVVPFFEAVTRANLGIPIIDKDYKKSEGWQFLFSMKQNEYFVFPNEKTGFNPKEVDLLDPDNYAMISPNLFRVQKISTKNYMFRHHLETTVIDNKSLRKIAWELIQAPNKLVDIVKVRINHIGQIVSVGEY

SEQ ID NO: 16981 - protein, 1039 aa, unidentified
  REGION 1..1039: note = Cas Enzyme sequence
VERIFGFDIGTTSIGFAVIDHDPEAETGQIHRLGVRVFPEVRDPDGTPLNQTRRQKRMARRQLRRRRQRRRLLNEILTGAGLLPAYSSDTWPTVMALEPYGLRQRGLEEALSPHEVGRALYHLAKRRHFRGRELEDEEEEAAADAEEKAAKNDRDSTLQALKRENKTLGAWLAERNPHERRRRGVPAHRSVVEEEFEKLWAAQAQYHAVLRNADLRARIHDAIFAQRPVFWRKKTLGKCRFLPGEPLCPKGSWLSQQRRMLEKLNNLTLAGGNARELDPEERAAILERLQTQAWMTWGGVRAALKPLFRKRGEAGAEKGLRFNLELGGESRLLGNAVEAKLAAVFGDAWDDHPQKQAIRDTVPLCLWQADYGEIGDQRVVILSAEQRRARREAAAQQFIRDFGISAEQAEKLKELTFPSGWEPYSSKALLQFLPHLEAGVRFGTLVNGPEWEGWRNQTFPSRQQPTGELLDRLPSPTKKNVEERERIARLRNPTVVRTQNELRKVVNNLIGAFGKPDQIRIELARDVGLSKRERKEKQSVIRWNERRREKAARDLRSNGIAEPARAVVEKWLLWKESGERCPYTGDQIGFDALFRTGDFEVEHIWPRSRCFDDGFRNKTLCRRDINLEKGNRTPFEYLGHDGERWDAIKRRLDGMVAKKGGEGMPAGKVKRFLAETMPEDFASRQLNDTGYAAREAMAMLKRLWSDIGVHAPVHVQAVSGRVTAQLRGLWGLNNILSDDGNKTRDDHRHHAIDALTVACTHPGMTNRLSRYWQAKDRPRAEKPNLPPPWPTIRADARAAVDAIVVSHRVRRKVSGPLHKETVYGDTKEDVTTQTSTYRWFVTRKRVEALSGRKLDNIRDGRVRNIVKDWVDKHGGEPKKAFPTYPRIGEDGPEIRKVRLRSKRQVALMAEVSTGYADLGSNHHMAIYRRPNGEAVFEVVSLFEATRRLARREPVVRRTREDGAVFVMSLAPGETIKFPQGEREGLWIVTEIWADGRAILELHTDADHQTKFHPNANSILKSGCTKVSVDPIGRIRPAND

SEQ ID NO: 16982 - protein, 1126 aa, unidentified
  REGION 1..1126: note = Cas Enzyme sequence
MGLAPTDQAELQRWIADDPYALRAKALDHELSRWELGRALFHLTQRRGFLSNRKGAAKEDGTIFEGKKGSSIIPINLTQESMEGFRTLGEYLHSISFKPGEASDASRPRLRNRYTLRSMYLTEFEAIWERQQEFHPELGPDIKRELGDPEKGILFFQRPLRSQKSLIGKCTFERGRAKDPVLDKWVESGKPRCPISHPDFERFRTWQFINSLRAGGEKLSHTDRTTLFEEFLRKDGELTIKDLAKKLKHLSDKKFNYEDNDKRPGCKTIARLSGLMGQQAWDAGGPEKQHELWHAFFSIQNEEQLEKYILGKGGLSSLRWKEFCYPKKTKKDDGKPQRKRTLQLEDGYANLSLKAIRNILPFLEEGYEYDHAVMMGGIRNAFGAKAWDALSDEQQKDLKDACFRFRKEVPDRETGEIRKPQEGEVIRELRDYLRTSYKLSHKAVGKLYHHSQHQRASGTAAELPQVPNLRNPIVQKALGQARKVVGELVKRYGRPAQINVELAREIKVSAKVREKMELENRDREKLNAEARKVVREYGLAPSRENIQKYLLFKEIDRKSEGSIVTPYSMDGKAINLDKLFSRDSSIQIEHIVPRSVSLDDSLANKTLCEANINRAKGNKTPFEFYTSIGADWKSIQKRAFQLLPYPKAKRFVSETKLGLDDFISRQLNDTRYISKAAAAFLKEICPKVQVSSGGVTARLRKIWGLEAILGGNILLEEPWNEAEEGEYLAWVSQGKVLELIAVDDPDYKKKNEQFLKQGAALRGYVKNQRFIPEKNRDDHRHHAVDAIAVACVKPQHVQLLAKISSHDDSSQPKPEFKALDPWEGFFHQAKERVQKILVSHEIRDKVFQKDRKKVRKDGKVILSEGVSARGQLHLESVYGKRSVFGEEAFHLRKPLESITKAAQVNKIVDPAIRRVVEQAILRAHPAIKLDDKYDVPKDAFFATDPKTGAKRPKVFLRSQNGIDIPILKVRIKENLGNARPVNPKATQWVNPKNNHHAAIYKGTDDKLIDEVVSFWDATQRMRDGKPAILKVKPDGSRLVAAFQANEMFLLGVPDREIEQVLESPVLLAKHLYRVQKMSDSYYVFRLHKAATIENDSEMVRIQSMKAWQEHNPVKLRMDVLGKLVRD

SEQ ID NO: 16983 - protein, 1108 aa, unidentified
  REGION 1..1108: note = Cas Enzyme sequence
MKYILALDIGIASVGWAVLDKESETVIEAGSNIFPEASAADNQLRRDMRGSKRNNRRLKTRINDFIKLWENNNLSIPQFKSTEIVGLKVHAITEEITLDELYLILYSYLKHRGISYLEDALDDTVSGSSAYANGLKLNAKELETHYPCEIQQERLNTIGKYRGQSQIINDNGEVLDLSNVFTIGAYRKEIQKVFEIQKKYHPELTDEFCDGYMLIFNRKRKYYEGPGNEKSRTDYGRFTTKLDADGNYITEDSIFEKLIGKCSVYPDELRAAAASYTAQEYNVLNDLNNLTINGRKLEENEKHEIVERIKSSNTINMRKIISDCMGENIDDFAGARIDKSGKEIFHKFEVYNKMRKALLEIGIDISNYSREELDEIGYIMTINTDKEAMMEAFQKSWIDLSDDVKQCLINMRKTNGALFNKWQSFSLKIMNELIPEMYAQPKEQMTLLTEMGVTKGTQEEFAGLKYIPVDVVSEDIFNPVVRRSVRISFKILNAVLKKYKALDTIVIEMPRDRNSEEQKKRINDSQKLNEKEMEYIEKNLAVTYGIKLSPSDFSSQKQLPLKLKLWNEQDGICLYSGKTINPNDIINNPQLFEIDHIIPRSISFDDARSNKVLVYRSENQKKGNQTPYYYLTHSHGEWSFEQYKATVMNLSKKKEYAISRKKIQNLLYSEDITKMDVLKGFINRNINDTSYASRLVLNTIQNFFMANDADTKVKVIKGSYTHQMRCNLKLDKNRDESYSHHAVDAMLIGYSELGYEAYHKLQGEFIDFETGEILRKDMWDENMSDEVYADYLYGKKWANIRNEVVKAEKNVKYWHYVMRKSNRGLCNQTIRGTREYDGKQYKINKLDIRTKEGIKVFAKLAFSKKDSDRERLLVYLNDRRTFDDLCKIYEDYSDAANPFVQYEKETGDIVRKYSKKHNGPRIDKLKYKDGEVGACIDISHKYGFEKGSKKVILESLVPYRMDVYYKEENHSYYLVGVKQSDIKFEKGRNVIDEEAYARILVNEKMIQPGQSRADLENLGFKFKLSFYKNDIIEYEKDGKIYTERLVSRTMPKKRNYIETKPIDRDKHEDSKDGRKRIGLSETKLVKKIRTDILGNKYSCSEEKFTSFC

SEQ ID NO: 16984 - protein, 1108 aa, unidentified
  REGION 1..1108: note = Cas Enzyme sequence
MKYILALDIGIASVGWAVLDKESETVIEAGSNIFPEASAADNQLRRDMRGAKRNNRRLKTRINDFIKLWEKNNLSIPQFKSTEIVGLKVHAITEEITLDELYLILYSYLKHRGISYLEDALDDTVSGSSAYANGLKLNARELETHYPCEIQQERLNTIGKYRGQSQIINDNGEVLDLSNVFTIGAYRKEIQRVFEIQKKYHPELTDEFCDGYMLIFNRKRKYYEGPGNEKSRTDYGRFTTKLNANGNYITEDNIFEKLIGKCSVYPDELRAAAASYTAQEYNLLNDLNNLTINGRKLEENEKHEIVERIKSSNTINMRKIISDCMGENIDDFAGARIDKSGKEIFHKFEIYNKMRKALLEIGIDISNYSREELDEIGYIMTINTDKEAMMEAFQKSWIDLSDDVKQCLINMRKTNGALFNKWQSFSLKIMNELIPEMYAQPKEQMTLLTEMGVTKGTQEEFAGLKYIPVDVVSEDIFNPVVRRSVRISFKILNAVLKKYKALDTIVIEMPRDRNSEEQKKRINDSQKLNEKEMEYIEKKLAVTYGIKLSPSDFSSQKQLSLKLKLWNEQDGICLYSGKTIDPNDIINNPQLFEIDHIIPRSISFDDARSNKVLVYRSENQKKGNQTPYYYLTHSHSEWSFEQYKATVMNLSKKKEYAISRKKIQNLLYSEDITKMDVLKGFINRNINDTSYASRLVLNTIQNFFMANDADTKVKVIKGSYTHQMRCNLKLDKNRDESYSHHAVDAMLIGYSELGYEAYHKLQGEFIDFETGEILRKDMWDENMSDEVYADYLYGKKWANIRNEVVKAEKNVKYWHYVMRKSNRGLCNQTIRGTREYDGKQYKINKLDIRTKEGIKVFAKLAFSKKDSDRERLLVYLNDRRTFDDLCKIYEDYSDAANPFVQYEKETGDIVRKYSKKHNGPRIDKLKYKDGEVGACIDISHKYGFEKGSKKVILESLVPYRMDVYYKEENHSYYLVGVKQSDIKFEKGRNVIDEEAYARILVNEKMIQTGQSRADLENLGFKFKLSFYKNDIIEYEKDGKIYTERLVSRTMPKKRNYIETKPIDRDKHENSKDGRKRIGLSETKLVKKIRTDILGNKYSCSEEKFTSFC

SEQ ID NO: 16985 - protein, 1108 aa, unidentified
  REGION 1..1108: note = Cas Enzyme sequence
MKYILALDIGIASVGWAVLDKESETVIEAGANIFPEASAADNQLRRDMRGAKRNNRRLKTRINDFIKLWEKNNLSIPQFKSTEIVGLKVRAITEEITLDELYLILYSYLKHRGISYLEDALDDTVSGSSAYANGLKLNAKELETHYPCEIQQERLNTIGKYRGQSQIINDNGEVLDLSNVFTIGAYRKEIQRVFEIQKKYHPELTDEFCDGYMLIFNRKRKYYEGPGNEKSRTDYGRFTTKLDANGNYITEDNIFEKLIGKCSVYPDELRAAAASYTAQEYNVLNDLNNLTINGRKLEENEKHEIVERIKSSNTINMRKIISDCMGENIDDFAGARIDKSGKEIFHKFEVYNKMRKALLEIGIDISNYSREELDEIGYIMTINTDKEAMMEAFQKSWIDLSDDVKQCLINMRKTNGALFNKWQSFSLKIMNELIPEMYAQPKEQMTLLTEMGVTKGTQEEFAGLKYIPVDVVSEDIFNPVVRRSVRISFKILNAVLKKYKALDTIVIEMPRDRNSEEQKKRINDSQKLNEKEMEYIEKKLAVTYGIKLSPSDFSSQKQLSLKLKLWNEQDGICLYSGKTIDPNDIINNPQLFEIDHIIPRSISFDDARSNKVLVYRSENQKKGNQTPYYYLTHSHSEWSFEQYKATVMNLSKKKEYAISRKKIQNLLYSDDITKMDVLKGFINRNINDTSYASRLVLNTIQNFFMANDADTKVKVIKGSYTHQMRCNLKLDKNRDESYSHHAVDAMLIGYSELGYEAYHKLQGEFIDFETGEILRKDMWDENMSDEVYADYLYGKKWANIRNEVVKAEKNVKYWHYVMRKSNRGLCNQTIRGTREYDGKQYKINKLDIRTKEGIKVFAKLAFSKKDSDRERLLVYLNDRRTFDDLCKIYEDYSDAANPFVQYEKETGDIVRKYSKKHNGPRIDKLKYKDGEVGACIDISHKYGFEKGSKKVILESLVPYRMDVYYKEENHSYYLVGVKQSDIKFEKGRNVIDEEAYARILVNEKMIQPGQSRADLENLGFKFKLSFYKNDIIEYEKDGKIYTERLVSRTMPKKRNYIETKPIDRDKHEDSKDGRKTIGLSKTKLVKKIRTDILGNKHSCSEEKFTSFC

SEQ ID NO: 16986 - protein, 1108 aa, unidentified
  REGION 1..1108: note = Cas Enzyme sequence
MKYILALDIGIASVGWAVLDKESETVIEAGSNIFPEASAADNQLRRDMRGAKRNNRRLKTRINDFIKLWENNNLSIPQFKSTEIVGLKVHAITEEITLDELYLILYSYLKHRGISYLEDALDDTVSGSSAYANGLKLNAKELETHYPCEIQQERLNTIGKYRGQSQIINDNGEVLDLSNVFTIGAYRKEIQKVFEIQKKYHPELTDEFCDGYMLIFNRKRKYYEGPGNEKSRTDYGRFTTKLDADGNYITEDSIFEKLIGKCSVYPDELRAAAASYTAQEYNVLNDLNNLTINGRKLEENEKHEIVERIKSSNTINMRKIISDCMGENIDDFAGARIDKSGKEIFHKFEVYNKMRKALLEIGIDISNYSREELDEIGYIMTINTDKEAMMEAFQKSWIDLSDDVKQCLINMRKTNGALFNKWQSFSLKIMNELIPEMYAQPKEQMTLLTEMGVTKGTQEEFAGLKYIPVDVVSEDIFNPVVRRSVRISFKILNAVLKKYKALDTIVIEMPRDRNSEEQKKRINDSQKLNEKEMEYIEKNLAVTYGIKLSPSDFSSQKQLPLKLKLWNEQDGICLYSGKTINPNDIINNPQLFEIDHIIPRSISFDDARSNKVLVYRSENQKKGNQTPYYYLTHSHGEWSFEQYKATVMNLSKKKEYAISRKKIQNLLYSEDITKMDVLKGFINRNINDTSYASRLVLNTIQNFFMANDADTKVKVIKGSYTHQMRCNLKLDKNRDESYSHHAVDAMLIGYSELGYEAYHKLQGEFIDFETGEILRKDMWDENMSDEVYADYLYGKKWANIRNEVVKAEKNVKYWHYVMRKSNRGLCNQTIRGTREYDGKQYKINKLDIRTKEGIKVFAKLAFSKKDSDRERLLVYLNDRRTFDDLCKIYEDYSDAANPFVQYEKETGDIVRKYSKKHNGPRIDKLKYKDGEVGACIDISHKYGFEKGSKKVILESLVPYRMDVYYKEENHSYYLVGVKQSDIKFEKGRNVIDEEAYARILVNEKMIQPGQSRADLENLGFKFKLSFYKNDIIEYEKDGKIYTERLVSRTMPKKRNYIETKPIDRDKHEDSKDGRKRIGLSETKLVKKIRTDILGNKYSCSEEKFTSFC

SEQ ID NO: 16987 - protein, 1219 aa, unidentified
  REGION 1..1219: note = Cas Enzyme sequence
VSLVVSVVMKTKTSRKDENFMENGFTYRLGLDIGIASVGAAVVQTNSFDNPCHLTEPDVRTFPAAECRENGKYYGKSAAVPRRECRSTRRRIKRKQLRMNCIKQTLQKAGLIDVDEFMKRYSDGTLPNVYQLRYEGLDRLLIDDEFAQILIHIAKHRGFLSTRRADKKDKESGAILAATSANQKLMMEKGYRTVGEMMYLDESFHTPCSSNEQGFIVTPRNKAKDYKHTIYRSMLVDEVHAIFDAQRKFGSTKATETLESEYLEIMTRQRSYDLGPGLQADGTKSPFAMDGYKSNAGECTFYKEETRAAKGTYTAELSITLQKINNLKLVDRYGDGRFLTDEEKQKILEYISKHKTMKYKTVKTLLGIDPMIRFNLLNYGKKKKTKKESEDKTKDDSTKKKGTKKSKTKAETGEKTDKDIVTLGSNHEALASREPFVVNQAHSGSLDPRVLDSNKEETELERINRIEDTVFVSMEFTLSYTDCLKTRIKTLSETEKRDLFDEVGELLTSYKTDAARIEKLSNLGLTSEEIDHLLDLNPKGYARLSHKAMKEIEPYLVQGLTYDKACAAAGLDFQVTYTGEKMKYLKGPEINNIINNIQSPVVRRSVAQTVRIINAIIRKYGSPQAVNVELSREMSKSFLERKKAETAMELRHKENVKFCEEIKKLGINSPNGEDITRYRLWKDQNGICLYSGEKIPTRAMFTREYEIDHIIPYSISLDDRYQNKVLVKAKENQTKGNRLPYEYFGHDKTRWAAYENRVESLIKSDGKKAHLLKKNYTKEDQREFTERNLNDTRYATTVVYNMILQYLYLEPYNCDGKTKQVYAVNGAVTAYLRKRWGLNKKDRTNDRHHAMDAVVIACCTDEMIAKVTKYMQDRETAYSKNFRIADEETGEILTRSNFTREQYDEAYGVRFPVPWETFREEIDLRIFNDDPFGYLMKDRNLQIKIDYPDWMYGEEESPVAKGKYINYIRPMFVSVACSHKATGRAHEETIRSAKYHDSDSLVISKKALKDLKLDKDNEIKDYYNKECDPLLYEALRNRLLEYNGDGKKAFAEEFHKPKADGSDGPVVKSVKVIEKKTTGVQINHGLAGNGNMVRVDLYQKEGKYYAVPIYISDMVKKEIPRKAATGGKQYKDWRVMNPDDFLFSVYPRDLLHLKKWKPFNDGLSNDIYMYFAGLDPASASFAVTAHDSSISLRGIGIQNLELIEKCQVDMLGEIHVCRQ

SEQ ID NO: 16988 - protein, 1151 aa, unidentified
  REGION 1..1151: note = Cas Enzyme sequence
VTNWNLGLDLGTNSLGYAAVEYADGSPERILFAGSIIHTGGQDRQESYKSKAGKARRSRNRYQQLRKNRKDMDRILRDNGFPSGEYVVEDAVDKLVVHDPFDVRAALADGHITDDETRELAVSCAVRHMQQRRGQRNSWVSEAFVKDEATQGYSEMYQALRQRCSELSGEFYGELTPAQLISRTRKAVGAVSTKALAVDFFKDLEASESPKAKDTLDERLSKRRGKLKNDKDRIAFDKQAHRLNTYLTRQGLRRSDFIRELNVIAEVQKLDKDFVNAAASLIIFQEHPGKGVKERVGQDELPLEGKREPRAQRSSLVFQEFRIATTVANLRHVNGEPLSADDRKTVKDFLNTWDDTESLPTWTDVSEQIGVPRVKGHDDLSRPPVNQTLLTVLKSGGVVRDFWTGAGTSDAHRQALLDSISHERVLDISDTTDFLVQKWINTLNEEDILTFDKLKFEPGRAAHSATTMRSLLEHMNNTNCDEHIARREVFGVPDGWRPAPNPLGTTVGNPTVDANIRLVKRVFDKLVFEIGSKPQRVVIESTRDITSSPSTREQTHRDNAKRKSDNDKMLANLMHTYKATDGDVRTRAGKMRLIILTEQNGACLYCGDTLTRSAMEIDHIVPRSRGGGSNRLNLAGVCRGCNHSKGNTPFVEWAGGIKSDVFTSAAARIKTMTLRGPARQQSKWKKTYLAQLKTSEADRPIESLSWAAVEVKNQIAGVLDDPSNALLVSGRISSSVRKMGKIDTEKDPLLLRVPNTEPKGKSRVDRRHHAVDAAVLTTLRQRNITVLSERNILREEASLNAVTNGDTIALPDVVWFEEGKRHQGQWRDYSGATAADRLSFAKLKGNLDTLRELLRDAVGDGTVTVTSPVRWTPRTGGIHEETVRPLNRIRLGDAIPADVIDRASSPQLWTALTRLTDYDPKSGLPADDSRTIRVKEDIIGPDDDVTYFPGNGGALALRGGYADAPTIHHFRVAVTTTPRGQKKYHVIRVYQFDAARLHQTGKNVFSTPLDSSTLSMRDAGLSARAAFHNSEWKVIVPGDELVFTPEQIRESSVTALRSMSELFPDETEYRYRVTSFGGDRPIFTNTVVSVGDVKALFPKVDGDDQFPPLIKSILSETKSVISGLEGVRVDRRDILGQDRNSGSVMLRSYVL

SEQ ID NO: 16989 - protein, 1030 aa, unidentified
  REGION 1..1030: note = Cas Enzyme sequence
MRHFLGLDIGVQGIGLAVVPQNAADFEKLALGVHLFEGGTDGDVEKGKDESRNLVRRSARALRRAYRRRSQRMIRLSNELKRLGLLPSCRMHVPEERNAMLETLDQSLSGIFLVGDRRQAHLLPYILRTRGLDQKLQEHAVGRALYHLAIRRGFLSNRKAVEDEKEEGVVKEGISKLEKEIEESGSRTLGEYFSTLDPEETRIRTHWTSRKMHETEFELFWESQAQYHPAMTPEAKKRVHRAIFFQRPLRSQRFLLGKCQLEPNRHRAPMACLEIQRFRYWQKIMDLTYTVGKDFTEISLTREQQDILANALENRGKLTFTEIRKLFRMKKTVTFNLENGGEKQIRGNTTSFRLANALPDRWPKMTEREKGLLVNEILQYQSVSGLEKRLQSFCRFTPEEAKAVASTQLEPGYASLSRRAAGKLLKKMQEERLHFKEAEKALYGSPLKEEPVCDFLPPLCAERGAVLTNPVVTRVLTELRKVVNAVIRKYGKPERIVIELARDMKRSKKERAQISEKMRAQEKEREKAKKRIFEELGIQEPSRNDILKWLLAEECGWLCPFTGNEITPANLLGPNPQFDIEHILPFSRSLDDSFMNKTLCDVYANRHVKKNQTPFEAYGHDEENFRKILIRVQNSNMPKAKKERFTMESIPEDFKSRMLNDTRYASKLAVSYLGKLYGGKIEIVDETGKTKQRIFSCTGQATAWLRQEWGLNSILNDGGDEKNRTDHRHHAVDALAIAFCNSEIVRQFAHAAEVAEQYGVSRRFARGEVDQPRANFLEIVRKAVERINVSHRPNRKISGALHEETNYSKPHRVPNSKSETTRHKRIQLPNLKEKDIPNIVDGAIRRIVAAKLSEIGDAKKFADEKNLPYREVTTKTGETYRIPIRAVRIRASVTTQTIGRGPSLRHVKTGSNHHMEVYAELDANGNEIKWKAKVVTMFEAYQRRKLGLPIVVRDHGEGTRFKFSLFKNDFLLKTEEDGSQTLYRVFKMAQSGQIGWGKHTDARPAKEVTDRTPGNAPSINALRGKVIKVR

SEQ ID NO: 16990 - protein, 1071 aa, unidentified
  REGION 1..1071: note = Cas Enzyme sequence
VALPKLSFTFSIDEKSELGIHLDVGHDSIGWCVTRTFPGNERFLAIPGTGVVLFPADDCLANSRRAFRRQRRHIRATRQRIARMKSMILALGIMTEAELSKNLTAAPWKLAAEALSCGKLLSWPELWCVLRWYAHNRGYDGNILASAKNRQEGDAEDIKKNAASHDMMAKFGTSTMAETMCRFLGVDPHGDKISSREYFKGNKVSFDRSVVVNEVTRILEGHKGKLQGLTDDFIHTLVADPLTDKNFLRFQPGLPFRIQNRYWGGVLFGQLAPRFDNRIIGNCPVSGKKLPSKSSAEFLAFRWAMMLANVRVGDDGRGLTPDEIARLNKEVARVGGFSKGEFKKLLKDVTGESVGNVDALLTTPEADASLVRFPGVYALAKRGLRGVLDDKTFRKLANTLFRGKRLTIAKIAASVEDDATRNSILALSDPKLQKGKGKKKSREVLLSEFIKADLPTGRAPFAKDVMVEAVKAVCSGKDPREKGGILYRDCTNEDVIKEQDIDKETNNHLIRHRVKILLRLLKDIVHDYAENNPAQVAQITIEMARDLKDLSGMTNKQIESDMRDRTRQHQVAAKKIAKHLGIEERLVSPGLIRKVRIAEDMGWKCPYTGVAYDIQDIVSKSDGEPGCVDKDHVLPRSERATDSLDSLVLTYREVNEMKGSRTGLQFVRECAGMRVPGRSNLVIQGESAYKSFVDGLKVFGHDDDRKRQKRRKQNLLRLKSEDAGMTEGMLTRTSYITTMAMKAIRGYFAGCGRMPEIVAIPGRVTAMLRNQWNVMGILAEVDERVKDETGRLRLKQEIRGITHMHHAVDAITLGLAATFIPRNGTFWATMCKRRVKNEEKEMLGSTGIFRFSAHNEPQLVELPLYVRSAIRDALAEQRVVVHQPQEKAGLKVLQNTWGVERVEGDSVVIRQRARDEKTGAITIKRDRVSIGKTFGLNPTRGEGKLKAIKGVLLPEVNYGVALTQEPIVIRHQMVWGAIAALKNANGGKMPQLLRRGDIIRIAAGGYAGVWRVASIKDNHNGISIDVIKPNAVKIASGVSYAKINVLVATLMKNGLEVLKPRYTGIALCHTT

SEQ ID NO: 16991 - protein, 947 aa, unidentified
  REGION 1..947: note = Cas Enzyme sequence
TKQNGTIPYQVQQNELDLIIANQAKYYPWLAEKNPVKKRQGAFPYKLDELVGFRVPYYVGPMVTAEDQKKGSEANFAWMVRKESGAITPWNFEEKVNKDASANAFIQRMKTTDTYLIGEDVLPQQSLIYQRFMVLNELNRIHVNGQLIDVKQKQRLFERLFKKKKTISVKDIQRNLVLAGKCKVEPEITGLADPQKFNSSFSTYIDLAKIIPTELDDDSKQSDIEKIIMWSTIFEDTEIFKSKLQEINWLTENQRKLLSHIRYRGWGNLSKRLLTEFKDQNGSSIIESLWSTSQTFMMLKSQSDFAAQIQAANSQNLMPQDLQATIDDLYTSPQNKKAIRQVMLVLADIKDAMHGQNPDWIFIEAARGGGKKGQRTHSRAAQILNLYQGTAKEIIDTKVKAELQEKIKNKVNFSDRLVLYFMQNGTDIYTGEPLNIDQLSSYDIDHILPQSLIKDDSLDNRVLTGAVINREKNDDFASKRFPKMMWQWQQWHKMGLISNRKLKHLLMKPTDIDHFATGFINRQLVETRQVIKLITKLLDAQYPDASIVSVKANLTHQFRTVFDFPKIREVNNYHHAFDAYLTAFIGTYLLKRYPKLERFFVYGKFSKQPITMKQFNVIRALEKTKTPIIAEATGEILWDKVSDLQMMAKIYNFKQILVTHEVYENHAAMFKQTIFKAKNDKNKKLIPKKNSFDTSLYGGYTTTQIAYLAIVRVHKKDSEYQVIGVPTMWMGKLKDMQSRGMTAKAALTTALASRFSKLDKRTKKIVVSHYEVVLPEVGHDQVVQDVFAGKMHQFALEGETHFHNNHELVLPLGIQRKYMNTKASLEDQDDNLIAVFDATLQQVNQYFQLYENRSFRKKLNDSRDKFVKLETLDQPGNNKPILGKRGVLKEIFKGLHAKQATNDLSRIGIANFGVLMLSGGIKLTESARIVYQSPTGLFKRIVPLKKM

SEQ ID NO: 16992 - protein, 940 aa, unidentified
  REGION 1..940: note = Cas Enzyme sequence
PYQVQQNELDLIIANQAKYYPWLAEKNPVKKRQGAFPYKLDELVGFRVPYYVGPMVTAEDQKKGSEANFAWMVRKESGAITPWNFEEKVNKDASANAFIQRMKTTDTYLIGEDVLPQQSLIYQRFMVLNELNRIHVNGQLIDVKQKQRLFERLFKKKKTISVKDIQRNLVLAGKCKVEPEITGLADPQKFNSSFSTYIDLAKIIPTELDDDSKQSDIEKIIMWSTIFEDTEIFKSKLQEINWLTENQRKLLSHIRYRGWGNLSKRLLTEFKDQNGSSIIESLWSTSQTFMMLKSQSDFAAQIQAANSQNLMPQDLQATIDDLYTSPQNKKAIRQVMLVLADIKDAMHGQNPDWIFIEAARGGGKKGQRTHSRAAQILNLYQGTAKEIIDTKVKAELQEKIKNKVNFSDRLVLYFMQNGTDIYTGEPLNIDQLSSYDIDHILPQSLIKDDSLDNRVLTGAVINREKNDDFASKRFPKMMWQWQQWHKMGLISNRKLKHLLMKPTDIDHFATGFINRQLVETRQVIKLITKLLDAQYPDASIVSVKANLTHQFRTVFDFPKIREVNNYHHAFDAYLTAFIGTYLLKRYPKLERFFVYGKFSKQPITMKQFNVIRALEKTKTPIIAEATGEILWDKVSDLQMMAKIYNFKQILVTHEVYENHAAMFKQTIFKAKNDKNKKLIPKKNSFDTSLYGGYTTTQIAYLAIVRVHKKDSEYQVIGVPTMWMGKLKDMQSRGMTAKAALTTALASRFSKLDKRTKKIVVSHYEVVLPEVGHDQVVQDVFAGKMHQFALEGETHFHNNHELVLPLGIQRKYMNTKASLEDQDDNLIAVFDATLQQVNQYFQLYENRSFRKKLNDSRDKFVKLETLDQPGNNKPILGKRGVLKEIFKGLHAKQATNDLSRIGIANFGVLMLSGGIKLTESARIVYQSPTGLFKRIVPLKKM

SEQ ID NO: 16993 - protein, 1096 aa, unidentified
  REGION 1..1096: note = Cas Enzyme sequence
MKYRIGIDVGEKSVGFAAVEYDDNGAPIKILSAVSHIHDGGMDPETAKSPLSRIATAGVARRARRLVRNRRRRLQRLDVLLNDLGFVLPQAEVPQTHDAWVVRSKLSREFEPNEQVRNHELLLAIRHIARHRGWRNPWWTWRRLEEAPVPSENFAAMLVDANERFGSRVAGCATLGQLVHSIASSGAPIRRTKKTEGTGNSPLMSRQIMQEDSLSELRLILATQKLSSEDSDKICAEVFSQEKPHIPEGRIGRCSLDPNELRAPLAALEFQEFRIRAVVANLRLGRSGTKLSDEQHDLVVNFLTNWSSSDRPRWADVAELLGVTSRELRQPSIDSEGGGAAPCNRTVLTIEKHFKEKSAVRQWWKTASQNDRSEFVAIVTDLTGVDVEPSSESLAEFMTTWDETIQESIDKLDLESGRAAYSRATLSKLNAVMRESRCDVHTARKVAFGVADDWQPPKPTFNDPIEHPTVGRVNVLVRRYLSTASQKWGAPESVIIEHVRGAFMGPTALRELENEIKNNTRRRDEIKTRIVAQGVENPTNTDVMRHELIERQNGTCLYCGTSIGMKSCELDHIIPRATGGGNRRDNLVAVCRECNGEKDKLPFVEFAKSCTRPGVSLEEALSRVRNWEKGRMTFDQSKRLKRDVSKRLAMSADEVEEVRSIESTAYAAREMRQRVESFLGITSSSVPDETESRVFVFQGLITSEARKAGGVDDQLRLRSFTRKSRFDRRHHAIDAAVITTLDASVARILKDRAEMQSVQRMTGHEPGWKDFKGRTPEQQKRFAIWESQIGELANLLVSAIAKDKVAVVRPLRLVPRVGSVHKDTVSKLISKPINDEFTEDELLRIVNARVLEKLLPLANVKGGLDASADRKSQLGLKTDEIQLFAERAAAIPVRGGSAEIGSTVQHARVYAWKTPKGFSYGMVRMFTGEFARIGFLKAGIDIFSEPMPVTSQAMLRADSTLRKKIESGEAKQIGWITVGDEIEINVEAHKNAGGNLGEFLKVISDERWTITGFFTTKQISIAPRLLASEGIDEEGTPQLIKQVLFANRIPMSINVIFGQSNFAVIRRSILGTVRWTGAGAPVSWVPEVEARKAFGE

SEQ ID NO: 16994 - protein, 973 aa, unidentified
  REGION 1..973: note = Cas Enzyme sequence
VTGEFLNTTKDFENLFEFLNNRREVDQKSLLRHLKLSEKTHRWNFVEDKKYPCNETRAMISSRLEKVENISQDFLTRETEQKIWHIIYSVNDKTEYEKALKSFAAKNNLDENAFLEAFRKFPPFKSEYGSFSEKAIKKLLSLMRLGKYWTYENIDHGSRDRIHKIITGEYDADIKDKVREKAIHLTTENDFQGLQLWLAQYVIYGRHSEASMTGKWNSPDDLEEFLREFKQHSLRNPIVEQVITETLRMVKDIWMKYGGGTKDFFSEIHIELGREMKNTAEDRKQITGVVTENENTNLRIKALLAEMMNDGSVENVRPYSPMQQEILKIYEDGILKSDIDIEDDILKISKTAQPSPSDLKRYKLWLEQKYKSPYTGQIIPLNKLFTPEYEIEHIIPQSRYFDDSFSNKIICESAVNKLKDNYIGLGFIRQFGGTVIELGLGKRVTVFKVDEYEDFVKKHYAHNRSKRTKLLLEEIPEKMIERQLNDTRHISKYISGVLSHIVRVEDGTDEGINSKNIVPGNGKITTRLKQDWGLNDIWNDLILPRFERMNTLTDSTDFTSWNENHRKLLPTVPVEFSKGFSKKRIDHRHHALDALVIACATRDHVNLLNNQSAKSDTRRYDLKKKLMSFERAVYHHPHTGNIVEREISKHFLKPWDHFTVDAKNSLEKIIVSFKQNLRVINKATNYYEKYVEKDGVKSKEKVEQTGTNWAIRKPMHKETVSGKIDLPWVKVPKGKILTATRKSLDSSFDLKSINSVTDTGIQKILRNYLNGKGSPELAFSPEGIEDLNKNIEKYNDGKPHQPINKVRVFETGSKFSLGQSGNKKDKYVEAAKGTNLFFAVYEDKNRKRSYKTIPLNEVIERQKQGLSVVELKGPGDFYLCPNDLVYVPLEDELEYVNHIDFKNLTPEQSGRIYKVISFSGSQIFFLRQDIATSIVNKKEFSTLNKMERSMDGLMIKEHCLKLKVDRLGNIIKV

SEQ ID NO: 16995 - protein, 927 aa, unidentified
  REGION 1..927: note = Cas Enzyme sequence
MRQRVMEKTGEVLDENITPGQAMARTALSTMVPMRGPNGVLGKLHQTDNANEIRRICEQQGISAEECKELILAVFASESPRGSASKRVASDPLPGQGAHKRAPKCDPEFQRFRIISVVANLRIAKSEKAARPLSPDERRRVVDFLLESTSEDLAWTDIAKFLGIRRQNLRGTATTTADGERASAQPPTDATNRIMSSCSIKTLRSWWKRADADRRSAMVRYLYEGAEDSECATFLGNLPEKEQGKLDSLHLPAGRAAYSPDSLARLNDQMLRTADDLHDARKHVFGVDDTWRPPAESIGAPVGNPSVDRTVKAVARFLNAVDDVWGTPDTIQIEHVRDGFMSERTAREIDRENNRRFKQNQDTVAEIQKIYGIQGEVHRSDVMRYTAVTQQDCACVYCGGTITYLSCQLDHIIPQAGIGSNNHRENLVAVCERCNRSKSNIPFAVWAEKCGIPGVSVEEAIARVRKWRNTQSGRAQTARLKKLQKDVIARLRRTDEDPAIDARSMESVSWMANELHHRVKAAYPSADVAVYRGSITAGARRAAGIDSRVNLLGERGRKDRLDRRHHAVDAAVIAMMTPGIAKTLGERSNLRWAERLSGGVETWKSFTGATPGARESFEAWRNRTLRLTELLNLALAEDRIHVTENLRLRLGSGKAHGEVQPLKLHQLGNGLTPAQIDRASSPALWCALTREPDFDIRKGLPASETRIIRVHGRRLTADDSASFFSKKSDDSKEKPFAAISVRGGFAEIGSTIHHARIYRINGRKPVYAMLRVFTQDLLPYRNSDLFSAPVPLQSISVRCAEPKLKTAISAGTATYLGWVVTGDELEVPMESFTTGTIGEFRKDFPTITRWRIRGFFSATRFRLRPSTLASEGLSDANDSVKKILTIPGWLISINGICSVHPTVARRDSLGRIRSSSSVNLPVSWTIL

SEQ ID NO: 16996 - protein, 1108 aa, unidentified
  REGION 1..1108: note = Cas Enzyme sequence
METVTNSRFWVGIDVGTNSVGCAAIEVDSDGMPIRILNGKVQVHDSGVDPQHAKTATTRLAVSGVARRTRRLVRRRRKRLINLDKQLKAWGWWSELTSNDPYFPWRVRARLVDELIEDASERQQLLAVALRHIARHRGWRNPWLRIESLFNPSEPSKFLTGFRERVETETGRYFDHDVTAAELAVAALKHDSSIPLRGGKTANLRAEKTFSFIGSKLEQSDNANEILRMAETQQLSIAQTEEIIRLVFAAESPRGSYIGRIGKDPLPGQGSKYRAAKASDSFQRYRIASLIANLRLKDGSSERPLNVRERNELFDYLMNVKAGANPQWLDVAEHMGWERSQLRGTATITADGERAAARPPVHNTNEKIGTCKVRTLKSWWPDASPEARDAVVAVLSDGLFDDDSAAGAEARELIESLTDEELVALDTIKLPPGRAAYSSDSLNRLTRRILEDGVDLHEARKLEFGVDDSWAPPAEPIGAPLGNPAVDRVLKIVARWLGAVEAEWGAPEKVVIEHVRSAFGSEAAAREHIRETERRFQQNQQQMRQLAESQGISGVVRRSDLFRYQAIVRQNGECLYCGTAIDYTTAEMDHIVPRAGIGSTNKRENLVAVCSRCNKSKSNTPFAAWAARTQLPGVSVPDAIERTNHWNSGPGETAKRHRDYVREVQARLRKTSEDEEFDGRSLESVAWMANSLRQRIEAHYRERFPAASTKVSVYQGRITAEARRASGIEKQIPFIGEAGKTRLDRRHHFVDAAVVTLLDESIARTLAERVNLRDSERNLHAPETWKDYTGSSERPQARFENWVERMQILLNLISSALNDDEIPVMEDLRLRLANGTAHKDTILPLVRMQVGDAMSLELIDRASTPALWMALTLDPDFDEKEGLPANPNRQIRVRDQHLGPYDEIGFFRKLTAAIAVRDGYAEIGSTIHHARVYRIDTGKKPKYAMLRVFTTDLIRHRNDDLFSAPLLPQSISMRTADKTLRKALAEGTATELGWIVVGDELELDMSSFTTGDIGDFLKEYPGTTRWKIDGLMAPTRLRLRPVILASEGLGEEPTKASKTILDRPGWLPYINSLWNVQELTVIRRDALGRERWSSAAGLPVSWRVENSV

SEQ ID NO: 16997 - protein, 1108 aa, unidentified; identical to SEQ ID NO: 16996
  REGION 1..1108: note = Cas Enzyme sequence

SEQ ID NO: 16998 - protein, 1096 aa, unidentified
  REGION 1..1096: note = Cas Enzyme sequence
MTTADVRVSADKKHYLVGIDVGSYSVGLSAVEVDEDRNPVGLLSAVSYIHDAGVDPTARKEAVTRRAVSGVARRTRRLYRRKRKRLVNLDRFIEKCGWPVVDNEAFDDPLLPWRARMALAEGFIEDDKQRALYLSIAMRHIARHRGWRNPYTKVQSLHSPQEHSDAFKAIREDVEKELGRPLPENATVAQVIGQLMVAGRRLRGEGGVISARLQQVDHALEINTICAKQRIPDDLRKQLMDMVFAAESPKGAASGRVGKDPLSGRCRAGKASDAFQRYRIAALTANLRIRQGAEKRRLTQVEMTLVNDLLVNAKGAKQPTWVDVAEVLGIDRGQLLGTATMLDDGERAGATPPVHTTNLMMASVRIAPLKNWWLEADQPARDAMIKALSLAEADDFDSQEGAQVQALFSSLTDEEHEKLDGLHLPAGRAAYSEDTLRKLTEHILAHGSDLYEARRAVFGVSEDWAPPAPDIAEPTGNPAVDRVLKIVNRWLSAAEAEWGAPLSVNIEHGRDAFVSELKSREIDRDIQRRTRRNYDLLKTMQEELGIDSKPSRADLWRYQSVQRQNGQCAYCGSSITYSNCEMDHIVPRAGQGSTNKRENLVATCARCNRSKLNIPFAVWAERSTIPGVSVKEAIDRTKMWLPDSGMRAADFRSFVKQVQDRFRRTTLDEPIDNRSAESVSWMANELRARIAQHFSSGDDQADTKVRVFRGEITARARAASGIQRDLNMIGGKGKQRLDRRHHAVDASVIALMQATVAQVLVERNDLKHEQALRRQAPQWKEYEGADEGTRFQFRQWKRRMHSLLRILNQALDEDRIVVMSNLRLRLGNSQVHEAQIGKLAAKKVGDAFSVVEIDRASSEALWCALTRDPDYDPKEGLPENPERTLRVHGTHLSANDEVHIFPVGAAAIAIRGGYAELGASFHHARIYRINGKKPSYGMVRVYSVDLQKFRQQDLFSVELKPQTVSMRYADPKVRKAIVEGNAEYLGWLVSDDELLLDASSFTGQVADTQAALGPIKRWRLDGLFSPSRLRLRPLQLAAEGLASDSEDYLKKTLDMQGWLPAVNKLLSVGRVTVVRRNALGRPRLESVANLPVTKSF

SEQ ID NO: 16999 - protein, 1079 aa, unidentified
  REGION 1..1079: note = Cas Enzyme sequence
VSHHIWAFDIGSKSIGWAVLGADGDGKPTGEVIAANVVLHDGGILNENEGTTRRAVRGEKVRGRRRLKRRKRRLVRLREELEAFGFTKQPGWRDRDPWWARHRLASGPVQDPLQVRHLVAIALGHMARHRGWRNPWLPAPRPAETDTPEEIINLARELDAPATLGGVCWALIRQSGPTAVRNRNEVPEGQRHLREYVPKVHQEHIAAEIAEIWRIQREAHPDLFTDESRDALAEVVLEQERPGVPLERIGKSEIGDPDQYRAPTASPLFQQFRLLDRIANLRIKEPDGAKRRLNQEERQAVYDLLDSPEQVEWRDVAARLGIDEERLMGNPDREGTAGRPPYNQVLAALHNAKIPARDRKRLLAFWENASPDEREALVALAIADRTIEVDDPRTAERVAGELEAQDLFEVVETVGRALPAGRARYSRQALGDLNDQMAQGFDRYEAIGRTYGHVPTGLTTKWDEPVPHAGVEVSMREVRRLVRALEREFGPPVAIGVEIVRDALRTHEERLRDNRRIAREREAREAARRCLIEDFGIANPTREQIAKREHMDAQGNQCLYCGATQAGGFKFETAELDHIVPRASGGSTTFVNIAAVCRRCNQAKGRRPFALWCAEDGEAGAKRMEETLERVSRMAPERWSSSPAKPYIDPNTGRWVRSDKDRNLDKIRRRLKKKSLDKEWGESTDDLQATAYAARVVRERLQNRYPSIPVRVFRGGLTAALRRETDLVEAVGLGGEKNRDDRRHHAFDAVAVGLLTHTTWAARIRRRDEAYRNAKLRLIPESLLERERERAPIDDLLQAVERVKASAPPIFNAMIPVCPRRVRTTGQIHEDRIRPWVKRAIGEAWSKKDIASVRDEHVRTALLRALPARGGLAADPERVLTLADGTTLAADVEVDTARDPEKGTPTATWIPVRGGWAKSAEIHHARLVEVTWSEDGREQSQHALVVVCLADVYGAREPFKVPLSPTSIAVRSCHVLARALAVDQDARVKTLLSLTQGDVFIKNGEAYEITTFNSAADRAESRRPARYGGEPRGVKNPDGPKMVVASAGEFTAGKVKMLRRDHLGRPTPAVSDGDRLAGS

SEQ ID NO: 17000 - protein, 1098 aa, unidentified
  REGION 1..1098: note = Cas Enzyme sequence
VGLAAIEYDELGRPTEILSAISQIHDSGVLEPKTNTTRLAASGVARRTRRLVRRRRRRLLDLEAKFKDWGYAEPDESTDPYAAWRARARLATEKINDQEELGKALTLALRHLARHRGWRNPYHSTKSLRAAGDASEQFEAYKKRVEESLGKTFAEGVTVSELAVAAMDFNNRLPLRMGKTTNLRADRTAASYLGGKLMQQDNANEIHKWARVQGLPAERVSEIIDSAFKAESPRGSWVNKIGKDPINGEPRAPKATDTFQRFTILTTLANVRVKADGGVRPMTVGERSRAYEYLINHKPGEQPTWSDIAAVVELSRGALQGAAALDEDQTERLPQRPPIMLTNARMREVKKPLHPLRDWWATADRESRDALILLLTDQIEDESSAAGGAAQEVVAALDDDALAALEGLDLPGGRAAYSLGTMRQIIDFLLGHNGDLHIARKALFDLPDDWTPPAEPINAPVGNPAVDRVLKIVGRFLAAAEAEWGVPAQVTLEHVREAFVSAASVTERDREMRRRMEANELQRLKIKTEENAGHRTTMADVRRFDAITRQKGACLYCGDTITFKNSELDHIVPRKGVGSTNTRTNLVAVCITCNRSKGKLPFGVWATKTEREGVSVEEAVKRLQFWTKDKGLGAQSWTRFRADVRARLEQTSEDPEIDGRSMESVAWMANELHARIAAYFGAQTKVSVYQGALTAGARNAAGIAEKIPFVGGGGKTRLDRRHHAVDAAVVTLLDESVARTLAERNSLRASRFYEPWEKQDEWKTYSGNGEAAKSRFAEWRASMESLAQLMIAAFADDRVVVMENLRLRLGSGRVHEDTIHPLVKRAVSSAFTRDEIDAASTPALWHALTRDPDYSKSDGLPENPARRIRVQGQHLGPEDEIGFFGDAKKDQIQRKAALAVRGGWAALGDSIHHARIYRWQEKGKAKWGMLRIFSADLHRHRNEDLFAVEPDASWISMRNAHPSIGRADLSELEYVGWLVAGDELEVKMTSKVRTGHVAVASDALELGEVQRWTVTGFMNESRISVVPTQLSAEGMARFLELRPDLAASAPSVDYVLKRWTPYINVLLGHGSPRVLRRDALGRLRAHSQSHLPVSWSSD

SEQ ID NO: 17001 - protein, 1103 aa, unidentified
  REGION 1..1103: note = Cas Enzyme sequence
MTKIKDDLRYRVGIDVGLKSIGFCAVEVDENDQPLRLLNSMVFVHDAGVDPNENKAAKSRKLTAGVARRTQRRTAQNKCRLAELDRVLSEELHWPLPNLEDFEDPYEPWRTRAELVEHYIKDDAERAEALAIAIRHIARHRGWRNPYLSVDSLLTPQEPSEFLRGLNERVGQALGREFPADTTPGQLICTYIDSPKYAETQGIRGDTGILSGKLHQFDNVGEIRKICEVQRLDHDVFKLLVRKVFFAKSPRGSAAGLVGHDQIPGQGKYIRAEKAHPDFQLFRMVAVLTNLRIREGKAERCLTPDELRGLVDYILEVQLKQQVTWADLADNLGIERSDLRGTARASFDGSPALRFPPTDVTAEKIMASKVKWLKDWWDKADSERRGFMVDALSNSGGSTGDNDIDDEVAELLEAATEDEQAELEKIQLPQGRAAYSLDSLRRLTKRMLEEGVDLHTARKEEFNVDDDWRPEPEPIEAPVGNPAVDRVLKQVSRWLRMATDRWGEPAVINIEHTRDGLGSEKVARELLREGQRRQDLNQKNLVEIAQQLGIPVKDKRSALIKYAAIQRQNSMCLYCGAEIGFTTAEMDHIVPRALSGSTNDRSNLAAVCRACNHQKGAVPFAVWATSGEAHAGVSLEDAIKRVRLWQKGPGMSPKQHKAFQSEVISRLKSRKPDEEFDGRSMESVAWMAIELRTRIDGYYRKVNSDSVPKIGIYRGQLTAEARKASGFENRVNLIGGKGKTRFDRRHHAMDALVIALMNQSVSQTLALRVNMRESQRITGQEETWKNFYGKPGQANERFKKWREGMLRAVELFNIELAKNAIPFHENVRLRVGSSKVHDDTVRKFIHAKLGEALPVAMIDRAETPALWTALTRLPDFDPKDGLPEDPSREIYIHGRKITADERLNFFNSPSACLKVRGGYVEIGSSIHHARVYRIDGKKTVYAMVRVFATDLVKMTHEDVFTTPLKTSTISMRTAEAKIRKALADGTATQIGWLVEGDELQIETDKYSGGFIGEVLAEYPQLMSWRVCGFMNGSTMRLKPLLLSREGFTEGTSEALVKITDAPGWLPAINTLLSLGKVWVVRRNALGEVRFSTKDSLPVTHLLR

SEQ ID NO: 17002 - protein, 1088 aa, unidentified
  REGION 1..1088: note = Cas Enzyme sequence
VGIDVGTHSVGLATLRVDDQGTPIELLSALSLIHDSGIGEDGKKTASTRKEISGVARRARRLLRRRRKRLQQLDKVLLDLGFPIPKPGEFLDLSEQTDPYRVWRVRARLVEEKLPEELRGPAVSMAVRHIARHRGWRNPYSKVESLLSPAEDSPFMEALRERIMTGSGEILDDGITPGQAMAQVALTHRITMRGPDGILGKLHQSDNANEIRKICDRQGISPDVCKQLLQAVFKAESPRGSAVSRVAPDPLPGQGFFRRAPKCDPEFQRFRIISIVANLRISETKGKGRPLTADERRQVVAFLLEDPRDDLTWVDVAEKLGVSRQALRGTATLTADGERSAAQPPVNVTDQIMRKTKISALKTWWVEADVERQGAMVRYLYEGLEDSECAEVIAELPEEDQAKLDSLHLPAGRAAYSRESLTALSDHMLATTDDLHEARKQLFGVDDSWAPPAEPVGAPVGNPSVDRTLKAVARYLAAVENVWGKPEVIQVEHVRDGFASERAARERDRANNRRYEVNQRAIKEIQQSYGAEGHVRPGDVMRHHAITLQDSACLYCGGTIGYHTSQLDHIVPQAGTGSNNHRENLVAVCERCNRSKSNTPFAVWAQTCGIPDVGVKEAIDRVRGWRNRPGGMSPGELKRLKKEVIARLQRTQEDPEIDERSMESVAWMANELRHRIAAAYPDADVMVYRGAITAAARKAAGIDSRINLIGEKGRKDRIDRRHHAVDASVVALMERSAAKTLAERSSLRWAQRLTGQEETWKQYTGATVGARERFESWRGHMLRLTELFNERLAADEVHVVENLRLRLGSGNAHDDTIRKYATPRLGDGLSVNQIDRASSPALWCALTREEDFDAENGLPAREDRFIRVHGREIKSDDHIQLFSKKKKTEDDSKEKPFGAIAVRGGYAEIGSTIHHARIYRIEGKKPVYAMLRVFTHDLLSHRHEDLFSAVVPPQSISMRCAEPKLRQAIAEGNATYLGWVVVGDELEINVSSFTKDTIGRFLEDYPNTTRWRICGYDANNKLTLKPRILAAEGLGNPSSAVSEIVEGKGWRVAINVLAKVQPTVVRRDALGRPRYSSRSNLPVSWTID

SEQ ID NO: 17003 - protein, 1087 aa, unidentified
  REGION 1..1087: note = Cas Enzyme sequence
MPAHHLRVGIDVGTHSVGLATLRVDDQGTPIELLSALSLIHDSGIGEDGKKTASTRKEISGVARRARRLLRRRRKRLQQLDKVLLDLGFPIPDLGGQTDPYLVWRVRAQLVEETLPEELRGPAISMAVRHIARHRGWRNPYSKVESLLSPAEDSPFMEALRERIMTGPGEILDDDITPGQAMAQVALTHRITMRGPEGILGKLHQSDNANEIRKICDRQGISSDVCKQLLRAVFKAESPRGSAVSRVAPDPLPGQSSFRRAPKCDPEFQRFRIISIVANLRLSEATGKDRPLTADERRRVVTFLLNDSRDDLTWVDVAEKLGVSRQALRGTATLTADGERSAAQPPLNVTDQIMRKTKINALKTWWAEADAERQGAMVRYLYEGLEDSECAEIIAELPEEDQAKLDSLHLPAGRAAYSRESLTALSDHMLATTDDLHEARKQLFGVDDSWTPPAEPVGAPVGNPSVDRTLKAVARYLAAVENVWGKPKVIQVEHVRDGFASERAARERDRANNRRYEVNQRAIKEIQESYGVEGHVRPGDVMRYHAITLQDSACLYCGGTIGYRTSQLDHIVPQAGTGSNNHRENLVAVCERCNRSKSNTPFAVWAQTCGIPDVGVKEAIGRVRGWRNRPGGMSPGDLKRLKKEVIARLQRTQEDPEIDARSMESVAWMANELRHRIAAAYPDADVMVYRGAITAAARKAAGIDSRINLIGEKGRKDRIDRRHHAVDASVVALMERSAAKTLAERSSLRWAQRLTGQEETWKQYTGLTVGAREHFETWRNHMLRLTELFNERLAADEVHVVENLRLRLGSGNAHDDTIRKYDTPRLGDGLSVNQIDRASSPALWCALTREEDFDAENGLPARDDRLIRVHGQELTSNDRIELFSKKRSNDAKEKPFAAIAVRGGYAEIGSTIHHARIYRIEGKKPVYAMLRVFTHDLLSQRHGDLFSAVVPPQSISMRCAEPKLRQAIAAGNATYLGWVVVGDELEINVGSFTSGQIANFLDEYPGTTRWRIRGFFDERRLRLRPAYLASEGLVDPSAAVRKTLSIPGWLSAINQVAATHPRVIRRDALGRMRKSSRSGLPASWIIK

SEQ ID NO: 17004 - protein, 915 aa, unidentified
  REGION 1..915: note = Cas Enzyme sequence
GIPPGQAMTQVALTHAVKMRGPEGILGKLHQSDNANEIRKICARQGVSPDVCKQLLRAVFKADSPRGSAVSRVAPDPLPGQGSFRRAPKCDPEFQRFRIISIVANLRISEATGKNRPLTVDERRQVVAFLMKDSQADLTWVDVAEKLDVHRRDLRGTAVLTDDGERSAARPPIDATDRIMRQTKISSLKTWWEEADSERRGAMIRYLYEESADLECAEIIAELPEEDQAKLDSLHLPAGRAAYSRESLTALSDHMLATTDDLHEARKQLFGVDDSWLPPVEAINAPVGNPSVDRTLKIVGRYLSAVESMWGTPEVIHVEHVRDGFTSERMANERDKANRSRYNDNQKAIEKIQHDYGKEGYISRGDIVRFHALKLQGSACLYCGTTIDYHTCQLDHIVPQAGPGSNNRRGNLVAVCERCNHSKSNTPFAVWAQKCGIPHVGVKEAISRVNGWVEHNHSTSSGDLARLKKEVIARLRRTQKDPEIDERSMESVAWMANELHHRIAAAYPETTVMVYRGSITAAARKAAGIESRINLIGEKGRKDRIDRRHHAVDASVVALMEPSVAKTLAERSSLRGEQRLTGQEQTWKQYTGLTVGAQERFEMWRSRMLHLTELFNERLAEDKVYVTQNIRLRLSDGNAHTVNPSKLVSHRLGDGLTVQQIDRACTPALWCALTREKDFDEKNGLPAREDRAIRVHGHEIKSSDCIQVFSKRKKTDSDRDEGPFGAITVRGGFVEIGSSIHHARIYRIEDKKPSYAMLRVFTHDLLSKRHSDLFSVDIPPQSISMRCATTELRQAISEGRATYLGWIIAGDELHIPVETFTTHKIGSFLKDYPDTTRWRICGYDSETMLILKPRVLSAEGLNNSSNIAKYVIKDKGWRIAINKLAKVHPTVVRRDALGRPRYSSRSNLPVSWTIM

SEQ ID NO: 17005 - protein, 995 aa, unidentified
  REGION 1..995: note = Cas Enzyme sequence
MSAHHLRVGIDVGTHSVGLATLRVDDQGTPIELLSALSLIHDSGIGEDGKKTASTRKEISGVARRTRRLLRRRRKRLQQLDKVLLDLGFPIPDLGGQTDPYLVWRVRAQLVEETLPEELRGPAISMAVRHIARHRGWRNPYSKVESLLSPAEDSPFMEALRERIMKGPGVLLDDDITPGQAMAQVALTQRITMRGPDGILGKLHQSDNANEIRKICARQGISPDVCKQLLRAVFKAESPRGSAVSLVAPDPLPGQGSFRRAPKCDPEFQRFRIISIVANLRINEAGNRDRPLTADERRQVVTFLLEDPREDLSWVDVAEKLGISRQALRGTATLTADGERSAAQPPINVTDQIMRKTKISLLKTWWAKADAERQGAMVRYLYEGLEDSECAEVIADLPEEDQAKLDSLHLPAGRAAYSRESLTALSDHMLATTDDLHEARKQLFGVDDSWTPPAEPVGAPVGNPSVDRTLKVVARYLAAVENVWGKPEVIQVEHVRDGFASERAARERDRANNRRYEVSQRAIKDIQQSYGVEGHVRPGDVMRHHAITLQDSACLYCGGTIGYHTSQLDHIVPQAGTGSNNHRENLVAVCERCNRSKSNTPFAVWAQTCGIPDVGVKKAVERVRGWRNRPGGMTSGELKRLKKEVIARLQRTQEDPEIDARSMESVAWMANELRHRIAATYPDTDVMVYRGSVTAAARKAAGIDSRINLIGEKGRKDRIDRRHHAVDASVVALMEPSVAKTLAERSSLRWAQRLTGQEETWKQYTGLTVGAREHFETWRNHMLRLTELFNAKLTADEVHVVENLRLRLGSGNAHDDTIRKYATPRLGDGLTANQVDRACSPALWCALTREKDFDEKNGLPAREDRFIRVHGQELTSNDHIQLFAKKPGNDAKEKPFGAIAVRGGYAEIGSTIHHARIYRIEGKKPVYAMLRVFTHDLLSHRHGDLFSAVVPPQSISMRCAEPKLRQAIAEGNATYLGWVVVGDELEIDIDSFKTG

SEQ ID NO: 17006 - protein, 1087 aa, unidentified
  REGION 1..1087: note = Cas Enzyme sequence
MPAHHLRVGIDVGTHSVGLATLRVDDQGTPIELLSALSLIHDSGIGEDGKKTASTRKEISGVARRARRLLRRRRKRLQQLDKVLLDLGFPIPDLGGQTDPYLVWRVRAQLAEETLPEELRGPAISMAVRHIARHRGWRNPYSKVESLLSPAEDSPFMEALRKRIMTGPGEILDDHITPGQAMAQVALTHRITMRGPEGTLGKLHQSDNANEIRKICDRQGVSSDVCKQLLRAVFKAESPRGSAVSRVAPDPLPGQGSFRRAPKCDPEFQRFRIISIVANLRISETKGENRPLTADERRHVVTFLLEDPRDDLTWVDVAEKLRVPRQALRGTATLTADGERSAAQPPVNVTDQIMRKTKISALKTWWVEADAERRGAMVRYLYEGLEDSECAEVIAELPEEDQAKLDSLHLPAGRAAYSRESLTALSDRMLATTDDLHEARKQLFGVDDSWAPPAEPVGAPVGNPSVDRTLKAVARYLAAVENVWGKPEVIQVEHVRDGFASERAARERDRANNRRYEVNQRVIKEIQQSYGVEGHVRPGDVMRHHAITLQDSACLYCGGTIGYHTSQLDHIVPQAGTGSNNHRENLVAVCERCNRSKSNTPFAVWAQTCGIPDVGVKEAIGRVRGWRNRPGGMSSGELKRLKKEVIARLQRTQEDPEIDARSMESVAWMANELRHRIAAAYPDADVMVYRGAITAAARKAAGIDSRINLIGEKGRKDRIDRRHHAVDASVVALMERSAAKTLAERSSLRWAQRLTGQEETWKQYTGLTVGARERFETWRGHMLRLTELFNERLAADEVYVVENLRLRLGSGNAHDDTIRKYDTPRLGDGLSVNQIDRASSPALWCALTREEDFNGKNGLPAREDRLIRVHGQELTSNDHIKLFSKKRGNDAKEKPFGAIAVRGGYAEIGSTIHHARIYRIEGKNPVYAMLRVFTHDLLSQRHGDLFSAVVPPQSISMRCAEPKLRQAIAAGNATYLGWAVVGDELEIDIDSFTSGQIASFLEEYPRTTRWRIRGFFNETQIRLRPAYLASEGLIEPSEAVRKTLSIPGWLPTINKVAETHPRVIRRDALGRVRKSSRSGLPTSWIIK

SEQ ID NO: 17007 - protein, 1080 aa, unidentified
  REGION 1..1080: note = Cas Enzyme sequence
VGIDVGTHSVGLATLRVDDQGTPIELLSALSLIHDSGIGEDGKKAASTRKEISGVARRARRLLRRRRKRLQQLDKVLLDLDFPIPDLGGQTDPYLVWRVRAQLVEETLPEELRGPAISMAVRHIARHRGWRNPYSKVESLLSPAEDSPFMEALRERIMTGPGEILDDDITPGQAMAQVALTHRITMRGPEGILGKLHQSDNANEIRKICDRQGISPDVCKQLLRAVFKAESPRGSAVSRVAPDPLPGQGSFRRAPKCDPEFQRFRIISIVANLRISEAKGKDRPLTADERRQVVAFLLEDPRDDLTWVDVAEKLGVSRQALRGTAKLTADGERSAAQPPVNVTDQIMRKTKIGALKTWWVEADAERQGAMARYLYEGLEDSECAEVIAELPEEDQTKLDSLHLPTGRAAYSRESLTALNDHMLTTTDDLHEARKQLFGVDDSWAPPAEPVGAPVGNPSVDRTLKAVARYLAAVENVWGKPEVIQVEHVRDGFASERAARERDRANNRRYEVNQRAIKEIQQSYGVEGHVRPGDVMRHHAITLQDSACLYCGGTIGYHTSQLDHIVPQAGTGSNNHRENLVAVCERCNRSKSNTPFAVWAQTCGIPDVGVKEAIGRVRGWRNRPGGMSPGDLKRLKKEVIARLQRTQEDPEIDERSMESVAWMANELRHRIAAAYPDADVMVYRGAITAAARKAAGIDSRINLIGEKGRKDRIDRRHHAVDASVVALMERSAAKTLAERSSLRWAQRLTGQEETWKQYTGLTVGAREHFESWRSHMLRLTELFNERLAADEVHVVENLRLRLGNGNAHDDTIRKYDTPRLGDGLSVNQIDRASSPALWCALTREADFDAENGLPAREDRLIRVHGQELTSNDRIKLFSKKRGNDAKEKPFGAIAVRGGYAEIGSTIHHARIYRIEGKKPVYAMLRVFTHDLLSHRHRDLFSAVVPPQSISMRCAEPKLRQAIAAGNATYLGWVVVGDELVINIDSFTKDTIGRFLKDYPNTTRWRICGYDANNKLTLKPRILAAEGLGNPSSAVSEIVDRKGWRVAINVLAKVQPTVVRRDALGRPRYSSRFGLPVSWTLE

SEQ ID NO: 17008 - protein, 1016 aa, unidentified
  REGION 1..1016: note = Cas Enzyme sequence
RRRKRLQQLDKVLLDLGFPIPDLGGQTDPYLVWRVRAQLVEETLPEELRGPAISMAVRHIARHRGWRNPYSKVESLLSPAEDSPFMEALRERIMTGPGEILDDDITPGQAMAQVALTHRITMRGPEGILGKLHQSDNANEIRKICDRQGISSDVCKQLLRAVFKAESPRGSAVSRVAPDPLPGQGSFRRAPKCDPEFQRFRIISIVANLRINEATGKDRPLKADERRHVVTFLLEDPRDDLTWVDVAEKLKVPRHALRGTATLTADGERSAAQPPLNVTDQIMRKTKINALKTWWAEADAERRGAMVRYLYEGLEDSECAEIIADLPEEDQAELDSLHLPAGRAAYSRESLTALSDHMLATTDDLHEARKQLFGVDDSWAPPAEPVGAPVGNPSVDRTLKAVARYLAAVENVWGKPEVIQVEHVRDGFASERAARERDRANNRRYDVNQRAIKEIQQSYGVEGHVRPGDVMRHHAITLQDSACLYCGGTIGYHTSQLDHIVPQAGTGSNNHRENLVAVCERCNRSKSNTPFAVWAQTCGIPDVRVKEAIGRVRAWRNRPGGMSPGDLKRLKKEVIARLQRTQEDPEIDARSMESVAWMANELRHRIAAAYPDADVMVYRGAITAAARKAAGIDSRINLIGEKGRKDRIDRRHHAVDASVVALMERSAAKTLAERSSLRWAQRLTGQEETWKQYTGATVGAREHFEMWRGHMLRLTELFNEHLAADEVHVVENLRLRLGSGNAHDDTIRKYDTPRLGDGLSVNQIDRASSPALWCALTREEDFDSKNGLPARDDRLIRVHGQKLTSNDRIELFSKKRGNDTKEKPFAAIAVRGGYAEIGSTIHHARIYRIEGKKPAYAMIRVFTHDLLSQRHGDLFSAVIPPQSISMRCAEPKLRQAIAAGNATYLGWVVVGDELAIDIDSFTSGQIANFLKEYPGTTRWRIRGFYNDRQLRLRPAYLSAEGLVDPSEAVSKTLSIPGWLPAINQVAATHPRVIRRDALGRVRKSSISELPTSWIIK

SEQ ID NO: 17009 - protein, 1024 aa, unidentified
  REGION 1..1024: note = Cas Enzyme sequence
MINLEKFLTAQGWETRPFEHYSDPYLPWNARVALVNGYISDDTQRGMYLSIAFRHIANHRGWRNPYWKISSLYSPDKPSDAFEQIRKELEKSTGRKIPETVTVGQLISFAQFGKDRLRGSGKQKDKKKPQKQVKQAVISARLHQIDHAREINEICRVQKIDDTLRKQILDLVFAAESPKGAQIGRVGKDPLQPKLLRALKASDAFQQYRIASLTGNLRIYRDGVSTPLDRDEKLIVFNYLINLSHKVEPSWLKVAEVLNIDRGQLRGTATMTDDGERAGATPPVHDTNRTILGCKVKSLVHWWEGANDDERAAMLKSLSNSEVEDFDSPAGAQVQAFFANLDESEQEKLDSLHLPIGRAAYSEDTLMRLTSRMLDENLDLYEARLAEFDIPEDWAPPAPRIGEPVGNPAVDRVLKGVARWLEAAADEWGAPKSVVIEHVRDGFISKSKAIEIDRANNARHKRNRELFKQMQENLGIDGKLRSSDLWRYQSVQRQNCQCAYCGSPITYTTCEMDHIVPRAGEGSTNTRDNLVATCHRCNLAKKNIPFAVWAAQTNIPGVSVKDALDRTRHWSEDSGMTRKDFEKFQKNVCDRLKRTVVDEPLDARSMESVAWMANELRGRVTQRFQEENTVVNVYRGELTAEARRAAGISDKLRFIDGTGKSRLDRRHHAVDAAVVAFTQNYVAETLAIRSNKKREAQLLQAAEQWKEFTGSDAEHRAAWNAWLPKMQKLAVLLQKALDEDRIAVTSNLRLRLGNGRAHEDTIGELKTIRVGDAISVTDIDRASSEALWCALTREPDFDENNGLPENPDRRIRIHGTWYDAEDEIEVFPIAAGAIKVRGGYAELSHFHHARIYKIPGKKAPVYCMLRVYNADLIRHRHEDLFSVEIKPQTMSVRQAEPKLRKALAENTAEYLGWLVTNDELVIDTSEFVTGHIAEFQNEFGQVRRWRLDGFYSPSRLRLRPLQMSAEGLSRDASVGPKKIIDDPGWLTAINKLFGGGHVTVIRRDALGRARLTSHAHLPISWKAE

SEQ ID NO: 17010 - protein, 1094 aa, unidentified
  REGION 1..1094: note = Cas Enzyme sequence
MKYIIGLDIGIGSVGWAVVRNDDDCKRLEDFGVRIFESGEIIESNKNIRKSQRRRKYRGMRRRIRRRNHRKERLKNYLENIKFVSRAELSEFFAKNNHDIIDIRVRALDEMVTPVELTASLLHIAKRRGYKAFYELSDENNNAKDKKAKEEEKDIYKALTNTADVIKNGGYRSIAEAIMKDSEHFSDKISGRYKYRNIKEKDEKGKKKSDSKISENDILFPTEMFEDEVRKILGKQKEFYSQLTDESIDKIFDIIFSRRDFEDGPGNTDDENRPYKGFVDSIGNCPYYKNEKRGHRYTVIGDLFALANKLSQYKYVEKNTGEVVKLPRDLMRNIVNQSLQSGSITKTKINELAKEFNIVILNTKTAKNENIADCIKYLKAVKPIFESYGFDWDKLISEEYTDQNSLLNRVGDTISFNITPKRRIDALNKIDELKGKDELIKKLSKQNFSGTAKVSDKYMIDAINAFFDGTLVGEFQANVQQDEFSVSIKTEKLLKLKPFDNNSEYAQNPVVFRAINETRKVVNAIVQKYGAPNAMNIEIASELNKSFDTRQKISTQQNKNEKERKNAIKQISLITGLDEREIRPQYIERYLLGELQGWRCMYSNEEITNKEEAILNKGKQYEIDHIVPFSRILDDTLNNKALVLARENQKKGARTPLMYLSAEKEKEFKQRVNKLFKGNKITEKKYRYFMLESLVGEDAEKILGDWKTRNLNDTRYIAKFLVKYFNDNLYFAREKGDDKRPVVYAVKGAITSSLRRQWLNKETWGRYDKGELKKITYFDHAVDAIVIANCLPAYVIIAAENHKLRDIYYSAGKIKTEEYRKSLDNCVDTLMKYYGMSPAVSRKLLEKVKETPSLLKNIRFEVEYRVRDYELMKYFFNYDTKVGEDTLDQIFRNDLYKIYDHQFADSIEMPIVSIKPERKYSGQMVKDGFIKKKDAISGKNSVKTIGENNSTVLNDSRFYCVDVYRTCNDETNLNFIKYTDLLKRNNHLYLRSDYRYPDDYAMHEMYLFYGDYIEITKKNKICCGYYFSLKNSSRNELYMSKGNTRRKLNNMKENEVCSITKKDTVKKFEIDILGKKLGEVKKYGEPLSLLPEKN

SEQ ID NO: 17011 - protein, 1347 aa, unidentified
  REGION 1..1347: note = Cas Enzyme sequence
MNMPAKGNFGEYYLGLDIGTDSVGWAVTDKNYEILRFRGKTLWGIHLFDPGQTAKGRRKQRIARRRLDRRKHRIALLQSLFSEEISKVDFTFFNRIRDNRLIIEDREHKCHDSLFNDPAFKDKDFHKKYPTIYHLRNELMTSPDKPDIRLLYLACHHIIKYRGHFLFSTGDGDIPRFREVYMNAVDAMNDECRTDISGDLYETVRQILHSNDGVKEKKNKLYELIGEPSKSAKAFMDLLAGSSTTIGKLFVDVEEDIKKAKLALDGTDFEEEREKLENILRPEQMDVLNLAKAAYDSAKLEKLIGTHGSLSKSKIAQFEQHKKDLEMLKSILRKNRPVYYEVFKSTSENNYASYVRAHRKNRSEVESCTQSDFCKYLDGILEDVLEDQTFITEGEKMDMRDRIKAGEFMPKQVSKNNSMFPNSLHCSELRKILENASRHYSFLLQKDESGDSVKDKIEKLCTFRIPYYVGPLVPREQSKRAWFVRNEEGEITPWNFERKVNLEASGEKFIEVLTNKCTYLPTEDVIPMNSTLYSRYMLYNEINNIKINKERIQLELKKQMVAELFESDSAENVTQKRLESWLRAKGLCSKENKITLDGADFPIKASLRAELRLRPIIGDVRNNRRLAEDIIRTITIFGGDRSMLKKKLSTDHKGKLSEEQIDSLSRLKFSGWGKFSEKFLTRIRAMVEGEEMCILEALENTNLNLMELLGDEYGFTKEIQKLKEPCIADGRIMYDLMDDLHVSPPVKRGIWRAMSIIKDIVNVTGHPPAKVFVETTREDMDNKKRTSSRKESLLALYKSCKNQERDWIAELKDMGNGRLRSNDLYSYYCQQGKCMYCGNPIDINDLSNNNIYDLDHIYPRSKKMDDSMSNNLVLVHKSCNMEKGDKYPIPEEWQNRMIDFWSYLKDGKFITDEKYKRLTRISELTEDELAGFINRQLVETSQTVKAVIELMKRIFGDNTDVVYVKANAISDFRNGNNGYIRESDDDPGLKFIKCRSVNDYHHAKDAYLNIVVGNAYDVKFTKDYKKVIRDGEPYSLRLERMLASDIERGGMCAWKAGNDGTIKTVSKYMRRNNILFTKFAHVDNGALFKITPQPRPSDNKQDDSFLPLKKELPVNKYGGYTGIEYSYFIVLEYTNGKKRMKKLEGVPTYIAVQKSESKILEYLVSKGYSEPKIVMNKIRKGTTFEIDKFRLFIAGRTDFTCGKQLMLSDPSYAYCKELLKYTSALTENKNTKPESFRALNKESNISLFDELVHKLETSYDTPFLENEKRQLCEARDRFLVSEISSQLKTLDHMLRIFHCNPARADLSDIGCKATGRILISDPIKLGAKIINQSPSGIFETETDLKKI

SEQ ID NO: 17012 - protein, 1410 aa, unidentified
  REGION 1..1410: note = Cas Enzyme sequence
MSEHKEKFENYYIGLDIGTNSVGWAVTDFNYNILRHRGKDMWGVHLFDEAKSAQDRRTIRTSRRRLERRGARLQLLRELLQNEINAIDPLFFQHLDESKFHLSDRTDARQKYSIFNDADYTDKNYHDEFKTVYHLRHELMNNANRKFDLRLIYLAIAHILKSRGNFLNQNLSSDNIIGSAFDESLCAFAQTVRDILGIEISTEKSSGVKDAFLKTRGTTRRTEELLHNMPIIGDDDDIKQFTKQYKELVKLLAGGSAKLSNIFKPQDFSEDEDDAPDIDFDALASAIAQAEEGDLKKISFSEIDYDENCAPKLETILGDAVEVIDAAKKLYDWSVLSNILGENDSISEAMIERHKKHHDDLIELKDFVKKFCPEKMYELFSDQSSTCNYYAWIGKSTGKNNKSVCTQEDFYKYLKKILPLDAPEACSIKSKIDEQTFLPKLRTSANGVIPYQLHQVELRAILKNAETHYPFFAQKDESGLTISEKIEKILTFRIPYFVGPLSDQHLYDKDSQHGHAWIVRNEGMERERILPWNFEKVVNLGECAERFIRRMTDKCTYLPSCDVLPKESLLYSEYLALNQLNNLKIDGQPIDRQSKKLLWQLCRERPSVSAKDIKAALHVSRDALSGFDAPLKISLKAYHDFKRILGDARIDIDQENVRNFVETCILDITIFGDEKKELRRRIERRMSSYGIQLTAASLEKICHLRYKDWGKFSREFLTQIDACFDKSTGEVGSILEALEQTTDNLMQLLSNNYSYRQKLDEFNEAHGHPQKFTYDDLVMPLYCSPAVKRAIWRTLAIVKDIKRITKHNPARIFVEMAREEGEKGKRTTSRKQQLEELYRDLKNDLDVNVLLKELDAQTDADLRKGKDKLFLYFLQLGKCMYSGEPIDLGQLMGDKNGNIWDIDHIYPRAKVLDDSLENRVLVRKNLNHIKGDRNLCESNIVTPNARKLWSILLKNKLLSQEKYNRLTRSTPLTDEELAGFISRQLVETRQSTKAVCEILRVLFANNQKNPDQKPTEIIYSRAGRVSQFRKEFEFGKCREINDLHHAKDAYLNIVVGNVFHTKFTTNPAFIFRNENVNVQYKTKNQTGLFQREIRSHDGSLIAWNPDNQSGSLNIVKKWMESSRILYTRYAYEQKGGFYDQNPLKASYCSEAQIPLKSNDERFQNVSKYGGYDNQSTACYFLIEHMKQKGRSKKLERIRELKPVPIRFADSLRGSQDKLLNYCHKELGLIKPLIIIPKILFNAKLILDGFCCFLGGKTGEHCWITHGVQFSFPSEHEKDIKKIFNLLGNTFDSTGVTKETTLTIYDLFIQKHEAPVYKNMPASQLKKIKAGRDSFKDLPLLSQCQVLQNILGLFACRKDKNSDLTLIGGAQNAGAMKIPMDITKFKSALMINESPTGLTSQVIDLKKVQPK

SEQ ID NO: 17013 - protein, 931 aa, unidentified
  REGION 1..931: note = Cas Enzyme sequence
VTEILPPELKKQYASYSSKAIRKLLPLMRCGKYWNWDAVDPSTKERIEKILKDGWEQSFAYDKRTGELIKEREFTRTDQFSGLPVWFACYVAYGRHSERESDKKYEKPEEMDVMKLVPNNILRNPIVEQVIRETLLLIRDAWKRYGQPDEIHIELGRELKKNALEKERIAKNNSKNFEEKQRIKKLLSELRGGKFESYADENNTVNAPFEVSPNPESPADIEKFRIYKSCAAITYDEEQDHWETLFKGKKEPTNAEIKKYALWLSQQCASPYTGKIISLTKLFSEEYEVEHIIPRRKLKNDSFDNLVICERGVNKLKDNDLATVFIANHDGAELEFGGKKYKLLPTEEYFAHCKNTFRGRKLKNLLATEVPEDFVQRQINDMRYITRKISELLYTVAKDKNGLVFTIGSITSELKGEWGLHTIWKELLKPRFERLEKLTDRKLISEDEENPNKFHFHIPDQPNFEPKRLDHRHHALDALIIAATTREHIRYLNSLSAVDSSTELQQVKRALVKRKFREFKLPWQDFTKDAKEKLSETIVTFKTNTKIVSKPANKYVKWVQKNGVWKKEVLPQKSKKRWLAVRKSMFKEPQGIIFIKEKRKVSVFDAFKIQIDRMKVEHDNGRRRTTSYVYDKLARQYVIAIIKKVGVDIDHTDQLLAEIKNYLQKNKRANGYSLEGKVFEKIQIAEFVEVAAKRVAVDASFTEKKIEKIPYPNSKNRKKNIATLLQDHLKEFRGKPTEAFQGEGLEVLMKSNAGRKIEKVTIKEEKSPEYKVGNKYLEPDKGAIAYFVMYENEASKERSQMYSLATHKAIERLVAGEPIADKREGFKTIVLSPGDLVYVPTEDEARDTRPIDWNDRKTIAGRIYRMVKSTGKQCFFVPANISNLIIPYDKDTRVGEIESQNCSERTLDGETQIKKVCIKIKVDRLGNIIGK

SEQ ID NO: 17014 - protein, 1175 aa, unidentified
  REGION 1..1175: note = Cas Enzyme sequence
MKKILGLDLGSASIGWAVVRENSEELLTEDASGSTAPNDAIVALGSRIIPLTTDESTGFSKGSTLTKNADRTQKRTQRKGYDRYQLRRGLLLQELSRLGMYSGQTLRLSTLGLWELRAKAVTEQVSLPELGRVLCHINQKRGYRTVKSDFEDKKQGKYVEAVVGRYRELHAQGLTVGQYLYKELSSDPAFRCKDRVYPRAAYVEEYDAIMDCQKRFYPEVLTGEVIAHLRDYIIFHQRPLKSCKHLVARCELERREALIGGRIRNCGPRVAPRSSPLFQVCKLWEMINNLRIENKEGDPLVLTLEQKQALFAFMNTHAKFTAAKLTSVLGLKSREWKIANAIGTGLQGNTTYCALSAALEKCPDRGKLLAFELHAVDGDKVHADTGEIVQVIDTSFEKQPLYRLWHALYSISDIDTLREVLGQNFGIADPETLDRLCRIDFVKSGYGNKSSRALRKILPYLQQGMQYYQAKCMAGYDDAPWNKEQNQVRELAERLLPVPKGELRQPVVEKVLNQLVNLVNALMAEYGPFDEIRVELARELQQSREERESASRSMAENNKRNEQVAQKIQQEYGLTPTRSRIQKYRLWTESDHQCMYCGQLVNVAEFLRGVDVEVEHIIPRSMLFDDSYSNKVCACRKCNKDKDNRTAFDFMKTKPEGEFAAYLERVNSLAEAYKPNRGLDVGISETKKRKLLMRKQDIPTDFIARQMRETQYISKKAKEMLQTVCRNVYSTSGSITDYIRHVWGWDDVLHEINFEGYRAAGLVQTCEREVDGRKLQVERIVNWSKRLDHRHHALDALVIACTKQGYIQRINNLASLGEITFRSDAGKAPSGASRERHTRLERYIRMQPHFSRAEVIRAVKGIAVSFKADKRTVTPGKRYVYRKGKRICVQRGILVPRGPLSEESVYGRIHDEGKEKYVLRYGVDTIDLKKLDSVVDQGIREILRQRLEQFGGNPKKAYATPVYDHQGRAIRSVRCFTNLKVAVPLRYDEQGQPIAFVKTGNNHHVAIYEDEKGRWHEHMVTFWHAVDRKRYGLPILITDPGDVWDRVTDRMPEDFQRQLPPSATWRFVFSVQRNEMFVLGMEEEAYRKALSERDTATLCQYLYRVQNITAGAYVFRKHTETQSDDRYPDEHGKKIFSLLKSNARGAVHWIQSFGALQALNPHKVHVSITGKISEV

SEQ ID NO: 17015 - protein, 947 aa, unidentified
  REGION 1..947: note = Cas Enzyme sequence
MDPYALRARALEAPLSHFELGRVFYHLAQRRGFLSNRKAPLKEDEKPGEMAEEMQGLERQMKEMGARTLGEYLANVDPRLEPRRKRHTQRDWHREEFDRIWGAQSKHHPEILTDRLHAGLCSMRNSIFHQRPLKQPRHEYCELERRPGGKKKRVRAPLGLRVAQRARLLQDINHTRIVDAKGRESEMTGPQRAELLAALEREAKLTFPQARKLLKLPKGSTFNLERGEREAFIGDRTAAKLRREFKKKKRGAPPDDELGVEIFGERWDGLDDATKDRIIEDVLTIDSPAALERRGREVWGLSEDAAKAFARIELEGSRARHSAKALRKLVPHLEEGLSYAEAADLAYPERRKTGDALDRLPPFEDLRNPIVQRALTEVRRTVNALIARHGKPGKIRVELARDLTRNARQREEVWKGQRNRERERALAAQTLREAGVNQPHRRDIERVLLAVECDWRCPYTGEGFGPTDIIGKHPRFDVDHIIPFSRSLDDSFFNKTICLAEVNRDRKGNRTPHETFGGSEDWAVILGRVKKFKGDAATEKLRRFKLDSAPGQEGETASFLEDFASRQLNDTRYAARETATALKLLYGDEGNSRVEVTRGGVTAYLRSAWGLNDILGGPGEGKLRDDHRHHAVDAAVTAMTDRRWMQVLALAAKSGRNPGAFRDLALPWPGFHDEVRAAIERIVVSHRIDRNINGQLHKETHYGLVSEKPEAEKRPVARTILDRLTEADIRKKRIVDKAVREAVEIKLAELDSDLKKALKKLADPANHPFLIAKDGRRIPIHKARVWQEVTTVEIGRGPRRRNVKTGGNHHLEIFEVRGKKGRTQWEGRIVTTLEAMHRRRARQPIVRREDGDGNRLVFSLAIGEAVELTLNKTVGPPKRLRRPGERVIAVVRKLSQTQYMFKLHYDARMATEQDPQNFYASGAKSLRKMEPKKLILTILGEARPARD

SEQ ID NO: 17016 - protein, 1091 aa, unidentified
  REGION 1..1091: note = Cas Enzyme sequence
MKYRLGLDIGTASVGAAAIRLSDNGEPLDLVAHEVRIFDEPLENGGLGKLQSKKAKRRQARMQRRQIDRRAGRLRRIAALAPLLGLKREELQPDSGANLPRLRAQAARERVELEDLMRIFLRLAKRRGYAGDFRPKGENAKVGEVEGGSNELKRQMAELAEARGVPYVTLGEFLYHRLQQGFPTRLKLAEQPTPELQNLYALRSQVEQEFSHIWDTQAQYHPVLNTSRDGRPLKALFAEAIFHQRPLKSPRDLVGHCALEPTLPRAPRAQPAFQRFRIEKTLADLRWGVGRHALPLTPQQKDVIRRLLDEKEKVSFKTILAALEKAGCGQPPGRGLNLDRASRDELPGNKTNAVFRKLGLENEWRLLDERTQVQVINFLAELGSPEQLDDPQWHTRFAKADGTPRTLNPDMVAFVNRIKETGKLDRLSAMGFDAGRASYSVKALNRLADWFAEPWWPDTAERGKIDEEIAVRICYPEKSANVRNATLRYLPPAKRTGNDVVDGALRQVRFVVNRIISALGTPPHEVVVEMAREMGVGIAMRNEREKTMDRNRRARDNAEKVIREHGAKVTPSRVRRYLLWTDQGQKFCPYCNRTINLEAALSGAETEYEHIVPRSLTQVGYKRSEIVLAHRDCNAAKGNRTPWQAWGDGRDPERWQIVEERAKWFEKHKQFRKAKLLLLKDFEQEVLNDEAIADFADRQFHQTSWIAKEVAQWMGSISARPVSVSRGELTAFLRRSWKLDTVIPEVRLTEGLPIADEDGKIITPEEFERFRPVWEGHHAPSTDSYTDRRLDKRIDHRHHLIDAIVIALTSRALFQRMARQYKEDSERCLNGERPRLKAPAPPLHNLRDVAVRAVSECRLSFKRDPYPAGPIFQSTAYSVAQRNGEEKLRLTLRVPLSELINRKTGTVEQARKEIASIVSDETRALVSREFEARIAAGASAAAALAQPFYQEKYGKKIPIRRVRCYTDNYAEEVAIVAHTDRRGTVHTKRLRHAGYAYLEFKVENGKARDCRLVTMWEALRSDGKPDKCKVRLYKGDIVQDAKTGRRYRVGSFKAKGEIYLVEHADPRPYERALVKTVVRFQQAGRLKLVCG

SEQ ID NO: 17017 - protein, 1323 aa, unidentified
  REGION 1..1323: note = Cas Enzyme sequence
RWRLQFLDEFFAPYLAEVDPNFLARLKQSDISAKDPAKNQEFMGKLLFPDQEAASDGNGYPTLIQMRKEMPAEKAADFPVFNIYQLRYALMNEKRKFDLREIYLAVHHIVKYRGNFLNNTSVDKFKADQIDFNKSFETLNDLFRQVQQIAPFQIDLTKVDELGKLLLDTKQKKLDRQKAAAKLLPLIEDGTDKEIVKAHQQTAREISKLILGYKAKAGLILQNNLDQTLDMSTENSDDQLMQIAEELDDYQMELINQLSLLYSQIMLNEIVPNGETVSASMLNRYYKHRRQLKELKTYGAARDKKIREQLDHLYAEYIGQVPKDSKFDFTKDLKKLMDKSDLGQKIKGEIEAGDYLPKQRTSANGVIPHQMHQQELDQIIENQKEYYPWLAEPNPVEKNIKNAKYKLDQLVSFRVPYYVGPMITLADQQKTSKASFAWAVRKETGKITPWNFDEKIDREKSANNFIKRMTNKDTYLLSEDVLPASSLLYQKFTVLNELNNIRVNGRKLQPALKQAIYTDLFQKRKTVNLKALTNFLTVHEPTLTKPKIEGLANGRSFNSSLGTYIDMSKILGDRVDDLNYRDDIEKIIEWSTVFEDSEIYGVKLQEIQWLTNEQREKLVRKRYQGWGRLSKKLLTGITDENGQRIIDLMWDTNKNFMQIVHQPVFEEQITELNQQLLQDADKAPLEVVDDILADAYTSPQNKKAIRQVVKVVADVVKAVGNAPASISIEFARNEDRNKELKNSRRRSIEKLYHETAEKLVKQTNLLEELGNVKDLNDRYYLYFTQAGRDMYDGTPINIDEISTHYEIDHILPQSFLKDNSLDNRVLVKKSENAAKSDRVPAKLYGAKMRAFWKQLKESQLISNRKYLNLMTDPEQVDKYQMQGFVHRQLVETRQIIKLAANIFGSLYPDSAVIETRAELTKQLREKFSLYKVRDVNDYHHAVDAYLTAFAGHYLYQRYPKLRPMFVYGDYAKIYADDLKRLRSVNLFHDLEKDQYNSGTAVNPETKEKIVDVDWLSDYVSKIQHFKYMLISKAIYTQRGQLYGATILPAAQVDKISAPIGIKNDKPVDIYGAYTNEVAAYMAIVRVNGKKPKYKVVRMLQRLKMAEQEGHEQYMQTLHDILSRNFTSLKKNRKTGLKEAVVKDFDVLVPCVRYNQLVIDGDVKFTLGSAAYQHNAKQLVLSDHSLETLANNFEYVRKHPDEADERMTMLYDDILDQVNHYFTLYDKNKFREKLNAGRDKYLKLPTFSQFENNKKTAIGKSEAIINILRGLHANATITNLKCLGMSTPFGQLQSQSGIELSENAKLVYQSPTGLFSREVLLKDL

SEQ ID NO: 17018 - protein, 1366 aa, unidentified
  REGION 1..1366: note = Cas Enzyme sequence
LKNENYNIGLDIGTSSIGFAVTDEFNKLARVKGKNYIGVRLFEEGETAAERRQFRTTRRRLGRRKWRLGLLEEIFAPYIAKADPYFLARLKSSNISPKDTNKKFIGSILFPNETDTAFYAKYPTIYHLRKALMTEDKKFDIREIYLAIHHIVKYRGNFLVSTSISNFKQESVDFTADVSELNESFMQIHTESKFEIDTAKVQEISQLLLDNKITRMDRQKQVANVLAKNSGDKEADKINKKIATEFCKAVLGNKAKFNVILGEDAVDSDWSFKMDDENSDEEIEILMGQTNGQQQNVLRIIHQWYSQITLNGIVPDGQMISESMIDKYELHRKHLLLLKQQIKVTKDKKKAQQLHEAYEQYVHGTGAKKKLTQDDFYSKVTKNLETSDFSDEIKKQINAETFMPKQRTSANGVIPHQLHQQELDKIIEKQAKYYPFLAELNPDTKRQNIAKYKLDELIAFKIPYYVGPLITTEDQKKTSGKSFAWMVRKEPGKITPWNFDQKVDKMASADQFIRRMTTKDSYLITEDVLPAESLIYQKYKVLNELNMIRVNGNKLTKHDKQNIYQQVFEKYKTVNVKKIQNYFLTDGRYQHAPKITGLSDDNKFNSNLSTYIDFKKIFQDVVDDPQKQKDFERIIEWSTIFEDRHIYEVKLKEISWLNDEQRKELKKKRHQGWGRLSAKLLTGIFDENGYSIMDQLWNTQKNFMQIQAEEGFNKKIQAENSKHLEKNDFEDILEDAYTSPQNKKAIRQVIKVVEDIQKAMGTAPQKISIEFTRSADKNPRRSVERQHRLEEIYYNDAKEIVSKEMQSNLQNFTDNKQTLTDKYFLYFTQLGMDMYTGNKINIDNIGNYQIDHILPQAFIKDDSIDNRVLVSSAINNGKSDNVPLNMYASIRVKNDVQNEWKNLAEHGLISQRKLNNLMTDPESIDKYKAHGFIKRQLVETSQVIRLVAEILNDKYHGETEIIEVRAKMNSQLRKDFDLIKNRNVNDYHHALDAYLTTFIGNYLYRRYPKLRSYFTYGHFKKIDDMQLKQFNFLRDIENDKKANYINDNGELLWSRERDIAYFKKIYNFKYMLVSHEVSTRQGAMFKQTIFPAAADAKSKLIPIKNDKPTAIYGGYSNNNDAYLAIIKLAKTGQFKVVGVPQRAIVKLKQAYDKGLGDYSNVLYKVLEPKFTKKKVNRKTGEITYQVEKFEIVVPKVSYRQLVIDGDQKFMLGSSTYKYNAKQLVLSENAIKILDKKSFDQSGYKSSDLDAVYDEILSQVDRYFSLYDTNKFRQKLHDGRKQFVNLPNENLFDGKKLKQNGKREILNEIMNGLHANATMGYLKAIGFATTPLGQLQSPSGIELSQDAVVCYQSPTGIFERRVALKDL

SEQ ID NO: 17019 - protein, 1080 aa, unidentified
  REGION 1..1080: note = Cas Enzyme sequence
MRVLGLDGGIASIGWAFIEIEENNDGKSARGGIIDAGTWMFDAPEEKSQTGTKLKSELRRTFRGQRRVIRRRRQRMNEVRRILHRHSLLPSAERDALKQPGLDPWKIRAEALDRLLSPVELAVALGHIARHRGFKSNSKGAKSTDAADDDSKKMKKAAASTQEKLARFETPARMMCEDESFLVPGTDVRRFRNREGDYSRSLMRDDLAAEVRALFRAQRRLQADHATKELEDEYMDETRENRAFHQRPLQDSEKLVGPCPFEPEEKRSPKRGYSFELFRFLSRLNHLTLREGREERTLTVDEIRTAAADFGVTAKFTFAALRKKLRLPETTVFVGVKTNEEKNDVVARSSEAAAGTARLRRIIVDALGELAWGALVNAPERLDKIAEIITFRNDLDRIREGLQAAGFDAALIEALVKAAGNGALDAFTGAGHISAKAARNIIPGLYKGLTYDKACAQAGYDHTASRERNAFDVGVHGKEALKRILQEERISRELVGSPTARKALIEAVKQIKAVIEKYGVPDRVHVELARDVGKSIDERREIHFGIEKRNKQKDKLRELFEREVGRAPQDGDRGKEELLRFELWNEQKGRCLYSDAYISPTQLVASDNSVQVDHILPWSRFGDDSFLNKTLCTAKANQEKKGRTPYEWFKTDKTEAEWDAFVARVESIQYMKGFKKRNYKLKTAEEAAEKSRNRNLNDTRWTCRLLAEALKQLYPANEKNAKDEGVRRIFARPGALTDRLRRAWGLQWFKKNEKGERIPDDRHHALDAIIVAATTESLLQRATREVQEIERKKAHYDPAKNGYDLMKNITAPWPDFREQALEAVEKVFVARAERRRARGKAHDATIRHIATRDGEQKAYERKKVADLKLSDLERVKDADRNAALVESLRKWIAADKPKDNPPLSPKGDPISKVRLVTKNKVNISLDTGNPDRLATVDRGEMARVDVFRKANKKGKYEYYLVPIYPHEIATMDVPPMRAVQGGGDDDKWPEIDSTFEFLWSINQLSLLEITKPDGEVVRSYFRSLDRNTGALTVSDISNSTATRKGIGTRTLLVFKKLHLDRLGRIFEVERELRTWRGKVC

SEQ ID NO: 17020 - protein, 1080 aa, unidentified
  REGION 1..1080: note = Cas Enzyme sequence
MRVLGLDGGIASIGWAFIEIEENNDGKSARGGIIDAGTWMFDAPEEKSQTGTKLKSELRRTFRGQRRVIRRRRQRMNEVRRILHRHSLLPSAERDALKQPGLDPWKIRAEALDRLLSPVELAVALGHIARHRGFKSNSKGAKSTDAADDDSKKMKKAAASTQEKLARFETPARMMCEDESFLVPGTDVRRFRNREGDYSRSLMRDDLAAEVRALFRAQRRLQADHATKELEDEYMDETRENRAFHQRPLQDSEKLVGPCPFEPEEKRSPKRGYSFELFRFLSRLNHLTLREGREERTLTVDEIRTAAADFGVTAKFTFAALRKKLRLPETTVFVGVKTNEEKNDVVARSSEAAAGTARLRRIIVDALGELAWGALVNAPERLDKIAEIITFRNDLDRIREGLQAAGFDAALIEALVKAAGNGALDAFTGAGHISAKAARNIIPGLYKGLTYDKACAQAGYDHTASRERNAFDVGVHGKEALKRILQEERISRELVGSPTARKALIEAVKQIKAVIEKYGVPDRVHVELARDVGKSIDERREIHFGIEKRNKQKDKLRELFEREVGRAPQDGDRGKEELLRFELWNEQKGRCLYSDAYISPTQLVASDNSVQVDHILPWSRFGDDSFLNKTLCTAKANQEKKGRTPYEWFKTDKTEAEWDAFVARVESIQYMKGFKKRNYKLKTAEEAAEKSRNRNLNDTRWTCRLLAEALKQLYPANEKNAKDEGVRRIFARPGALTDRLRRAWGLQWFKKNEKGERIPDDRHHALDAIIVAATTESLLQRATREVQEIERKKAHYDPAKNGYDLMKNITAPWPDFREQALEAVEKVFVARAERRRARGKAHDATIRHIATRDGEQKAYERKKVADLKLSDLERVKDADRNAALVESLRKWIAADKPKDNPPLSPKGDPISKVRLVTKNKVNISLDTGNPDRLATVDRGEMARVDVFRKANKKGKYEYYLVPIYPHEIATMDVPPMRAVQGGGDDDKWPEIDSTFEFLWSINQLSLLEITKPDGEVVRSYFRSLNRNTGALTVSDISNSTATRKGIGTRTLLVFKKLHLDRLGRIFEVERELRTWRGKVC

SEQ ID NO: 17021 - protein, 1121 aa, unidentified
  REGION 1..1121: note = Cas Enzyme sequence
LPILLRVFRLDKINVNTYRSCNMSLHLAFDVGHSSIGWSVLLASSPSSPALLGTGVVTFEADNCLASKRRAYRRQRRHVRATRQRIARLEKLLAHLEVLSATDLEAKHRQAGGHSAPWFLAARVLADNGAAQHLLTWVELWDVLRWYAHNRGYDGNRRWSSAEQADSDEAQDDTEKAQNALALMAEYNTPTMAETMVRVLGLDVAGDKRASRVRFKAKNAAFPREIVEQEVVRILEAHRGHLRGIDNDFISLLTTRTLSKDQRDQLAAIGIRLPARYQGGLLFGQLVPRFDNRIIATCPISGEKVPTRNCPDFLRYRWAMQLAAVRVAESEAAELRPPRPDELRTLDNRMRAEGRLTKLEFKKAVRTLPGIVRDNLDTLLMHPDAEEALLLDPVTQLVRSDRLKNFWPILSPRAQKRARDAWTRGKTLTLSNLRALAEKYGEDTAAAAFDSAIINRLDAANTRKRKKDGGLTRESLLAEAFSVKKLSGRAAYARPLLQRAAEEVFAGKHPKEEGGCLYLDEAKRRAQLNRRIEEQTNNHLVRHRLLILERLLRDIVNDPAFANGDRTRVSRITIEVNRDLREMSGKTAKQIEQDLGLRLSNHDKVSKKLEAAFEEQTFSGRPIQITAGLIRKARIAEDLGWECPYTGSKFEPIDLVSRRVDKDHIIPRSQRPSDSLDSLVITYSEINKWKGNRTAWEFVRDEQGKPVPGLPHLSIRPLNEYNEWVEALEAFKGHDDDKRRKKNRKALLLLPRYEEKNKSFLPADLTQTSQLVRLGAQLITRFFADLPAPPQIVSLPGSVTAVVRRSWNLLGCLSLAAPQILDPNDPHRTKTKTEMRDITHLHHALDACVLAYASLLLPRDGGLWELMLKRNPNESDRARLAATGCFDFDSQGRFGLRDLPKDWKHQISQRLAEKRVVQHVPADMSGLRVEENTRGVEKVNNGRVHLRQQSRDPKTDAITIKRTNETLEKVVGLQPKDGNGKLKEVRGVRVITDNFGIAILDHASEGTEKFAIIPWHKVWHRIKELTQRNGGQPPRLLRPGMLFKVPRGRYQKSVWSLRGVAINQKAGHVVEIAESDVVNSREPRKPYCKQNVSLNTLIKDGLETIKTTLVGVPLTAINTTD

SEQ ID NO: 17022 - protein, 1060 aa, unidentified
  REGION 1..1060: note = Cas Enzyme sequence
MAKIRYRLGLDVGANSIGWCVYRLGTNDEPEAIVRMGSRIFSDGRNPKTLASNAAERRQARQARRRRDRLLKRRQRLMQALIAGGLMPTDAAERKALEVSDPYTLRARGLDHALTPFEIGRALFHLGRKRGFKSSRKERKDAEAEKELGKVSTAIAALRERISEANCRTVGEYLATQRAQRLPVRGRRSADGGYVLYLQRDMVAEEFDLLWAAQAAHHPELLTEALHAELRDILLFQRKLLPVLPGRCLFETNEHRAPLCSPLQQRFRILQELNNLRWVEGRNESTLSLEQRNVLRDALLSKSKLTFAEARGLLGLSKRSPIRFNLEDGKRKELKGDFTSVQFAHPAALGERWWQLSESQREALALLVERADAAEELEDALAALPANPAPAVAAARLQPHELDAFEPLTTLRQGFSRDERAGMARIQLAEGFGSLSLKALGKIVPALDASVITYDQAVLAAGYTHHSNFYTGELHRALPYYGELLGGYTSPMPRSKAETERLHGRIPNPTVHIGLNQLRLLVNALIKRYGHPEGIVIELAREFGLSGERRREILKEQEGAQERNRKLDAQLEALGIRPSRENRQKLMLWDELGRSDPLTRRCIYSGRSLSMATLFTDEVEIDHILPFSRSLNDGVGNKVLCTRQANRDKGNRTPHEAFGHSPGQYRWDEIEARVAELPVRKARLFHENALETFLDGRDFLDRHLSDTAYFGRAARQYLSAICPPALIAVSTGKLTSLVRGKWALNELLSGDRSKNRDDHRHHALDAAVIGLCSRSLIQRLATAARRAEEDGQNRLLERVELPWPTYRDDLRRMLAGIVVSHRPDHGPEAALHNDTNYTMRGAPDKRGNPLVGRRVPIDGFTKPGDVDNVADPEIREQLRACLQAPSTKEAKAAVAAYSARTGIRRVMKEERLAVIPIHDRRSGEPYRYVKGDGNYCYDIWQRPDGRWDGEVVSLYAANRPGFDPMARHREDGTPLKMRLRRNDLLAIEQDGARKVMRIARLSEGMITLAPHNEANVDARARDKSSGFKYLFKSPNALVELSARPVGVDVLGYVNDPGWRA

SEQ ID NO: 17023 - protein, 1022 aa, unidentified
  REGION 1..1022: note = Cas Enzyme sequence
VSIQYRLALDLGATSLGWALVQLDKHRNPCAIIRAGVRIFPDGRNPKDGSSLAVTRRAARAMRRRRDRLLKRKARMHKLLVDHGFFPADEPARKALELLNPYQLRAKGLDEVLMPAEFARALFHINQRRGFQSNRRTDKTDADSGALKTAIKGLRAQLDPAGTDGKARTVGELLWRRMQDDKIRTVRARYREVRLPKDDGKIRVDKSYDLYIDRAMVEAEFDALWTRQSALNPDAYKAAAGAALKDCLLHQRPLRPVRPGRCTLEPEEPRAPLALPSQQRFRILQELNHLRLLGGRLLEEPLTLEQRDKLAAALEQGHKSFDAAIPKLLSLPGTVRFNLADAKRNELKGNATSILLGKKDYFGPVWHSFSEVRQDEIVMRILDEESEATLVSWLLESTTVNEAQAERIANAPLAEGYGALSAKALARILPALRAEVITYDKAVLAAGYDHHSNISHAATTGEILPELPYYGEYLQRHVGFGSGELKDPPERRFGRIANPTVHIGLNQVRVVVNALVRRYGHPSEVIVEVARDLKQSLEQRKEAQAQQAKNQQRNERLRKLAAEVLQIAEARVRRSDIDKLILWEELSFDVADRRCPYSGVQLSAALVLSDEVETEHILPFSQTLDDSLNNRTVAMRRANRVKGNRTPWQAREDLAAQGWNYDDILLRAERMPKGKRYRFAAEGYEKWLRDDKDFLARALNDTRYLSRVAREYLSLVCPARTRVIPGQMTAQLRAKFGLNDILGLSGEKNRDDHRHHAVDACVIAVTDQGLLQRFAQASADARGKGLDRLVETMPDPWPTYRAHVKRVIDALLISYKPDHGYEGAMHNDTAYALLGNGLVSVRKTENGERRREVGPLKVIEMHSVKAGERHGHLADGSPRPYKGYKGDSNYCMEISHGADNKWEWRVVSTFEAYQVVRTDGLPRLRDARVGFDGRPLVMRLMIGDYLRAEFKGELRLLVVKKIKANGGIFVAQANEANVRQREDAKDPRLIYGSFSAGSLRKAQGRAVSVSPIGELRDPGFKG

SEQ ID NO: 17024 - protein, 1070 aa, unidentified
  REGION 1..1070: note = Cas Enzyme sequence
MEVRQGGRKMARIKYRLALDIGANSLGWCVYHLDEHNEPDAIIRLGARVYSDGRDPKTLASRAADRRLARQARRRRDRATKRRVKLLHALVKFGLMPANDTERKQLQAADPFQLRARGLDLPLSAFELGRALFHLARKRGFRSSRKDSREKESAKETGRVNLAIQGLRERIQLAQCRTVGEYLAQQHAARAPVRARRTSDGGYVLYLQRDMIEEEFIALWSAQQAHHPRLLTDTARDELLDIMLFQRKLRPVEPGRCPFETREYRARLSAPLQQRFRVLQELNHLRVNEGIGDRALTLNERNRMLEVLSMETGPKPVSFSRLAKAAGLRKDDFSLGRDPKRTGLKGDPINSRFCADKAIGKAWITFSSAQQYALAVLVEQADQTETLEKALLALPDNSPEAEEILRGIFDSTERDAISTALRTFPLKLSDAQAREISSFILPDGFGSLSLKALSLIVPELERDVVTYDDAVRRAGYQSHSEFHTGEIFMRLPYYGEVLKGYTSPMPTSKIESERRYGRIPNPTVHIGLNQVRLLVNALIKRFGLPHQIVIELTREFGASGEKRREITSKQKENQERNDNLNAELQQLGIRATRENRQKLQLWKELGKNDAMHRCCVYSGQPMGIAKLFTDEVEIDHILPFSRSLHDGIGNKLLCTRQSNREKGNRTPFEAWGHTGRWLEIEDRAARLPEQKRKLFSESAIEIFLDGKDFLARHLSDTAYLGRAAKQYLTFVCPQNEVWVSSGKLTGMIRGKFGLSRLLAEDGAKNRNDHRHHALDAAVIGLCSRSLIQRMAKAAENAESKGENRLLAQMDLPWPEYRDNLSACLELLLVSHKPDHGKEAAMHNDTNYGLRDGPDKSGNPLVGRRKPLETIKHARDAESIADAALRNEIVQLLSPLISPKDIKAALLEFSTRTGIRRVICQERLSVIPIRDRRTHRPYRFVKGDGNFCYEIFRRPDGKWDGEVITSFEANQNTFVESKYVAQNGTPLVMRVHKDDVIALELDGNIRRMRVARFSEGMIALVDLHEANVDARTRSKNGLKYFFKSPSALKPLHARLIGVDILGYSNDPGYSA

SEQ ID NO: 17025 - protein, 1072 aa, unidentified
  REGION 1..1072: note = Cas Enzyme sequence
MAKIDYRLGLDLGTNSIGWCVYALNDAGEPDRIVRLGARIFSDGRDPQSLASLAAGRRLARQARRRRDRVLKRRHSLLAALIESGLMADDEAGRKALQQSDPYRLRARGLDAALSAHELGRALYHLCRKRGFKSSRKDRGDSEREKEEGKVKAAVRALRERIAAAGCRTVGEYLAQQHAMRKPVRAKRSADGEYVLYLQRDMVQEEFERLWAAQQPHHPQLLNDALRHRLMEILLFQRRLRPVRPGRCLFEEDEPRLPLCAPLQQRFRILQELNNLRVKEGVAYRPLTLVERDAMLAMLLREPRQSSFAKLAKAAGLKNAAAFNLESEKRKGLKGDSTSSRFSAPEALEETWQGLPDLTREALAVLVERADQDEALIAALRALPTDLAPAEDVLRPQSGEAHWLQALAHLPPLSESQARAISTIRLDEDYGSLSRVALARIVPELEREVVTYDIAVQRAGYNHHSQLHTGEIFQRLPYYGQVLRGYTSPADSAKAPDERRYGKIANPTVHIGLNQLRQLVNAIIRRYGPPTEVTVELAREFGLSGERRREIVREQADNQKRNERLDARLIALNVAPNRDNRLRLRLWDELGSDDAMDRECVYSGRRFGMSMLFGDEVEIDHILPFSKSLHDGIGNKVLCLRQANRDKRDNDPFSAFGHSPPDYDWDAIQARVERLFAESKDPAQRRKAEHFREGALAKFIGDQDFLARHLNDTAYLSRVAKQYLSYVCHKDKVWTSTGKLTGLLRGKWGLSRLLGGDGIKNRDDHRHHALDAAVIGLCSRSLIQRVATAAARSERLGENRLLENLEYPWPQFRDALRDALARVVVSHKPDHGREGGLHNDTNYGLREAGDAKTAQLVAHRVPLESLKRLSDLDALPDARLREALQAALAGCDSDKAFKAALAAFSQRTGVRAVRKYERLSVIGIRDRRPERRDAAPYRYVKGDGNYCYDIFVRENGRWDGRVVSLFAAAQWNESDYRNPPKRTPEGRPMVMRLRKGDVVAIEEDGAVRLMRVAKFTEGKIALIEPNEANVDARTRAKEMNYVFKSPSTLQPLRARIVGVDILGYVNDPGWRT

SEQ ID NO: 17026 - protein, 1069 aa, unidentified
  REGION 1..1069: note = Cas Enzyme sequence
MAALNYRLGLDLGANSLGWCVYALDDEGEPGRIVRMGSRIFSDGRDPKSLASLAATRRQARQARRRRDRLLKRREKLMHALIEAGLMPSEEAGRKALQALDPYALRAKGLDAALSPHEFGRALYHLCRKRGFKSSRKERGEPGKDKEQEKESGKVNAAIAALKARIEAAGCRTVGEYLAREHEQRRPVRGRQTPDGQYVLYLQRAMVEQEFDALWDAQRPHHPAVLTTQLRDRLKDILLFQRRLRPVLPGRCLFEESEYRLPLCSPLQQKFRILQELNNLRVKDGIGYRALSLDERNAMLAALMATSGLVTFARLAKVAGLGKAAAFNLESDKRKGLKGDAAGAQFGAEGVLGETWQRLPELAQEALAVLAERAEDSAALVAALRALPGDTAPAADILRPRFFEQPWLEALVQVPPLTESQARAIADIRLPEDFGSLSRKALDRIVPELEREIVTYDIAVQRADYASHSQLHTGEIFDRLPYYGVVLRGYTSPMESARVEDERHYGRIPNPTVHIGLNQLRQLVNALIRRYGPPRQIVIELAREFGLSGERRREIEREQAENQKRNEALDAEIMALGLAPNAENRLRLRLWYELGEDDALDRVCIYSGQRIGKAMLFGDEVEVDHILPFSRSLHDGIGNKLLCLRRANRDKRDRTPHEAFGHSPPGYDWAGILERVERHFDENRKPGVRRKAEHFREDAMERFLDGREFLARHLNDTAYLSRAAKHYLSYICHPDQVWVSSGKLTGLLRGRWGLNRMLSGDGAKNRNDHRHHALDAAVIGLCSRSLIQRMSDAAKRAEGRGENRLLESLDPPWPGFRDELRDTLAKVVVSHKPERGREGALHNDTNYGLRGEPDRKGVPLVGRHVPLDSLKGAGDLDGIPDQGLRDRLHALLAPLSSPKDIRAALQAFSSETGIRRVLKQERLSVIPIADRRTDKPYRYVKGDSNHCYDIFRREDGRWDGEVMSTYDAHREPLEQRPTHARNGRPLVMRLHKDDILSMEIDGVSRLLRITRFTEGMIALADHHEANVDARARAKELKYIFKAPSALRACKARPVGVDILGYVNDPGFRE

SEQ ID NO: 17027 - protein, 1057 aa, unidentified
  REGION 1..1057: note = Cas Enzyme sequence
MARIKYRLALDMGANSLGWCVYRLDDSDEPVAVVRMGSRIFSDGRDPKTLASRAADRRLARQARRRRDRVLKRRHKLMQALVQFGLMPADAASRRQQQELDPYALRARGLDQPLTPYELGRALYHLARKRGFRSSRKDARNEESAKESGKVHAAISALREKVEAANCRTVGEYLGRQHAERAPVRARRNSDGQYVLYLQRAMVAEEFDALWTAQQPNHPQLLTDNARDTLRDIMLYQRRLRPVEPGRCQFEPEEYRARLCAPLQQRFRILQELNHLRVRDGVGDRALSLDERNRMLQLLLAEPGLATFSKLAKAAGLRNASEFNYGRDEKRKGLKGDVATARFAAPDALGETWHTLTENQQYALAALVEQADQTEQLVASLQALPADSTQVAEIMKGQHDEARVIHALRSLPFTINEKQALALAAINLPDDYGSLSLKALSRIVPELEREVINYDEAVRRAGYQHHSQFYTGEFFMQLPYYGQLLAGYTSPMPTAADKDERKYGKIPNPTVHIGLNQVRQLVNALIKRYGHPHQIVIELTREFGASGERRREITKQQAEAQDRNDRYNTELEKLGIRVNRENRMKLQLWEELGRDDAMDRYCIYSGKRLGKALLFSDEVEIDHILPFSRSLHDGIGNKILCTRQSNRDKGNHTPFEAWGHTNHWVEVIERAERLPEHKRKLFREDALETFLGDTDFLARHLNDTAYLGRATKQYLTGICPPNFIWVSTGRLTGLIRGKFGLSKLLSDDGIKNREDHRHHALDAAVIGLCSRSLIKRMSDAARQAEEKGEQRLLETLELPWPTFRSDLGASLNAIVVSHKPDHGKQAALHNDTNYGWRGAPDKRGNPLVGRRKPLESIKNASDAESIANETVRSEIVQLLAPLSSAKDIKSALLAYSDRTGIRRVICEERLSVIPIHDKRTGQPYRYVKGDGNFCYEIFRKPDGRWDGEVISLFEANQKSFVVTPTHAQNGMPLVLRIHKDDVLAVETENGTLRYMRVAKFSEGMIALVDLHEANVDARTRSKSLRYVFKAPSALKPLKARLVGVNILGYLNDPGFHD

SEQ ID NO: 17028 - protein, 1112 aa, unidentified
  REGION 1..1112: note = Cas Enzyme sequence
MAYRLGLDVGTASCGLIAWTLDEQGQPSELAYHSLDIWSEPLLPAKSSGVGEPRNAARRAARMLRRGIYRRARRLRRIAHLASLLGLDRCAVPPDSGQDIHRLRALAAEQRVELADLLRIFLRMAKNRGPSGAWVYAEPELTSGKGKRGKKNPSETALADEAVATLVEADKKAAEEKKGIVGGVRELEKLMREAAQALGKTELTLGQYLHYRRERGESVILGKPDAKPCPLYPSRRMVENEFNRIWDTQAQFHPVMRDRTVRNQFFGAIFAQRPLKSPAPMVGRCPLEPTLPRAPAAQMAAQAFRIEKQIADLRWGMGKRAQPLSPEQKAIVRELLNSQGEVAFSTIREALDKAGHPGPPGCGLNMERSSRESLKGNTTLAVFRKLGLDAEWNALDEKTQVQVINFLADLGSPDALDSDDWHLNFETVQKDPATGKRKKREFSTAMVAFVNHLRQRPKFGRLSSMGFDGGRMAYSIKALKKLTELMQEQGLDERAAAERAYADHFKAKPLSCELPLPPETGNTVVDVALRQVYRAVDRAMKALDGPPSQVIVELSRDMALGIKKRSEIETKINVNNKARREAAQAIAEHGEQVTDKKIDRYLLWEQQMHYCPYCDRRIELGEALGSETEREHILPRALTRVGGKRSQLVLAHRTCNQQKGNRTPWQAFGNDEALWRIIETRAEQLREKKQFGKARLLLLKDWEEEVLDDKAIQDFTDRQFHEGSWIAKLTAQWLRTVCADVAVSRGELTAHLRRIWKLDTVIPEVRFAQKLPVLDREGKPISEEEFRHHKLWWEGHGKEAGGIETERKPNKRIDHRHHLVDALVISLTDRKLFQKMAENYKQEREKERRGERAKLSLYEAPPIPSLRELAVEIVTNAKIRHKPDRYPDGPLFEQSAYGLNRKPNAEGKQQLAISKPLKALIDNKGSAKKTRKALENIESEVTRSTVLKAFDSRIAAGTSIKQVFDEAILHPQFGTPIRRVRLLGDSEDTATRVVHTNRHGTQLEKRYPHAGNAYLEIRVEGNKLVGAPRLVKPLEAMREKGLRPPTGVRRFWKKDTISYNGARYIIGKIISKNGGTLCLVPVTETCTHDELPHELKKSVSGKSLASVTIIDV

SEQ ID NO: 17029 - protein, 1061 aa, unidentified
  REGION 1..1061: note = Cas Enzyme sequence
VRLVRLGVRAFEAVRGEGANATTPAEERRLARSQRRRLRNRKRRIREAVNLFAESGLVEDRAELETALKTLPGDKTPWQLRVEALDRRLDTREWLRVLFHIVRHRGFKSTRRGEIETADNQEREKLGQMLQGIRSIHDGMVSHGYRTVAEYMLSADWPHGEQKRNKGGQYICTIGREDLIAETRTLFAAQRQFGNPFASADMEARYIAIVDEPPNLTEGPDLVAKVGHCFLEPTERRAPRATFTAQRFMALQTLANQTLTNTTTGERRRLTGKEIRALFDDALAVKELKYKRALKTLNLDDRWLFEVRGRTKRSKNLAEMQSETLLKLESYHKLRDALEKDFPETWQRIRTDADMMDEVASALTYWLRPDTAYQALLELGIEEAAARRLADSVVCDGHARLSLKAMRNLIPYLEQGYVYSDACARAGYDHSRRTAGSKSDRIPPLDTLEDFNSITNPNVKRALTQARKVFNAIIAEYGVPSRVVVELAREAAQSPTMRREIERRQRENRQHKERIFEKVLEVAPSVSPERVWKKHLLYEQQEGKCAYSLKPLDLTRVLTDSTYTEIDHAVPRSVSFDDSLANTVLVLTEENRNKGDELAAVYVRRAHGDEHYERYKAWVQGCTMPAKKKRLLLTEELTHEQRQELEARYLVATQYAARYFLQVVKSHVDIPESRVLAVNGRITSDLRWHLGLGAEKDRQASDTHHAIDATICALADHETVHRMARYFKLRETATRTPDGTWVDANGVIIEPPTLEPWDGFRDDVLQHVADVVVSRMPNHRLTGRGHKETIYSLKHVRKHLDAVPTHGRITLSADTPRPTKRTRLDQLSDTQIRDILKQPSPVLVDEDANWRLYSLVRERLRAVEHGQGKTWAERAFGPQAEPLRMPTNDGRPGPVVRSIRIFTDTRSGLAVRGGLAENDTIVRLDIYRKVDTRGKSRHYVVPVYAADVAAGWTPKRAAVQGKPESEWPVMDESFEFLFSLFPGDYFRVWKSETEPGPLLYVTSFDRNSVRISANLPDRSNRSTDGKVEAVRTAVATSPKVEKFEVDLLGIPHLVRSTSGIG

SEQ ID NO: 17030 - protein, 1153 aa, unidentified
  REGION 1..1153: note = Cas Enzyme sequence
LCLKLCLDSYFFLAMPGTVCKNLFGEIRIWGNTQPLSHPARDTPPHMNLTLGFDIGHASIGWCALGADQPSPSTPSILGAGVVTFPTDDCLASNRRQLRRTRRHIRSTRQRVERLKCWLSHRGVLGRTDLDRPGHPAPFLLAAAALRGHRTLSAWELWTVLRWYAHNRGYDGNTRWASHSIEQTEAEADTKKELAARALMQLRGTQTMAETICACLGLDPAESGRRISSHLPYRTLDAAYPRRVVESEVGALLSKQMGSTPGLDAQTLRLVMTRDPLGVEDRALLVAAGIRIPKRYEGGLLFGQLVPRFDNRIIARCPITWATVYDREMTAGRNPQQAQKAAEREAKVPSARTVDFLRYRFARVLANIRAGGAPLPSTVRQALMRLGEERGRFTRTELRKEVEALTGTKETNLESFFNLHPDSESALVVDPAAAVPHTNRVIKALWQILPDPTKAHVLERWRRSLGVRVGDIVALATSQEPDRATEFATHAEKGAPKGKTSSVPAGVQDPLMRVIRPDYPNGRAPYARPVLKRVVEEVLAGFDPTKPLHSTEHPEGETKPQNGVLYQLHDPASRARALQNQRPLPKLTNNHLVRHRLLILGRLLDDIASEFCPDNQNQVTRVVVEVGRDLKEFSGMSAKEIASELKSRLRHFKTAVEHLRREAPGLPMSGGLIRKCRIAMDLGWTCPFTGSIYSAADLPHLEREHVVPFASRATNALYALVLTWPEVNRMKGKRTARGFIQEEQGHPVPGKPNLQLMTLARFDAYVEALDTKGHPDDARRKRARKALLAMADFNERDQGFTSGQLTQSSHLMKLALREVSRRFPLAHTDAIPGVVNAEIRKAWSLSGTLVRACPEVIDPACQTLLPKDQIRGITHLHHAVDAATLTLTAHYFPLQFRGVDVKGKIWEALLRRNKSEEDVRLLTGLKVVRRDSQGQMQLAAPPDTVKDQLAQRLCEWRVVQHVPADRRGAKAELLTWGICSHDGEGDSARITLHQQTSSVVDGRRVILLKEREERAGKLLGLKPKTGDGKLSRIKGVLIVGENYGLALDPEPTIIPFHSVHQALLELRSRNHGKPPRVLRPGMTIKLSGQGARNGLWRIYSVQASLKVDMTRPHIVGRPKNGPSVWREVPVRGLLMNGLEILPPRYTAHPALAT

SEQ ID NO: 17031 - protein, 1070 aa, unidentified
  REGION 1..1070: note = Cas Enzyme sequence
MFNNNKTARGSGMPQIPYRLGIDLGSNSLGWAVLRLDDDGRPDYLTRLGVRVFSSGRHPKTGASLAVDRRLARQQRRRRDRMLRRKRRLLAALRDLGLFPTSTLKGEALKNLNPYALRHKGLSERLEPNQIGRAIIHLNQRRGFRSSRRTDRGEEASKEKGKIATAVTRLREKLAEAGVESLGSLLYARLLAGKGTRARRFGEGAKAFYEFYPDRKMLEAEFDLLWDRQSRHHPDLLTEDAKERIRGILLFQRPLRPVRPGRCSLDPTVDRAPLALPSAQRFRIWQEINNLRWRRPGEIVENALTDDQRRRTFDFLECAGRRTFSAIRRTAGLPKDAEFNLQGLKRDFLLGNAVTDALGGEGCFGRRWQSMSPEEQDAVVCQLVDDSLSDEALLGRLQAAYGLNAEQAEEVLRVKTPDGYGRLGLPTIQKLLPHLESGLTFDKAVAAAGFEGTNTQGDGSLAELPYYGKVLERHVAFGKGEGSDEERYGRIANPSVHIALNQLRYLVNALIRRYGKPREVVLELTRDIKLGWNKAREVEAEQARRQQENETLRNELESLGYAATGENLLRLRLHKELCGVDGLSAFCVYTGEQISIGKLLSPDVEVDHVLPYRRTLDDSIANKVLCAARANRLKGDSSPWEAFGHSPPGYSWEGILDRASRLRRNRYRRFAEDAMQKFDANDGFLARQLTDTAYMSRLAREYVSFICPPNKVWVTTGQLTGMLRAKWGLNKLLSHDDLKNRRDHRHHAIDATVIATIDRALVKRVSDASARASAAHTGRLLDNLDHPWPTFLHGLENALSQVVVSYRPDHNVAGPLHNDTAYGSAEDRESDVPGVAVKAAVHHFVPLATLISRKAADVRNSLGDTWLAQALAGLVEAHQDDRKALRAALDEFGQRHGIRRVRWTESQTVIPLANHQTRRVYKYVVGDGNHCYEIFRGKDGKWSGRVISRFVANGPAYRSFADSGSFRHSTFDGVPLVMRLMPGDSVRVGVDGLELVYRVQKISEGIITLAYHLGAGDQTRNPLLISGIKPVRYVAPSALQSLRGRRVFVDILGRVFDPGFKDVAPDTGSR

SEQ ID NO: 17032 - protein, 1104 aa, unidentified
  REGION 1..1104: note = Cas Enzyme sequence
MKRWRLGLDVGTASVGAVAIDLDDDGKEVAVPWHQVRIFSEPNEKGQTGLTPKKAARRAARLARRQIDRRASRLRRIAHLAPLIGIDPRAVKPDGRKGQELPDIRARAAREPIELPDLLRVLLRMAKRRGYAGGFRAVKSEKELGVVQSGSQLLEHELAALAASQGAEKATLGEFLAKRRADGYPTRLKVAQEGVPDLFALRGTVEAEFDQIWAAQALHHNVLRSQVDGRPVREIFREAIFFQRPLKSPAASVGLCPLELHLPRAPRAQMAAQEFRIEKTIADLRWGSGRMAQALSWEQSRVIAAVLNDPEKLTAKGLVSFNNLYRHLEVAGCPRPAGRSLNLDRFSREELLGNTTLVAWKRLGLLAQWSELSAAHQVSVINLLADLGSPEQLEPDDWHQRFLRADARANDPNRFRRFAPAVVSFVDGLRNCDGYGRMTTMGFDAGRVAYSVKALRRLTDWLRDPSWSASPGKNARVDEEAAVRECYPNNGESSARGELTYPPKTGNDTVDVALSQVHWVVAQGIKAMGGHPAEIIVEFGREVGLGASRRNEWERLSAKNQRLRKAAHDEIVESGYPATNAAIRRVLLWKEQKTHCPYCDRPLGMSEVLEGSASHVEHIIPRSLTRVGQKRSEVVIAHASCNHAKGDQTPYQAFGHDEVRWRLIERRGAEFKAAKLFRKAKLLLLKDFEQEVMTDESIAEFADRQLHQTSWAARSAAQWLRCVCQNVFAARGEFTALLRCSWHLDTVIPEVRLANNRVVLDTDGSEVTKDEFREMRNSWDGHGKGVTRTLDKRIDHRHHVIDALVIGLASRSLYQKLARNYKENTEQMAAGAKYRRDWSVEPPLSNIRETAIGIVSSCNLSHKPDRHAAGAFFQDTAYGLKKQRHDEDGVLIVRKALMSLADEKSIERTRKNLRSIASDDVRDIVMAEFERRVGQGQSAKEALAEPVSHPLHKTGIRKVRVRYDDVSAKSAIEVGFSSRQGRHKKLLLSGGNAFLELSGVGNEARVRVVSLLEGSRPTGLEASTTIRRFYKGDTVIDSKDGEAFVVRQIKADGGGMLMLTSVVETRPVRDLSASDGLRKISGKGLQRLSLANVISSGSTAGGSA

SEQ ID NO: 17033 - protein, 1021 aa, unidentified
  REGION 1..1021: note = Cas Enzyme sequence
MVADLHDQRCRPLSNRPGKHFYDPVRNRQDRLHEFPLLHAGRALVREEFALIWKVQREYGGQLSHLLTDELRKQLDDPLEDNTWRHKGALFGQRNTYWNAGTLGRCDLEPTDHRCPIGDMHAQEFRVLETVNNLRIEERGEAPRKLNASERAAVIEKLSTQKTGSVATLRKALGIDKKAIKEFFTLNVERDAEREINTDWFAREIILGAFSKPIWDSLIAARQASVNRALLKLDPASAADVERLRQGASPWWGLSAIATEKLLAAWKGRPNPDRRVNLSRRAIVNLLPYLRAELTVSEARQRFVEDGESGATPEQRRRYALKPQLVLTKRDRRFLRKRERNGKSLQLPPAPVLANPVVRKAIHEVRRHINAYLRLLGRVPDRIVIELTRKATQTERQRDAQLKANRDREGIRKAIAIDFDLPDPYCRAVDRVMLCVEQRCKCAYSDRTITPHMAADGNGLEIDHIIPMSRCQDNGFNNKVLCFCDVNRTKGSQTPKEWLTAEKFAEMEMRFKHLDGKAKTRNGSYEIRPNPRKWQNLHRDALRLTDSHEREDWANSQLSDTAYAATQVAAYLRDALYDGERDGKRRIFFTKGSYTAILRRDWQLMDDEGPKDRGDHRHHAIDAVAIALTGPEIIQDLAHHAALQEKARAEQGRWPRRTPLDPPKPWPSVEAFRGEVMTVVQGLVVAHRRTKRKVVGYLHKDDMWGAVDEASGIFRIRCKAADLSPKMLLPPIKETDSEVRSRLFCEIKKETPAPSDNDARKKARLRFELRQFERRLVDPSLGKGGLVRDWTLRKVIRDCLQLNGIDPTDFTKKQMSDFAQSGKLKMPSGVPIASVITIAPISDPVKIAVEDPLTARQAINPRTKMPLYRYHISRNNHHVEIRANAVNGKWKADCVRTMDAARRVRPGEDANGQRQSPRPAVDRTDRDHRKFIMSLSEGEIIHARRNDRGAGDRDAIGYFVVVKLDKSRVYFAPHWDARGEKEQDRWDAAYSDLKDCEPIPGISPYKVRVDPLGNLTPLIRD

SEQ ID NO: 17034 - protein, 956 aa, unidentified
  REGION 1..956: note = Cas Enzyme sequence
MDCVLALDPYALRRRAINEKLEPFEIGRVLLHLNQRRGFLSNARKDKADKEVKGMLHEINELAGAMGERTLGQHLAELHDDPHVRLRGKHTRRQMLLNEFDRIWKAQSAHHPNLLTDALRYGNAGPQSHPFTLRRLPRKSDHLTEFGIEGIIFFQRPLYWPKSMIGICELEPRERRCPRADRAAQRFRLLQEVNNLRIIDPDRHQERQLSPDERTLLLEKLSVKEKLTFDDVRKHLGFLESVKFNLERGERGSLGGMKTDALLAKAFKGWHKLDNLTKDAVVRLLIDPAIDEPTARQRLLESHEFDAAAEALLSVELPAGYANLSLKAINKLLPFLERGMRYMAESNPELSALHAAGYLRPDELKRRLFDKLPPIAFIRSGPMADLPNPVVAAALYEVRKVVNAILREYGKPDAIHVELAREIKMSAAKRQEYNSRTRQREADRDAAADYLREKQVRLSRDNIIRYMLWKEQNESCVYTGNAIRFEHLFGGEVDIDHILPYSRTLDDSQMNKVVCFRAANAEKNQRTPFEWLAATEPDRYEQVCQRARRLAYPKYRNFSLKELELDDFIARQLRDTAYIARLAVEYLKMLLEKDHQVLGLKGQHTAELRHHWGLETVLSELPDSPAWAEDQAGHIRPGEKNRADHRHHAIDAIVVALTGRSRLQHLARIRRDGGSRVTGEILAEPWSGFRREVVQRVDAIRVSHRVRRKVSGPLHEDTIYGPTEKPGIFVVRKPVQSLSPNEVELIRDPGIRRIVAAAFAGAEIQTGRCKKGGEKSATTGETIKAALAKLCMKTKDGRSIPIRRVRVLRKEKTIRVIREGSGFDAYVKPGSTHHLCIFEWEENGRRVRHAEFVPMIEAARRIRDGEPIIQRTYPARPDARFVMSLSSGEMLLASWKGREKLMTFRTAASTQGQIYFAGHTDARRSADYQKLVCNCNTIEGRKVTVDPLGRIRWAND

SEQ ID NO: 17035 - protein, 1057 aa, unidentified
  REGION 1..1057: note = Cas Enzyme sequence
MGKTLGLDIGPNSIGWALVEEGANARLVDCGARVFPEGVENFDTSKEESRGETRRTARGMRRQIMRRRRRKRILRAALESVGLWPTDPDQQKALLQGDPYLLRQRAVSEPLAPHEIGRVILHLNARRGFLSNSKKDKADKEVKGMLAEISDLAAKMQGKTLGQYLGDLRKTPHERVRGKHTRRSMLLEEFDKVWRCQAAHHPALLTDALRYGADGRQTHPHAPRRLPQKSEWLHEFGIEGIIFFQRPMYWPASMVGFCELEKGERRCPKADRAAQRFRLLQEVNNLRYIDPDDNREKPLTAEQRALLLEKLATVEKLTFEQVRKHLGFLDSIRFNLERSERSKLGGNKTDWLIAKAIGKGWYQRDESEKDGIVRVLIDPKLNDLALLARLTGQFHLGGEDAAKLMGVDLPAGYMNVSRKAIGKLLPYLEAGMRYMAESDPTRSALHAAGYLRRDELQRRLFDKLPSLQFIHSGPLADLANPVVRAALYEVRKVVNAIIREYGRPDEIHVEMARSMKMSREKRSEYNTRIHEIEAERDAAADYLRESQVPVSRESILRYRLWKEQQEKCVYTGKSISFAQLFGGEVDVDHILPYSRTLDDSQGNKVVCYHEANQEKGDRSPYEWLAASDPRRYEEIRVRAQILPYRKRLKFTQETLELDHFIARQLNDTAYIARLAGEYLKMLVQKEHDVLGLKGEYTAELRHQWGLEGVLAELPDSPAWQEQSRLRPGEKNRADHRHHAIDAIVVALTNRSRLQQLSRIRKEGGTRTTGEVLGDPWPGFRQSVVERIKTVNVSHRVRRKVAGKLHEETHYGRRHDARGNVVPGEFVIRKPVETLTPNEIENIRDPVIRRIISQAAQGAGLHVGRRKKGAQEEDVAGKKLKSALANLKMPSGIPIRRVRLVKPDDTIQAIRTKQAQAANDPTQVAYVKPGSTHHLCIFEWSENGKAHREAEFVTMLEAARRVRDGEPIIQRKHPDRPDAKFVMSLSAGEMVLGNWKGQKRLLVFKTAASTSGQMWFAEHTDARRSNEYKKFSCKCSTIGEGLHKVTVDPLGRIRWAND

SEQ ID NO: 17036 - protein, 928 aa, unidentified
  REGION 1..928: note = Cas Enzyme sequence
LEPHELGRALYHLAQRRGFLSNAIGGKQDDEERSMVKGAIKGLRAEIEAAGKRTLGEYLASLDPRETPLRNKPEFFAHYTHRSMFKDEFAAIWAAQQPYHAELLTEAFRGKLYHALFDQRPLKDQSELVGTCELEPTEKRAPLRLLQVQRFRVLGFVNNLRLRRDDASERLLATGEREVLLNLCEKSDRLSFAAARKALGIAKGQRFTVEEGGEKNVPVNLTATRMRAVLGAWWDKLDAARKDELVEQRGDGKQFPTDELFEQQAIEYWGLSAELAERLAEVRLPDEYGRYSLKALRVLLPMLETGMTVEEAIRAHPVYAETRKPTAPLSHLPPVKKALGDVRNPAVLRSLTELRKTVNAIIRRHGKPEFIRIELARDLKRSKRERQTEAVRMRDREKLREEAKRELKEHDPVRFANLRSADVEKYMLAMESGFRCPYTGSQYGFTDVFGDHPSVDVEHIIPRSRSLDDSFLNKTLAYRSTNIEKGQRTPREWLFTSDEARYDQMVETVKKFDARFEVGKKLRRFTMELTDPDSLLRDFTERQLQETRYASKLACRYLGLLYGGVIDATGTQRVFASAGQVTAKLRRAWDLDAILNPERKPEKWRGDHRHHAIDALTIALSSPALIKDLATAAGEADRLCRRKIILPVPWSEFSERARASAEAIQVSHRPSRRLSGPLHQETLYSRPRTYAIDVDKKGKPVEKEWVHYRVPVVSLMKAEHVDDIVDPSVRAAVRAKAEEIGGFGNKFEKNWPVLKTRKGVEIPIKRVRIRKAQSVVTIGKGARERHVIPGSNHHAEIMAEFDAKGGIKRYVFETVSMLEALERKRQGVAVVNRANEPGRRQFLCTLSEGDMVEAKRPGMLQPVLWKIRSVNSNGQLGLCLHTDARLKSEQVDDKSTVGLWRILAGPLFSSGARKVTVTHLGEVISAND

SEQ ID NO: 17037 - protein, 1026 aa, unidentified
  REGION 1..1026: note = Cas Enzyme sequence
MQKNYVLGIDLGSASVGTALLDFENQSIDFVGVRIFDAAMDGDTDTGKEESRAAARRVARGQRRQTDRRRGRFHRTFIALQKIGLMPLGNRSDVLPALQRRLEKRYPETNVLPYFLRARALDHALDTEELARVFYHLAQRRGFLSNRKIDKAPKKENEKLSDFKQELKDLTNALAQSGARSLGEYLNSLDPHQARFRNRHTSRAMYKDEFSLIWETQKKHHPGLLTMDARERLFRAIFHQRPLKDSSDKIGRCELVPSERRMPLWQPEAQLLRILGFVNNLRIDQGPGMPSLPLTTLQREQLLAFLQAHPRITFSEARKQLSLHESARFTIEIHGGEKHIPGNLTESRLREALPGIWTKLPIREQSAILTILDEGIPGDATDEAVRQWFASHYSWNESVLDRLVAVQLPEGYARFSLIAARKLLPHVQAGLSVTEAIQLAFPDHGKPQPPADLLAPVKSILPELSNPNVIRSLTELRKVVNAIIRRYGKPAEVHVELARELKKSKSERANAVKSNREREKLRELAISQLQAHDKVRFQNPSRRDIEKLLLAMQQNYRCLYTGVQFDIDGLLGDHPRFDVDHIVPYSRSLDDSFDNKALVSTDANREKGNRTIIEWLGKESEGFERVLDAAKKMDSRYKNRSKINRITIDMTHDKDLLAEFTQRQLVETRYASKLACRYLGTLFGNEVDESGKRRVFACSGQVTARLRDLWNLNSILSPEDFKKSRDDHRHHSIDAVAIAAASPRMVQLMALAAKERELRGQRRLILSPPWLGFQEQIADKIGALNVSLRPSRKLAGALHEASIYSAPRMVNGKEFVTIRKPIVDIANPDAIVDPTVRAAWIKKRDEISETSNFNPKLFEGNWPVMPNGVPIRRARIHKRESVVALSAGVKQRFVPTGSNHHAAVFEVKKKNGKLAYEVEVVSLLEANDRYRRKLDVVSRVTSQEKRFLFSISAGDIVWANNPGMPDIQLWRVRSMRSNGVMVVHDLRDARLKKDISLWQPTLSAAVAQGMRKVVISQLGEVLKAND

SEQ ID NO: 17038 - protein, 1020 aa, unidentified
  REGION 1..1020: note = Cas Enzyme sequence
LGIIGNGKLKGQPKRSVSISDLRRQMDWGLASKTSQFRFNVESDEDRDINTDWFSREIIHGAITPGNWERLGENARDRVNRAILKYDPGEEEDERKMKAVTSWAKLTEAQADAVINAWKRRPKPDSKRLNMSRRAARNLLALMDGPEPWPDLNRPGETRWLTPIEARKSIAADKNFRDVTTGRVLDETARIRYATGAKGATARDRHYMKRHPLRRNGQLIFGPDGCLLPEPPPAPMISNPVVRKAIHEVRRHLIEYMIQFGRKPDQIHVELAREAKMGKKDADALLFRNRLRNRIRNDIVNEFGLSSYSSTQQHEAVRRVVLAMQQKCVCAICGKTMIDGNCEGISLRTAAEGRGCEVAHIIPRASGGMNGFANTMLAHDKCNRNMGRRTPRQFWESALSGGYEEGITWIEKMYRGIERPKISAVKEATGQSLWACYFTRRDDLAKIAQFKKDVKDIQGMTARQEAATKYATRQVMAYLADALFDGKGLPERGGDRRIYATDGMWTSRLRREWGLFFDPHSSKAKGLSGEEHHVRKEKNRGDHRHHAIDAVLVAYCSQSVRNVWDAREKRADVDGINTADEAALETYRRLHPLDPPAPFRTTDEFRHAVARSIFGDGEIERPLCHRPVKRKLIGPLHKATQYGPVIDTWKHNGTINRELVEGRVTVRQAILGETPGDFLKVSHLRLPRLETDDEAIRRLARRYRIGKQQLTAPQAITFAKKLVKTKAFTRKFVDPKPEKGGLVRDIGQRRLLRHLLEQRGLNPENYTQKELKQSIDLHGPLKNDADIPIHKVTLLWSNSDPVTILRDEYDHATSNRRKLDRADFPYTLRLYDGQNNHHIEIRSVNKLNGKQVWSGVVVTGFEVAQRKLARLRAFKRAGIPKSSVLRSLPIAERAKFKHSLRDAEQAHPLVDRSDNPDLGGNFVMSLCEGEMLFMKHKETGEIGYFVVAKLDKPQSIFLVPHWDARSATERKDSEGKKVPDSKREQFPVTPMDLKKLAPPGQPHALKVRVSPLGQVKVLNR

SEQ ID NO: 17039 - protein, 1016 aa, unidentified
  REGION 1..1016: note = Cas Enzyme sequence
MTRSKGQLTLGIDVGANSVGWFLIYPDTGEIIASGVRVFPEGVDNFDTKKEKPKMESRRVARGMRRQIARRRARKRQLRGLLISAGLLPASADEQRSNDMVDPYALRRRALSEAITPHEFGRLLVHLNQRRGFKSNRKTDRGRKADDKGMLGEINELAAKLKDAGCQTLGEYLAKLHDDPHARVRNRHTRRDMFETEFEVCWMKQQTFHPSLLTDELKQRIRKLIFFQRDMYWPASVVGRCELEPRQPRCPRADRLAQRFRLLQEVNNLRYFDPDAREERPLTTEQRTLLLDKLSKVAKKDFDGIRKELGFLESIPFNLEKGHRKFIKGMPTDAALASKELFGKQWHEFPEVSKNEIVRKLIDAEDDKLPSLVQEWGLPPESMDKLATIDLPDGYAALSRLALEKLLPHMERGLLYMTDDDTPCALTEAGYLRPDQVPRKVLPFLPKPPEITNPVVRQSMFEIRKLVNAIIGEYGKPDVIHIELARNATMSLEDRQKASKRRQDNEDRRSEAADLIRSNQFKVSRDGIDRVLLWQEQGGICVYSGRSISVTQLLQGEADIDHVLPYSRCLDDSMQNKVVAFRALNHEKGNRTPREWLEADPDRYNQVLQFAWRLPYPKRKRFMQKELELDKFVLRQLNDTRYIAREAARYLRGIVEQPHHVLCPKGSHTAELRRHWGLDTVLRELPDSPAWTGDNDLRDGEKNRSDHRHHAIDALVVALTDQSRLQQLARIRSQGGTQTTGEVLPDPWPGFRQSVIDAAAKINVSHRVQRRVSGALHEDTIYGPVYEKNIQGQVVQRPGEFVVRKSVESLTLAMIEDIRDPTIRGIVMQRLNERHVAFGRGVAGAIGTDVWKPDLTMKSGTPIRKVRIVKRDETIQPIRKGTAYVKPGSMHHLVIFEWTEKGKKKREAVFVSMLDAINRIRSGDPIIQHVHPQRPDAKFVMSLSRGESVIGIKDGLTGPFVFNTAASTSGQMWFVRHTDARKSSQQQTVSVKASTMSPKARKVTIDPLGRIRWAND

SEQ ID NO: 17040 - protein, 1079 aa, unidentified
  REGION 1..1079: note = Cas Enzyme sequence
MAEDYIMGLDLGPNSIGWVLLTAEFDEQGNAVRETGFLDTSAAGHPPAGVRVFEAGLDKIGTQKEASLNQTRRMARSARRVHERRRARKTKLKRVLAQAGFLPYEPGELEQLFRKDPYALRARGLTQRLEPHEFGRALFHICQRRGFQSNRKSGKAKEDRGILKAMGDLQKAMEGAGARTLGEYFFLEANKGKREKGPSRLERGELRLRARHTRRDMYKEEFDLLWNKQEEFHPGLQDGVLKKEAYDAIFFQHPFELTEERRLKAPSRANLHRAPSLKECPLEKGEKCCPSGTWAAQRFRILKEVNNLKVAEGFRRERPLNGRERDRILELLDETKEVKFGKMRTEFEKLGLEPESEFNLERGGRSHLKGNAIDAALAAGLGKKTWRGLEEEEQEELRKALLEEEDPAHLNRLLARYDISEKNRKRLVDFEPPSGYMGYSRKAIEKLLPYLEEGCNEYEAVSRAYPDRQEGKALDSLPALISKGLPGELTNLTNPVVRRALVEVRKVVNALIREYGKPRQIVVELAREMKGGPKERKEASKRMRHREAERKKAAQEVASLGGNPESREDILRYLLWKEQGQRCPYSGRTIACSHLFTGEVDIDHILPRWQSLDDSQLNKVLCFRDQNRQKGQRTPAEWLGENSEEFQHLLRRVDEMCRKSGMNWGKYRKFQQIHVEAEGFARRQLNDTRYITRLVVRYLNLLYPPALREGEKAVRTSRGGLSAELRRHWGLNSLLAPVQAGKDVEVKNRTDHRHHAIDAVVVALSSRANLKKYQDYWRSRSDLDPADAERRKMGEGSFPPPWEGFRPDVLRVMERIHVSHRVIRKIHGSLHEKTFYGPAKNGKGGKVENLYWTRKPLEALTGPMAREIQDRNVREIVVDRLGEKGWDGKSRSLPKDWWREPLFLEPRESEGIPIPIRKVRVRTTLNDPLSLGHRFAVLGNNHHMEVFSRANGDGTEEFFAVCVSQKEAMERVRRRKEPILRRDFGPGTRFRMSLARKESFMVENPDSGERTLCVLQKLSGSFSPSGKMDLYFRDHRDSRTATEAGKNPFQRVVSFGKFMKCKIQKVQVDPLGRLYPAGD

SEQ ID NO: 17041 - protein, 1029 aa, unidentified
  REGION 1..1029: note = Cas Enzyme sequence
LEADQALPYVLRKEALERKLELHELGRALYHLCQRRGYRPSAADDSEKEETASTEEEIESKRGRRKKPEPEDKGDKDSESPKKVAEWISDLQAKMDAAHTPTIGAYFADFKHNNPHQERIRHRWTGREMFVKEFDLIWERQSEFYRDSRPGLLNDDLRNRVYDCLFFQRPLASAEHLIGMCDLERGERRAPWATLEAQRFRLLQKVNDLAYIPSGLFNERKLSLEQCATLAAALQDKGDMPFPEIAKLLGLPPKTEFNLMRGKKKKIEGNRINQVMLQVFGDRWRAFTEQERSSAVALWTKTEGFEERKNVAISQCGLDAWKAKEWAENRPPKDCCRHSRKALVKLIKRMEEGVPYATAKLEIYDSQLAGKAPLDFVPKVIETLPSINNPAVLRALTELRKVVNAIIRTYGDKPYEIRIELARELRKNRKQRQDATEAGDKQHLRRIDAARTILRECRNYDAQGRDAERLVRERRDDVTKMLLLMECRCLCPYTGDSISYLDLFGGEVEVEHIIPQSLMVDNSFNNLTLCYRKVNHEKLDKTPRQAFCRAEDDQQWIDIIGRVQKFGNKEKLHRFLLSSREDIDRFSNRRLNDTRYTSKLAGRLLMSLYGGRDIVPAETLDELDEFKDRTGRRAICVSSGMVTSLLRDAWHLNLSGVIGDDAFKCPKKSEDDEESGKRRKGQSNKKDRCDHRHHALDAVVIALTSEKVIREINMLASRLYRERQTPLKYRDLKSIQNPWHNFMDDHFRDIFRGMLVSHRPEHKLSGALHEATSYGKVRYYNAKGDPVRYQRIAIGKLLTDKQIEKIVDEEVKKSVVKLGETIGGYKKWSQEKHGWPKMPNRNGEPVPIKKVRIKITKNAKEIEAERFRGFGTGRPESNVEDKEIAYASFFTVQDRKGTKTVWEIVKLFEAAQRVRALPKSERGHEKICWKYPKYPDATFFRFSLMKGDLVELVLNGKPAIFIVRRFEFDSRLWVAPINAAGKDEEMEAAGHLLRLGFSRFLTMGAGDDKIPRPVFVDLLGQPHYINIGA

SEQ ID NO: 17042 - protein, 1133 aa, unidentified
  REGION 1..1133: note = Cas Enzyme sequence
VQDKQEPLVFGLDIGIASVGWAVLATNRIVSLGVRAFDKAETPDKGEPLNLARRTARLTRRRLRRRAWRLTRLARVLKAHGVLADAKRFRPDITPAKSPWALRVEGLVRALDADEWARVIYHLCKHRGFHWTSRADERRASEDTKGEGGRVKQGLAGTAKLMTEKGYRTAAEMVLSEFPDAQRNKRGDYTKALARALLADELRLLFDRQRQLGSRLATTDLEREILGNGDRKSGLFWQQKPALAGANLLKMLGRCTFEPTEFRAPKASFTAERHVWLTRLNNLRLFVDGVARPLNEQERLAVIRLPYEQAKPVTYQQVRAAITRHAGTPDSLRFVGLRYESRARQEGARAADPEAEKLAAVPAWQEVRQTLKKHGLETEWKGMAAAAIDGSPQLLDTIAWVLSVYKDDDEVRAELNKLALPVRDRMVEALLDIRFDKFHSLSLKALHAIVPHMERGLRYDEACQAAGYHHSERFKPGAGTQRTLPSFYAGREADGRMRLDDRMDAPRNPVVLRALNQARKVLNALVRTYGSAAEVRIEMARDLSRPLDERRQIEREQAEYRTANEGDRAHFRECFGTDPTGAEFEKWRLYREQQGKCAYSIEDIDLTRLREAGYVEIDHALPYSRSFDDSKSNKVLVLSKENRDKGNRTPFEYLGGAQESERWQRFVAYVEGNRTFRLAKRTRLLRKNFGAQEAGEFRERNLNDTRYICRFFKNYVERFLQLAENSDAKRCVVVSGQLTAFLRRRWGLTKIREESDRHHALDAAVVAACTHGMVKRLSDYARRKELAAVRSGYVDPDSGEILDSTAFAALSRHFPRPWDHFREELELRLKEDDPARLRDGITTFGTYSPEEIGDARPLFVSRAPQRRNGGPAHKDTIYAQTSQHKREGAVTQKVALTTLTVKDLDNLVEPHRNAKLYQAIRERLTAHAGKADRAFTPDNPLRKPSRDGSANGPIVRAVTLKIPKLSGIAVRGGVAKNDTMLRVDVFSKDGKFHLVPVYVYHRAVGLPDRAIVAFKDEDEWTQIDDSFRFLFSLHANDLVRVTPKKVAPLLGYFRTCDSSTGAISIALHDRNALGQGTVSRALMDKNPSRAIPNDSRGLIRGIGVKTATNLEKLQVDVLGNVFPCRPEKRRGLA

SEQ ID NO: 17043 - protein, 1047 aa, unidentified
  REGION 1..1047: note = Cas Enzyme sequence
MAYRLSLDIGANSIGWCLLILDSTGTPCGVRDIGVRVFPDGRDPKTLASLAAERRLARAMRRRRDRYLQRRTALLNVLVQYGLLPAEETARQALVRLDPYVLRRDALHRKLTLHELGRAIFHLNQRRGFASNRKTDRANDAEQGKIKIASDKLQAEIARSGSPTLGAWLAERHDRQQGVRARLVGSGAKAEYPFYPTRDLIRNEFETIWSAQESWNPSLSNAARESIAGVLFHQRPLKAPMVGRCWLEPDEFRAPKALPSTQAFRIAQDLSHLTIRRTGETDIDLTDAERTKLANLLNAGSDLSFNQIRKILGLTRGETFNLESKAREKLKAAETAARLAGKKGPLAAVWSHLDMASRDAVVLELLNAETPDAALPALLALGISAEAAEAAERVTLPDGHAALSTKAIQAILPHLEAGLTYDKAVQAAGYRHHSDDRDGVILDRLPYYGVALADRIGTGSGQPNDPEERRFGRAPNPTVHVALNQLRHVVNTVIARHGHPTQIVVEVLRELNQSAFERRRIHDEQTENAKRREAWAEELRKLGQRVNGRNLALMRLWSEQSGDPKERLCPYTGERISLGRLFSGEVDEDHILPFAVTLDDSFANRVIVMREANRRKARQTPYEAFHAQSDWPEIQARAALLPASKAWRFGPDALEKWKGEHGDFLARHLTDSAYLARLARIYLRVVCDPDQVWCIPGRLTGMLRGALGMDSATLLGKGGARKDRDDHRHHAIDALTIGLVDRSLLQRVATAAGRAQDRGRRLLDDLGEPWPGFLTEAASKIQAIKVSFKADTSPSGRLHNDMAYAVLPAAGPKSPNVAHRVTVQSLAGWKPEEVREALGDPRLAERVVQVLENTTGKPAQAAALGALPHDAAGRTVRRVQVRERLDSTAEISDRRTGRPYKRVKLDANHRVEFWRLPAMDGKPGKVKMLVVPMMEAAADAEAARLKRPILDRRPHPAAKLLMRLHKYDIVAFGIGEARKLLRVVKFSDGQINLAELHESGNLKARDSAKDDSFKYVNASITRFVSEQARKVFVDPAGRVFDQGPLPW

SEQ ID NO: 17044 - protein, 1122 aa, unidentified
  REGION 1..1122: note = Cas Enzyme sequence
MAQYVFGLDIGIASVGWAVLGDQRIIDLGVRCFDKAETAKEGDPLNLTRRQARLLRRRLYRRAWRLTQLARVLKREGLIADAKLFAKAPTYADSAWRLRVEGLDRLLTPLEWARVLYHLCKHRGFHWISKAEEAKADSNKEGGRVKQGLKDTAARMKDKGYRSAAEMVLAEFPDAQRNKRGQYDKALSRVLLGEELALLFERQRALGNPHASEPLEALILGNGDRRSGLFWRQKPALAGADLLKMLGKCTFEKSEYRAPKASFSAERHVWLTRLNNLRVVIDGRSRPLNEAERAIALPLPYQTEAFKYKTLKAALVKAGLWDDSVRFGGLSYPSQAQAEGEKAKDPEDQPLVKMPAWHELRKAFKSAGLESLWQRISTPALEGNPTLLDQIATVLSVYKDGDEITRELRTLALPEPDACIPVLERISFDKFSSLSLKALRRIVPPMETGLRYDEAVAKIPEYGHHSQRVKPDAGKHLYLPPFYEAQREYRGKNDRVGSMKFREDADVPRNPVVLRALNQARKVVNALIREYGSPMAVHIEMARDLSRPLDERRDVQKLQDEFRDRNDRARAQFAEQFGYHPKGREFEKWMLYREQLGQCAYSQQALDIQRVLDDPNYAQVDHALPYSRSYDDSKNNKVLVLTRENQDKGNRTPYEYLTALDGGQEGERWRAFTAWVQGNKNYRLAKRNRLLRKNYSADEQRGFIDRNLNDTRYICRFFKNYIEQHLQLAARPDGDLNRRCVVASGQLTGFLRARWGLAKVRSDSDRHHALDAAVVAACTHSMVKALADHARRKEIEFLKQGFPDPETGEILDPCAFDHGKHYFPEPWPHFRHELQARLFTDDLAALRTDMQRLGTYSDDDLARLRTLFVSRAPQRRNGGAVHKDTIYAQPESLKAQGGVIEKVLLQDLKPADLDNFVDPHRNERLYAAIRKRLEDHGGKADKAFGPDNPLHKPDRNGLPTGPVVRSVKLVRGKQSGIPIRGGLAKNDSMLRVDVFTKAGKFHLVPVYVHHRVTGLPDRAIVAFKDETEWTLIDESFAFLFSIYPNDLVRVALKKDSALGYYSGTDRSTGAINLWAHDRSAAIGKDGLIRGIGVKTAVSLEKFNVDVLGRVYPAPPEVRRGLA

SEQ ID NO: 17045 - protein, 1123 aa, unidentified
  REGION 1..1123: note = Cas Enzyme sequence
MERNQRNIGAWTLGLDIGIASVGWAAMGDKRLIDLGVRAFDKAETADKGESLNLQRRTARLLRRRLWRRSWRLTKLARLLKRHGLIESLTFFKEQPGFTDSTWVLRRDGLDRLLSATEWSRVLYHLCKHRGFHWFSRAEERKAEDDAKGEGGKVKKGLAHTQALMKEKGYRTAAEMVLAEFPEAQRNKQGDYSKALSRVLLDDELRQLFAAQRQFGNPHAGDDLETALRGTSDRRGGLFWSQKPALAGKDLLKMLGHCTFEKGEYRAPKASFTAERHVWLTRLNNLRVIVDGVSRPLNEAERRFALPLPYVSGEKFAYKTLRNALVKEGLLPESFRFGGLSYPSERQKADEKAKNPEDQPLVRLPAWHELRLTFQRAQLTEVWQLIATPALEGQPDLLDQIGWVLSVYKDDAEVSAELAKLGLPGGDKVLDTLLGVRFDKFHALSLKALRRIVPLMETGLRYDEAVKAIPEYGHHSQRFVTGAGGQRYLPPFYDGRDATGRMKFREDLDVPRNPVVLRALNQARKVVNALIRAYGPPSAVHIEMARDLSRPLDERRDIEKLQKEFKARNDQARDEFASADCFGRRPSGAEFEKWLLYREQHGKCAYSLEPLDLNRVVEDPTYVQVDHALPYSRSYDDSKNNKVLVLTRENQNKGNRTAYEYLTSFAGGELGDRWRNFVAWVEGNKTYRQAKRSRLLRKNYGADESQSFKDRNLNDTRYICKFFKNYVEQHLQLASDCDARRCVVVNGQLTAFLRARWGLLKIREDSDRHHALDAAVVAACSHAMVKRLADYSRTRELEYLREGFPDPDTGEILNPAAHQKLAERFPEPWQHFRHELEKRLKTDDVDELRTEMARLGTYSDDDLKALRPLFVSRAPQRRNGGAAHKDTIYAQPLSLVKQGGVTQKVPLTNLTLKDIDRLADPHRNAKLYAAIRARLEAHGGKADKAFPATDPLRKPDKDGHPTGPVVRSVTMVIDKMSGIPVRGGVAKNDSMLRVDVFTKGGKFHLVPVYVHHRVKGLPNRAIVAFKDEKEWTEVSGPDFVFSLFPNDLVRITLKKEEFLGYFAGCDRSTGAVSLWAHDRAQHIGKDGLIRGIGVKTAVSVQKLSVDVLGHVFPATPEVRRGLA

SEQ ID NO: 17046 - protein, 1123 aa, unidentified; identical to SEQ ID NO: 17045
  REGION 1..1123: note = Cas Enzyme sequence

SEQ ID NO: 17047 - protein, 1155 aa, unidentified
  REGION 1..1155: note = Cas Enzyme sequence
MKARRVTPPGLDTVSAFRPNLIAATALTPDSYNEESIEGEEVDDKPSSVALTFGFDIGVASVGWAVLAPNRIVALGVRAFDKAETAKEGDSLNLVRRTARLMRRRLRRRAWRLTKLARLLKRRGVIDDVRLFQPQNPFAPSLWRLRVEGLDRRLNAEEWARVIYHLCKHRGFHWISRAEERQAEADARGEGGKVKEGLAATARLMQLKAYRSAAEMVLAEFPEAQRNKRGDYSKALARRALGQELALLFNRQRDLGNSHAGRDLEEELLGTGDHRSGLFWMQKPPLSGADLLKMLGRCTFERGEYRAPKASFTAERHVWLTRLNNLRVFVDGRARPLTEAERQVALPLPYQQAGEFKFRQLRAALVNGGRLPEGFRFAGLAYPSATQMAEGKAKHPEDATLVKLPAWQALRLTLKKHGLETEWEGMAAAAIDGHPELLDQIAYVLSVFKDDDEVRRELSRLPLPSAPALIDALLDLRFDKFHALSLKALRAIVPRMESGFRYDEACEQAGYRHSLPSGPTASDHKYLPPFYTGRDKEGRLVFNPDLDVPRNPVVLRALNQARKVLNALVRKYGSPSEVRIEMARDLSRPLAERRQIEKEQGEYRERNEKDRVMFAEHFGRQPKGAEFEKWRLYREQQGKCAYSVEAIDLTRLLEEGYVEIDHALPYSRSFDDSKNNKALVLAAENRNKGNRTPYEYLAGEENSERWQRFAAFVESNKAYRQAKRNRLLRKNFGADEAKEFRERNLNDTRYICRFFKNYVERCLQLADGSDAKRCVVVSGQLTAFLRARWGLLKVREESDRHHALDAAVVAACTHGMVKRLADYARTRELEHVRAGFVDTETGEIVNPAAFARLERHFPAPWAEFRHELETRLRQDDPARLRASMEALGTYSREALDELRPLFVSRAPQRRNGGAAHKETIYAQPERLKAQGSVTQKVALPSLTLKDLENLVDPHRNEKLYAAIRARLEAHGGKGDKAFTPGNPLRKPDRDGNPTGPIVRTVTMVIDKLSGIPVRGGVAKNDAMLRVDVFSKAGKFHLVPVYVHHRTKGLPNRAIVAFKDEQDWTKVDDSGFLFSLWPTDLVRVRLKSEEHLAYYAGCDRSTGTINLWAHDRSKRVGKDGLIRSVGAKTALSFEKFHVDVLGAVFPASPEPRRGLA

SEQ ID NO: 17048 - protein, 1173 aa, unidentified
  REGION 1..1173: note = Cas Enzyme sequence
LTAQRQLLRREKTRRFPGGFLDTNLSILIAATALTPDNHNGAILEDAEMDDKDQPGDWMPTSEGPYTFGLDIGIASVGWAVLSTQRIIDCGVRAFDKAETPDKGEPLNLQRRMARLLRRRLWRRAWRLTKLARLLKRHEILPSAELLKSQPSFTDSTWQLRVDALDRLLTPVEWARVLYHLCKHRGFHWISQAEERKADDDTKSEGGRVKAGLAHTKKLMAQMEHRTAAEMVLAEFPQAQRNKRGEYTKALSRVLLDEELGRLFESQRRLGNPHTSGELEAAIRGNGDRRSGLFWSQKPALAGSDLLKMLGRCTFEKGEYRAPKASFTAERHVWLTRLNNLRVIVDGVSRPLTSDERTVALSLPYQSAEKFTYKTLRKAFAKAGVMPDAFRYGGLAYPSAKQKEEDKANDPEDQVLAKLPAWHELRLALIKAGLKTEWEKLSVAALEGEPRQLDDIAWVLSVYKDDEEVQAELAKLGLPGGPAMLNALLGIRFDKFHALSLKALRRIVPHMERGMRYDEAVKQVPEYGHHSQRFAMGQGSHRFLPPFYDGRDKDGRMKFRDDLDIPRNPVVLRALNQARKVVNALIKKYGSPESVHIEMARDLSRPLDERRDIEKLQKEYRERNDKAREQFASDFVRRPSGAEFEKWLLYREQHGKCGYSLQALELHRVIDDPNYVQIDHALPYSRSFDNSKNNKVLALTKVNQDKGNRTPYEFLDGAGESERWREYAAWVEGNKSYRQAKRSRLLRRNYGVDEASEFKDRNLNDTRYICKFFKSYVEQHLQLAQGSGHKRCVILNGQLTAFLRARWGLLKIREESDRHHALDAVVVAACSHGMVKRLADYARRKELENLREGFPDPETGEIINPDAHQRLAQHFPEPWPGFRRELEARLKIDDPVLMRQELQHLGTYSAQALHSAQPLFVSRAPQRRNSGAAHKDTIYGQPKRLESRGSVTQKVPLTSLTLKDLDRLADPHRNEKLYGAIRARLELHAGRADKAFAPDDPLRKPDKQGNPNGPLVRTVTLVIDKLSGIPVRGGIAKNDSMLRVDVFSRAGKFLLAPVYVHHMATALPRRAIVAYKDESDWIEVKEEEFLFSLHPNDLVRVSLKRETFLGYYAGCDRSTGAMHLWAHDRNQSVGKDGLIRGIGVKTASSLEKFHVDTLGNIYQAGKERRSGLA

SEQ ID NO: 17049 - protein, 1020 aa, unidentified
  REGION 1..1020: note = Cas Enzyme sequence
MSRANSYILGIDLGVNSLGAALIDKSNREIVWTGVRIFTPGFEGDYASGNEESRARQRRLARQQRRQTDRRRRRLLNVFRILQQYGLLPCGDREKILPALDAELALKYPETEVLPYYLRARSLDHKLTLYEIGRALYHLAQRRGFRGRAALDQSENSSEFKKSIEGLWKEIHASGSRTLGEYFSKLNPHETRIRGQRTHRRMYEEEFAAIWTAQQQHYPDVLTDARRQVLERAIFYQRPLKPSDDLVGDCELEPGEKRAPLWTIEAQRFRVLNAINNLMVVQKGVAPRKLEDHERQTLIEATRTKEKISFPQVRKLLSLPASSRFSIEEDGDTNLPGDIVSSRMFAALGSSWLEMPEERQRELVADLGDARRNETDEDLFRCLTEKWGYSPDVAQRLCEVALPSGYSRLSSKAICKALPFMEQGMTFGEARRKLWPEQFEEKEPLDYLPPVLEAPGLKDIRNPAVIRALSELRKTVNAVIRRFGKPASIHIELARDMKRSREERRKEARRNQQRRKLREEAREALRPYLGDNVPSRQIEKYLLWLECGRHCPYSGQPISLEALFGDHPRFDVEHIIPFDRCLDDSFQNKTLCEAGFNRLKGNRTPWEAFGHTEEWPLMVERVRAFRNVAKLRRFIMTETDAEKLLGEFVSRQLCDTRYASRLAAKYLGLLFGIDRPDNNRIIVCAGAVTAFLRQKWDLNRILNEKPEKNRDDYRHHAVDAIAVALATQAQIQQLADAARRARAEGHRRFGSLPDPWPGFREQARNAVLRCVVSHRPKRRLKGALHNETYYSAPEQREGKMVVRCRKPVTSLTKTDIEAIVDERIREIVRAAWEAVGSDAKKFEGNWPFIESNGRKIPIKRVRCFQVETVRSIAEDRPERRRHVIPGGNHHIEIWAETDPKSGLPKRWHFRAVSRLEAMERYRRRHEGVRIVQRDHGPNTQFCFSLSEGDMVAVRRAPDQPETLWCVRSARTRGSFELQPATDARLKKDAEIWDVALNTLMKLGCRKVVVTPLGDIVDAHD

SEQ ID NO: 17050 - protein, 1069 aa, unidentified
  REGION 1..1069: note = Cas Enzyme sequence
VTINQDGKLGDICLSDLRIFSEPLLPAKSGGVGEPKKAARRAARQARRLFERRARRLRRIAHLAPLLGLDPAAVPPDRGQRIHELRAKAIRERIELPDLLNVLLKLAKRRGYAGAFRVKKEGDEGQVESGIRTLKEQLGTHHCETLGEWFHHRQQSGESLKLKEIGLYAHREMVIEEFNRIWDEQQKHHPVLSRSAAVLGREATIRAHFFDAIFWQRPLKSVAPMVGNCALEPSLPRAPWAQPAAQSFRIEKQLADLRWGMGRNAKPLDAEQKDLIRKLLSDPETLTKEGKLSFKKIYAALDEAGLRRSTHRPTFSMDRASREELKGDTTREAFHALGVLDAWGSLSKPAQVQIINLLSEQDPSLFDAEDWPAKLVIERKIKDPATGKSIVSRQPRKLHEQTIAFIDALADAGKLDRLNKMGLDGGRAGYSLKALEKLTGAMQADGVDEYGAIAVCYPPSGTKQELKPQLPEPKSTGNVVVDVALRQVWHAVNHAIAALGEPPAQCIVELTRDMALGIKARNEVEGRIDRNRKERESAKKAISAAGKSPSDRNVLRYLLWSQLDQQYCPYCDKSINLEGALDGNQTNIDHILPRSLTRVGRQRAHLVLAHRACNNEKGDRTPFQAFGHDAERWNIIRHRASVLEHNRQRAKARLLLMDESEEEVLDDKAIADFSERQFIETSWIAKLTAQWLRDISPDVAVSRGELTAKLRRAWKLDTVVPQVRLEAGLPVLDQDGKPISLDDFSRYRACWEGHNGEDVEQTDRRPDKRLDHRHHLIDALVIAQTDRGLYQHMARQYKAIREQQREGMPVKLRYFPAPPMDNLRDRALEIVRGAEIRQKPDHYPSGAFFQDFAYSVAQKSENVRARLARKFELAKALDKKASLEQGRKFVASIVSDQVRDVVNAEFERRIASGKTPWEALSAPMFQELYGKKLPIKRVRCYTDKYAEDIALVSHQSRDGSVHVKRLLHAGFAYLEADMKNGQAVSPRLVPLIAANNRQGKSEDVMRLYKGDIVVDSKDGKRYRVGYFTSEGNIFLIPDVDPRAFDKIKEPRSGKKKISFGQLNRLRAKG

SEQ ID NO: 17051 - protein, 1032 aa, unidentified
  REGION 1..1032: note = Cas Enzyme sequence
LANTRRGHRSQRRHVRATRQRIARMEKLVVHLGIFTADELAAKHRANGGSPTPWLLAARVLASDGAQTLSWSELWDVLRWYAHNRGYEEITGEARDETEDSDESKQDTEKVENAKAALARFGKNSMAETICAWLDQDPLTERRGTTVSYKGNKCAFERALVLTETVRILAAHRGKLPHFDESLIAALTLDARAIAVPAIKLPRRYQGSLLFGRLATRYHNRIIGLCPISGEKIPNKYCPEFLRYRWAMQLANIRVAESANGELRPMTATERKSVHQAMVASGYLGVKSLKESVRSLPGIARNNLEQFLLHPDAKEGLILDPVQKLITADSKLSAVWKHLPDRVQIRARGRWRRGKSTTLAALRAAAIELGHDCSTFDAAVEVLCAPLPTKSKKKTPPPSRDELLSAPVDIRRELAKLSGRAPYARPLLAKAFEEVMAGGDPKAKGGSLEETEEVRDRRKARPIQQQTNNHLVRHRLQILGRLINDLVADPAYGSADPARFDRITLEVNRDLRKMAGLTAQDIAKELGQRLKQHGDAVKWLEQDPQVAPKISAGLIRKARIALDLGKRCPFTGESFNPIDLVTKRVDLDHIIPRSQRTSDSLDSLVLTFSTVNRWKGQRTAWQFIQDEGGKPVPDAPNLSIMTSARFKATVDALDTKGHLDDYRRKHRRKEWLLLPAYEEKARTFTPGQLTQTSQLARLAAQVVLEPFKSLQNQPQIVALPGSVTGNVRKAWNVLGCLSTAAPAVLDSDGAVKTKTEIRNVTHLHHALDACVLAFAAYFIPNRGDVWRLLSERRLSPSEQAQLAALRLFDFDSRGQFRLRDLAPELKDQIRTRLAERRVVQHVPADMSGLRVEENTRGIIKRENGRVFLRQRSPRDPDGSRPPPKKTDEPESKVVGLPQVSGFGGKLAALNGVRVIDGNFGIAILDKPDLPEPDRVAVVRFFRVSQKLHELHTINGGKKPRLLRKGMLIYVPKGSRKGTWRILSTKETEAYGIAVDLGAPDGCKLIKGNAPVSVLIHDGVEILSGNLAGSLSV

SEQ ID NO: 17052 - protein, 1032 aa, unidentified
  REGION 1..1032: note = Cas Enzyme sequence
MGVRIFPDGRNATDKTSNAVARRTARGQRRRRDRYLMRRDELMQTLVEYRLMPPDPETRKELQRLDPYSLRARSLDQPLSPFELGRALFHLNQRRGFKSNRKSGGEEEDERKKIGPAIEGLRRSIDESGARSLGEFLARRHAQRETVRAREEVGLYPDRAMYQEEFDTIRQKQEEHHKLSPEQWDRLHDIIFYQRELQPVKPGWCQFEFTSEERRAPKALPIFQEFRIFTEVNNLKVQIASEPERPLDPQEREGVLKRLRSGLDISFKNPTAGLKVPSLSSGVSFNLARGGREKIQGDVVTKLLKKKELFGSRWPSLSLKKRNEIVKTLLLVEEPETIQLKAIREWGLTESQAKAVANVSLPTGYGDLSEKAIRKILPHLEKGRLYSDAVKDAGYSHHSDFRSSSALDRLPYYGDVLRRDAVGADPTKDPQKDGEEARYGRFPNPTVHIGLNQLRRVVNCLIEVYGKPEEIAVELARDLKSNLEQRLRDQRQQREGRERNQRYAETLEAKGLESTPDLRRKLRLWEEQKQGAVCVCPYTGRTLSFAMVVDSQTEVDHILPFSQTLDDSMANKVVCIAAANRAKGDRSPYEAFGKEILNRTTNFPPNKRWRFGPDAMERFEQEDRFLDRQLNETRYLSRTARAYLAHLYDEKGEGNQRVWATPGRLTYLLRRAWGLERILRADTDTGKIVRKQRDDHRHHAIDAFVVANTTQGLFQRFSRTAASGHHTAVERLASLVPDPWEGYQREQLRPILDRLVVSYKPDHGTRGVKGKTTGQLHNETAYGLLEPSEDGPSRVVRRKKLSAFKKKSELDDVRDPDMRKALIDLWDQTAAVIQAEGGKVSETPMRFAERAANEGVLVGGRRQTVRRVRVCEQETVILIRDQAGEPYKGYKRDGNEFADVWRMRDGSWKMVIVPRFEANQPNFDLEKFRPTDKAGRKDPTAKRLMRLFKNDMGAIGEGEERCIVHVRHMGTKTDRGPYVVLDDHEEANVDRRRRRGEIKEISYGARKLQRSSFRKVGVDEIGRVLDPGPPRP

SEQ ID NO: 17053 - protein, 1070 aa, unidentified
  REGION 1..1070: note = Cas Enzyme sequence
MKTTRDKRYRLGLDLGTNSIGWAAVNLDEQGQPCGVLNMGVRIFPDGRNATDKTSNAVARRTARGQRRRRDRYLMRRDELMQTLVEYRLMPPDPETRKELQRLDPYSLRARSLDQPLSPFELGRALFHLNQRRGFKSNRKSGGEEEDERKKIGPAIEGLRRSIDESGARSLGEFLARRHAQRETVRAREEVGLYPDRAMYQEEFDTIRQKQEEHHKLSPEQWDRLHDIIFYQRELQPVKPGWCQFEFTSEERRAPKALPIFQEFRIFTEVNNLKVQIASEPERPLDPQEREGVLKRLRSGLDISFKNPTAGLKVPSLSSGVSFNLARGGREKIQGDVVTKLLKKKELFGSRWPSLSLKKRNEIVKTLLLVEEPETIQLKAIREWGLTESQAKAVANVSLPTGYGDLSEKAIRKILPHLEKGRLYSDAVKDAGYSHHSDFRSSSALDRLPYYGDVLRRDAVGADPTKDPQKDGEEARYGRFPNPTVHIGLNQLRRVVNCLIEVYGKPEEIAVELARDLKSNLEQRLRDQRQQREGRERNQRYAETLEAKGLESTPDLRRKLRLWEEQKQGAVCVCPYTGRTLSFAMVVDSQTEVDHILPFSQTLDDSMANKVVCIAAANRAKGDRSPYEAFGKEILNRTTNFPPNKRWRFGPDAMERFEQEDRFLDRQLNETRYLSRTARAYLAHLYDEKGEGNQRVWATPGRLTYLLRRAWGLERILRADTDTGKIVRKQRDDHRHHAIDAFVVANTTQGLFQRFSRTAASGHHTAVERLASLVPDPWEGYQREQLRPILDRLVVSYKPDHGTRGVKGKTTGQLHNETAYGLLEPSEDGPSRVVRRKKLSAFKKKSELDDVRDPDMRKALIDLWDQTAAVIQAEGGKVSETPMRFAERAANEGVLVGGRRQTVRRVRVCEQETVILIRDQAGEPYKGYKRDGNEFADVWRMRDGSWKMVIVPRFEANQPNFDLEKFRPTDKAGRKDPTAKRLMRLFKNDMGAIGEGEERCIVHVRHMGTKTDRGPYVVLDDHEEANVDRRRRRGEIKEISYGARKLQRSSFRKVGVDEIGRVLDPGPPRP

SEQ ID NO: 17054 - protein, 1129 aa, unidentified
  REGION 1..1129: note = Cas Enzyme sequence
MHYRVGLDVGTASLGVAAVSLDENNNPTDLIWKHVRIFDEPLEKSQAGLKSKKAGRRVARMQRRQIDRRLGRTKRIAALAPLLGINLEPSLDSGRTLLELRAKAAREQISLSELIRIFIRIGKRRGYAGEFRPKKEGTKLGEVEGGNNDLKLEMEALALDKGLENITLGEFLYQRWLDGKPTKLKIKDSDDKTTADKNLYALRSQLEAEFEKIWQTQSAFYPALVTEHQGMSLKDVFHQAIFYQRPLKAVGGMVGQCGLEPTLPRAPRAQLAFQRFRIEKTLADLRWGAGKRAEKLSAEQKAVIRQLCDEKEVVKFDAIYKALAAAGCAKPATKGLNLDRLSRAEIPGNKTNYVFRKLGLYEAWSVLDERAQIQVINFLADLGSPEQLDDPDWHLRFGKSIKTNAKDSKGNWIYKTKPKFVNEAGETLPSYKDFIAFINQLKDHEKFDRLSKIEIKGAKFDGGRASYSIKALKTLTDWLDNPWWPEQVQGEMRPDEESAIRVCYSQSANKKVVLQERLDKPPATGNAVVDGSLRQIRYVVNRMIDELGAIPEQIVVEMARDLSVGVSKRNERESDNAKNRKARLEAEEQIRLHGATVTPSRVRRYLLWKEQGAGHCPYCSKTITLADALSGAETEYEHILPRSLTQVGLKRSEIVLAHRGCNQEKGNRTPYQAFGHDEYRWKIITERANYFLEKCSFRKAKLLLLEDFELEVLTDESIDGFADRQFHQTSWIAKEAAQWLQSISKTPVSVSRGEMTAGLRRKWKLETVIPQVRIAEGLPVLDEEGQVITGDEFEKYRDVWEGHRVLDGHGKLDKSRHTDRKMDKRIDHRHHLIDAITIALTSRSLFQQMARQYKLDSERVAQGEKPRLKIGEALPLKNVRELALAAVRECPLSIKPDRYPDGAIFQETAYGVALKEGEDKSRLTLRVKVAELIDRKKGTVEQARKAIQSIVSDNIRELISNAFDSRVTNGMTAPEALVEPIYQTLYGKRIAIKKVRCFTGNYADDVAIVSHTSRDGREHLKRLPNAGYAYLEAEITDGRIIGQPSLVKIQQAMRNKKLSPKEGIVRFYKGDTVLDCKDGKSYRIGMFKAAGGFFLVPITDPRAYNSIEELNSGKKSLAFSQAFRLKITN

SEQ ID NO: 17055 - protein, 1248 aa, unidentified
  REGION 1..1248: note = Cas Enzyme sequence
MKKILGLDLGSASIGWAIIVEKEENGETKCEILGLGSRIIPYEGTEGKDFAKGTGESRNSLRTKARTARKGYDRYQLRRKYLVNSLLKNKMYPDETLKSLPKMQLWELRDKAVHSEISLPELGRLLLWLNQKRGYKSSRSDANLDKKDTEYVATVKSRHEKIKELNVTIGQYFYHELVKDEFFRIKENIFPREAYIEEFDTICKTQQQYHSSVLNNELIDKLRNEIIYFQRPLKSQKGLVSVCEFEGFYKIGKDGKEYFVGPKTAPKSSPLFQLSKVWENINNIKIGSRTGEDIEMTLEQKWAIFEHLDNSEKLTLSDLLKILNLKKDNCYINKQLAKGLNGNITKHAIRQCLGDSTKYESLLKLDLKIIETEKEGYLYDKKTGEILGRKTIKYIDPLIEREPFYQLWHTIYSIQDQEECSNALQNKLDIEPEVADKLAGIDFSKHAFGNKSIKVIRKILPYLMEGDGYSEAMSYAGYDHSNSLTKDENLKRKLLDQLKPIAKNSLRQPIVEKILNQMVNVVNAVIEKYGKPDEIRVELARELKQSKEERKDTEKAMNERERENERITKRLKEFGLRATRNNIIKWRLYEEIDNENIKLNAICVYCGQPISVIQAIKGNDVDIEHIIPKSKLFDDSQSNKTLAHRHCNKDKNDRTAYDFMKSKSEEALNEYVDRVNMLYANRVINKSKRDKLLMTESKIPNNFIDRQLRESQYIAKKAREILQTICHNVWTTSGTITAELRHLWGWDDVTMNLQLEKYKALGQTHIVEWESEHGKNKHEKEVITGWTKRDDHRHHAVDALTIACTKQGYIQRFNTLSASKTREDMKFEIEQRSINFKEKLSLLDKYIIGEQPLEVGEVERAVANILVSFKSSKKVAVVGKRKTGRRGDKKVVQTGIIIPRGSLSEESVYGRIKTLEVKKPIKYLFENPQLIFKLNIKTLIEERLEKYNGDTKEAISSLKKEPIYLDQEKSIILEYATCFKEEYVKKYDVNTDFNKVDKVIDGKIKEILQARLKKFDSKAKEAFKDVQGENKTLKKWYEDEGLDRPIKSVRCSTGLSAIVPVKKDPEGKDIGFVKPGNNHHIAIYKDSEGNCFEHTCSFWHAVERKKYGVPVIIRDTNQIWDKIGMQPEGTFPESFLAKLPSVRWNLSVSMQQNEMFILDMEKEEFGNLLYKNDNSLLSKSLYLVWSLSESDYWFRHHLETKNSELKSIEGAKESKRYYRFKSLGAFLKMNPIKVRINHIGQIVSVGEY

SEQ ID NO: 17056 - protein, 1443 aa, unidentified
  REGION 1..1443: note = Cas Enzyme sequence
MSNGDSGEKNSKKYYVGLDIGTDSVGWAVTDQDYHLVRKQGKHLWGSRLFDEAQTAEGRRMARGTRRRLERRKWRILLLQDLFKPEMDKVDPDFFDRLNNSALHAEDKPEKCRKPFLLFNDNGMTDKKFYQDYPTIYHLRMEMMTHPEKKYDIREIYLVMAHMVKYRGNFLMEGNLTDKPVSDPQILVDDFNGLDDLLSQEENSLLSFQVTTKQAEELIKVFQEKTRISELAEEISKALNVDRKDPRENYIKLISGSSMALSALYPDIEDEDIKKTKLDFTNEDFRENLPSLAANIGDNRFQILAQIGILYDYRILINFLKGKDSLSEAMIGVYTDHQCQLKILKDLVKRYNRPAYAGFFRRMDTVKGQEIKNYANYVGYLSVKGKAVSGGHRTSQEDLYKAIKGILPFDQIGKGYAWQQPEDEGKLKDILASMEANKYLPRQNSKENGVFPYQLNLREMDKIIANQSKYYPFLAEKAKDYTNPDKTTYKIDSILEFRIPYYVGPLSNRPVPEGKESNRWAVRKGEEKITPWNFHDVIDEEASARGFMDRLKNPCTYLIGEKTLPLGSLIYQDYILYNEMNSWLINGKPITEEDKDYLVENVYKKAKKVTINPLKAALKAKYKSSVRISTKGSGKELDAEDVHASLSSYIVMSDSRAFGPGFEKDGKKLELAEEVIENLTSFEDKTMKERSLKKLGLSDPQIGFLSPLSLSGWGKLSKKLLDGLTTEVVNTSTGETIDATILYLLKHTSYNFMEIYNGSLDGKDLGYTFRKQVEDLNHKSDPSEEDIIEAEYASPAMKRALMQTLKVVKEIKEILKVDHIDSYFVEATRGATDQGRTTSRKRTLQKTYQAAKSLVTKELSDALKNSTDSELRSKRLYLYFMQLGRDVYSGKPIDLNQINKDYDIDHIIPQAKVKDDSFLNTVLVARGLNNTKSDTYPIPEGTISEDGKQWIKTLMNRIDKGALMPKEKMERLLRPASDHLTVEEETGFVQRQLVMTNQSVKAVCDILRQIDPKAKTVFSKAGQVSDFRGFFHLPKCREINDFHHANDAYLNIVVGNAYNKVFSAGFNSEIYKKNQSYFESLKLGANHFFTRNEHMLYTDSLVWKSKHYYKNDMGHWVEDPKSEGTIDLVRKTLSWNDPLVSQRTYENKGKQGFFNKISIRSAEDGKASFPLKKKAPFNSTGWETKYGGYSDLVTPYYMLVRSDGKKGKKNYSLEGVPSIFLTGKEKEKDIQEYLTKNLELKNPEVVVDKVPIKAGIELPNGAFVGVSGRTNNSISTVNLSELKVSSDTAAYMKLIARALGTNLPSNQKVDLAVLEKLEKNNIAVGDSLLTQEKNLEVFDYLCKLFKQKCFANLPGVWKTISSFDSRKELFSSLATIKQAIVLQKMILLVACKPLVQDMTVIGLGKEAGTKFMSKNLQPGTKLYIPSPTGFYKKLLYTIPSDKE

SEQ ID NO: 17057 - protein, 1289 aa, unidentified
  REGION 1..1289: note = Cas Enzyme sequence
VLKYILCIKCERYVKMEKLDYVLGLDLGVASIGWAVMEIDENNEPINLVDANSVIFESLDNDSGKLYNVDRRNARGARRTLNRRKERIRRTKNLLTSSGFLSDDELSKLYSGQIEDIFEIRKKGLTEQLNKNEIARLMIFYNKNRGFKSNRKTDDLELEEELKKLEKNNGKISEKASDNNANDEKKLKPLIALNTKRLQEENLMPIELIFKLKSEEDILGFKNKEGVYKFGFKRDQIEKEIEYILERQELVSKELLEKYMEILKSQRDFSEGPAKPSKYRIDWESNTGACKYTGEKRVVAGAPSYEIFCMLQKLTDLRYIYVSDDTKKGKFKLEKEQLNKIYDKAIKNKKVTYKDVLDCLNDENIRILNIPQLDVKDYKKIKKDFEGELTEDQIKELNNKLNTERQKKSIFELKQYKELISKFNKNDIKEDKIKELGGIDFLDKIAELLTYAKTDKKLDEYHTKERYKNIPEKIIEKIKTFKTLNKTGNLSLNLVRKLNEKMLEGNDYEKSLSSLGYSIKINDNWDKFPTVAQIEEAFNTKITNPNVKHVMVILRKLYNTLLEKYGKPKKVHLELARDMANDFSTRNNIKKEQNENRAYRELKSFEVYNRNSDLVGNKNRLSNDDILRFRLYDEQKGICIYSGEPIDKSKLLTSDYQVDHILPYSKSADNSFENKVLVYAKENQDKKERTPYQWLKGTQKWLQFKHRVELNNHMKDKKKNNLLFTDEVKIDEFLDRDLHATSYSSRLALQVFKYLISPDEKDIKDENALYIYHRNVVAFNGAMTSQLRNFYGLNRFTHSFESEDLKIGKNYRIDEIKYTKDGLTLVSKNEKRGLEISEERKIEYTDKSKKTFKIETDRIIFEEILRKENIDNISNELKGKYVEDITEKDFRDILDRNENIPTELISTIYHLNALLKQKINSKNRENHLHHALDATLLTIMNHSMQQRLIEFNKILQKMSNSPEKYIDEETGEIMTYKEAVEKLREYIDVKYIDLYNKKATQTYKIPGTNEKISLSLPYVNFIEDIKNIIFVKDENDSSFKLPYHVFKKKKSGQLHKATLFGESKGLVTKRISVFEIGKNLKDLFDKDGSQKEIYETLLKWLEEKSKDYPKLKNGHIIKKVKIVDENKDKLIKLGEKRYVQMGQTTVKILVLKKKDEDGYRMASIGRYNYNKIKKGEDFKLHVWKSADKADGFINYSEIDNQYCKLFELHPSELIELENQKGGKIKCKVVGFTGGKLEIKSIIGDSTDLIRNGVFVNHITRYILTISTIKNIRKVKYNILGDKVCHSGKY

SEQ ID NO: 17058 - protein, 1206 aa, unidentified
  REGION 1..1206: note = Cas Enzyme sequence
AAEIEKLSAKWLEHPFYKSDLVLGLDIGIEGIGIWLRKGATPLFAQTIVVELPEASPLAKRRANRAARRSRVSCKKREAMLKGWVVKYGLLTEERVNEIWENPSIFQRGFEHRYRAIQKSGALKSPEALVSCIRHCLQHRGFDYHLSNDAAFPWGDGMDDASQIIQWAKRAICPPGAVKIWKQLFSDASWSDKGEKWDKVMAALDETVHRYGSQPIETHLAKHFREKNHPNLREAARGENFPRELIKEHLRLICKNHESFFGSKEKLDAALTELLGESDQKLIPDSIIDFHRKTQSEIESLWKRKTNDCPFIPFLAPAGTPAKEKCSPNSSPEIRRFKLLQFLSERTFVAMDGNRIERTYANADLHAALMGLLETDISATSAAMPAPSRTKLGKRDLKKLVETAAKAKLAPDSVSHNADFFEQLADLLFPKLSVLKERAALSETAAKHLNDLGMENLSEFQADRVRGNWSETYYQWRRIATLGGPIYPQVELLLGNPRQYDNEGNTKDRNGSNPQHHGILRRLFAGQFKDAHGNTVDLSTHLGGKKVPDYIIIETLGDIPRNADQRRDLQKEQKERREAKGKIFEKYNLPKDATSDQIKRALLFDQQTGKDGRAVCPYTGADLGDSALATDLEIEHIYPRESGGISEMLNLVLTRRQTNGDKGKNTPFQIAGKTIGKTSFSSWTDMKKRVESAMKWKKAKRELFCREETTCPDWSNTTRVAQLARQLRDQVIRWIKLDRSLDENERANEIARRIGTPSGAMTAACRESWKDALPDFMSGKKDRLNFRHHLYDAAVISHIPPREGMNLASCGGIFVSDFASGRGWMTIALPGLLLDLNPFQEATQNVCLVFKPKSGKSKTSRYDSTIYSPTDSDGERWTRFKGDLAEWRVDPKMSLEKIKQCLRAARITADKLPDKLIEKWYHQEPPKDAPAHPLRFPSFKDGVPGQKIETVTRKITKPCAEPAYGPHFDGKGNIIGWKVAQESFIRCEIWMTEIPGKNGVPETKFYQRRTFHPRHLVNLQKRQLTDGRFLSLKLSLSESDLHEIGLVAEAEEVKELQERLASKVKKGSKKLQKNATGGDLFESGDVGLPAALPTTTSLQAIYCEPIPIPPMATKVGCFRKGQVLMVPLDSSGKFHKRGTLPKNVEPAGGWWAYAVTSIKSGGEIEMKLAEYKPAKPDEQTSRRKAPDSLRPTSSDDLAFLLELQGR

SEQ ID NO: 17059 - protein, 1244 aa, unidentified
  REGION 1..1244: note = Cas Enzyme sequence
MDYIIKPAPGSTSSPYDWANDPFYKSAIVLGIDIGIEGIGVWLRKGRNHVFARTFLFNTPEAAPLKGRRLLRGGRRCRQSEQHREVLLKQFCAEFGLPWTEIKDQENEDGPFKLRLRAVRSKLGSKEALVVCLRHIIRHRGYDYHETDGGSFPWGDELKADVATGWAKAAYCSPEDAAEFLHDVSDCGWNDKQLASFRHALTAAVERHKQGIEAALEKHFAQDKNNLRIPARKHNFPRSLIWKHMEKICANHRDFLGGEAGLSAALLKLKPILNYHRKKPGALAERKVNRCPVAIHLFGGTAPKCDPNSNPHIRRFKLLEFLATRSFVAKDGTRLLANADLMKWLLDEVLAEDIRAVVVNKVKGGQKQERRKFGGFRDEFIARFDPNGKIELAGDRVSHNKDFFEQLGDLLRPKLSVLNARASICGKSAEELFKRATKDGYQAEIISRNLKEKQFDGQSFYTLRQAAAAGFGIYPQVEFLLGRRGKKGNQAVPGVLRQMLELPEVSAKLDGQKIPDYVIIETVGDMPRNVVQAKEIQDEQKRRREFKEGLFEKFGVHDKQQDSEARKRVLLYDQQGGNRGEAICPYTGEPLGDPLSPKLQIDHIFPESLGGISEMVNLVLTHETTNNQRKGNQTPYQAFGGQQNTAEWQALVARVQKMGWNKQKRELVLREESSCPEWDNMTRIAQLARQLREEAARWLGVFGDDAKVRQKIGTPTGYQTSVCREAWSENVPKKDRTNLRHHLWDAAVISHIPPDRGMQLSHCGGIFFHAGEKKNGNILMRALPGLGPDLNSFENATKDQCLVEKKKTNRSKKSRFQQWIYGFPDKNGQMWARDSLKSLADKANLLELLRDAGIGENQLPTSHFEEWQEKRKAQFFTREEAWAAVEALALPPEQKIPEPIFEEWWSYRFSGDKRKVDEKLLRILIAKAGVKESVSKERLASVLTNRGDPGPLTRKDGTPINGVSGTAKQMTPMAIIPHRNHKREIIGFKLATESFVRAEIWVTEKPTKDGNAELNYHCRLIPHPRGLANLRQRVMQCTGKQLTWERRLTDEELRELGLLKELAALKREQEKISATHAKAVQKWQKEQQAKTNTLDLASSPSVQPIELKLPWLSLRKCYAGLPLYARRLTNKHGADISRIAKDDLLRVPLNSEGDICKREESAYQTLWYRVSAINKSGKIEMKMAERKQIKPPSERELRDGKRKPLTTDELWRVYAYTKEPSSTDVLAYLLEITRGNDQPPHPVK

SEQ ID NO: 17060 - protein, 1082 aa, unidentified
  REGION 1..1082: note = Cas Enzyme sequence
MVASQNLSYIEIAFDVGHSSIGWAVLGTRQSVTLPCTLGCGVVTFEKDSALANQRRLHRSQRRHVRATRLRIARMEKLLVYLRIFTAEQLSIKHQASGGHSAPWLLAARVLASDGAHTLTWPELWDVLRWYAHNRGYEEIGAEIEEIENGIDDEKQKNAEKIANSKAAMATFGKSTMAETICAWLGLDPAGKSQASIENYKAKNSAFERAVVIKEVRRVLVAHCGKLPCVDDTFIAVLLDDARAIAVPSIKLPGRYKGSLLFGRLQTRYHNRIVGRCPISGQKIPNKNTPEFLRYRWAMQLANIRVASDVEGELRPLSVHERKSLHRDMVNAGYFGVKALKEKIRSLPGVLRDNLDNLLLHPDAKDAFIFDPAQKLVTSHPQLSQVWHHLPEQVRKRNVGRWRSGKQTTLAILRAEAALLRHDLTSFDTAVAAMLSSSFKKPKGKSSAVTLEDILRAPLDIRRELSRLSGRAAYARPLLAKAFDEVMAGIDPKGKGGCLEETDGVRVRRETRPLPQQTNNHLVRHRLLILSRLLSDLIADKNYAAGEAQRVNRVTIEVNRDLREMSGMTAQDIAKELGARLSNHKKVSARLEKDLPDGTLVNAGLIRKARIADDLEWRCPYTGVEFEPIDLVEKRVDKDHVIPRSQRPTDSLDALVVTFSTINKWKGKRTAWQFIQDEGGKSVPDAPHLSIMPMNRFKEFVGKLDTSGHHDDYRRKKRRKEYLLLEHYEEKSGGFTPGQLTQTSQLARLAAQVVRAPFAHLPQPPSIVALPGSVTGSVRRSWDVLGCLAAAAPDVLNTDGSVKTKTEVREITHLHHALDACVIALAAWLIPNRGDVWRLLAERRLGPEQQKHLIQNLPTKLVDFDAQGGFRLRDLPEELKQQIRTCLAERRVIQHVPRDMNGLHVEENTRGVVKRENGRVFLRQRKRNAEGKLVINQTDEMESKVIGLPDLAQTGGKLAKLNGVRVIADNFGVAILNDEKLSPEERFIIIPFADVWKRLAELQRRNGGRRPVILRNGQIIELSNGKRAGRWRIFSIKNNTSGMALDLGTVDSVKPTEINCLLKSLLRDKARRLNTTLTGVEI

SEQ ID NO: 17061 - protein, 1084 aa, unidentified
  REGION 1..1084: note = Cas Enzyme sequence
MVASKNPARLELSFDIGHSSIGWAVLSIPTATPLPDILGCGVVTFEKDGALANQRRLHRSQRRHVRATRLRIARMEKLLAHLGVLTAEQLAAKHQASGGHPVPWLLAARVLASDGAQLLSWPELWDVLRWYAHNRGYEEIGSEASADDAPADDEKAKDAEKVANAKAAMSRLGKSTMAETICAWLGLDPLGERRPTHENYKAKNSAFERPVVIAEVRRILAAHRGKLPALDDAVITALLDDARVLSIPTIRFPKRYQGGLLFGRLATRYHNRIIGRCPISGEKIPSKNCPEFLRYRWGMQLANIRVGTDAKGDLRPLSIEERKTLHAAMTSAGHLSVKALKETVRSLPGVVRDNLENLLLHPDAKEAFIFDPAQKLITSHPHLSAIWPHLPERIQKRAKGRWRHGKSMTLAVLRSEAAALGHDLTAFDAALSALLSPDAKKPKGKKAATLTREGILSAPLDIRRDLSRLSGRAPYARPLLSKAFDEVMAGNDPKAKGGCLEETDEVRRRRETRPIPEQTNNHLVRHRLLILGRLLRDLIADKSYAAGDPARINRVTIEVNRDLREMSGLSAQDIAKELGARLSNHKKVSARLEKDLPEGTPITAGLIRKARIADDLGWRCPYTGVDFEPVDLIEKRVDKDHIIPRSQRPTDSLDALVITFNTINRWKGKRTAWQFIEDEGGKPVPGAPHLSIMPMNRFKEFVEKLDARNGHEEDRRRKKRRKEFLLLEKYEEKSGGFTPGQLTQTSQLARLAAQVVREPFTGIKEPPTIVALPGSVTGTVRRSWDLLGCLSAATPAVLDSDGSVKTKTEIREITHLHHALDACVIGLAAHFIPNRGDVWRLLSERRLRPEQQAQLVEALPTKLLDFDAQGGFRLRDLPDELKQQIRARLTERRVVQHISRDMNGLRVEENTRGVIRRENGRVFLRQQKRDADGKRIINETNEPEGKVIGLPPLGQTGGKLAKLNGVRVIADNFGVAILDDEKLPPEDRFVIIPFAHVWKRVAELKTRNGGKRPQIWRNGQIIELKKGKRAGLWRIFSIKNNTSGMALDLGPIDAVKPIWINCLLKSLLRDGARRLNTTFSGADI

SEQ ID NO: 17062 - protein, 1530 aa, unidentified
  REGION 1..1530: note = Cas Enzyme sequence
MKNILGLDLGTNSVGWALISVDENGNLVKDIRLGSRIIPMSQDVLGKFDSGVTVSQTAERTEYRSHRRLLERALLRRERLHRVLHLLGFLPEHYAACIGWDRNDNATYGKFLPETEPKLAWRKADDGGYRFVFMQSFEEMLDEFSASQPTLVANGKRIPLDWTLYYLRTKALTKPIAKEELAWILLNFNQKRGYYQLRGEEEEETPSKRVEYHELKVVKVEATDEGKGGNVWYNVLLENGWVYRRQSKYSLDKWLGQTLPFIVTTDLEADGVTPKCDKEGNVKRSFRSPKEDDWTLVKKRTEDHLEKSGLTVGAFIYQHLLANPSDKVRGQLVRTIDRKYYKRELQAIIAKQMEFHPELRDAELLKACAEELYRNNEAHRAQLLAKDFKHLLVEDVLFYQRPLKSKKSLIANCPYETRQYINKETGEIKDVNVKCIAKSNPYFQEFRLWQWISNLRLLRQMDGQDVTADYIKGNDDKERLFDLLNNQGEIKQEHILRDFLKLKKPKGGEFPLRWNYVDDKIYPANETRHAMNKAIKGMAVDKEEKETLGQLFDQPAVAYMLWNLLYSITDRNELASALRRFALTHGVSSVDAFVESFLKVKPFKKEYGAYSEKATKKLLQVMRLGKYWCGDELPEPAKRTKGNKQAVYDEMANRGICKQTLQNISSIIEEDIDERLMSALLNPERPLTELSHFQGLSVSDACYVVYGRHSEVAEIVKWKDAGELNTFINNFKQHSMRNPIVEQCVLETLRTVRDVWEQEGQIDEIHVELGRNMKRTAEQRARDTQAIQRNENTNMRISLLLTELKNDPSISDVRPYSPSQRELLKIYEEGALENLTNQDEDIAKISRLAQPSTSELRRYKLWLDQKYLSPYTGRPIPLAKLFTPAYEIEHIIPQSRYFDNSFSNKVICETDVNKLKANNLGMEFIKKFGGKTKGILDEEAYKLHVTTNYAHNPAKRSKLLMEDLPTDFNSRQLNDTRYISKTVMALLSNVVREEGERETRSKHVVVCTGGVTDTLKKDWGLQDVWHNLVYPRFIRLNNLTGSQDFGYWRYLDEENRKKGEDSKKVFQITLPPECQRGFVKKRIDHRHHAMDALVIACASADIVNYLNNQSAANPHARQDLQRLLCDRKRVIRKPWPTFTQDAQKALEDLVVSFKNTVRVVNKASNTYLRYDKDGKKKRFKQEGEGLKAIRKPMHKETYYGEVNLIRKEMLPLKRALEDVDAIVDKELRACIKGLLRDGFNPQQVLANFKAKDFKFNKRDIKKVEVYVSSAKSTPMVATRKSLDTSFNAKRIADITDTGIQKILLNYLKANDNSPEQAFTPEGIAYLNEHIAEYNNGKPHQPILKVRVSEVKGAKFAVGQTGSKKTKFVEAQSGTNLYFAIYEGKEGKRNFKTIALDEVAERLKKGQTPVPETNDAGQPLKFYLSPNDLVYVPTDEDRAAAHPSIDKRRIYKMVSATEGKCHFLPVSVASVIADKVEFEAMNKIGRVIDALEYKEKSEEENKTSAGSKVMIKDVCWKLEVDRLGNITKIVR

SEQ ID NO: 17063 - protein, 1530 aa, unidentified
  REGION 1..1530: note = Cas Enzyme sequence
MKNILGLDLGTNSVGWALISVDENGNLVKDIRLGSRIIPMSQDVLGKFDSGVTVSQTAERTEYRSHRRLLERALLRRERLHRVLHLLGFLPEHYAACIGWDRNDNATYGKFLPETEPKLAWRKADDGGYRFVFMQSFEEMLDEFSASQPTLVANGKRIPLDWTLYYLRTKALTKPIAKEELAWILLNFNQKRGYYQLRGEEEEETPSKRVEYHELKVVKVEATDEGKGGNVWYNVLLENGWVYRRQSKYSLDKWLGQTLPFIVTTDLEADGVTPKCDKEGNVKRSFRSPKEDDWTLVKKRTEDHLEKSGLTVGAFIYQHLLANPSDKVRGQLVRTIDRKYYKRELQAIIAKQMEFHPELRDAELLKACAEELYRNNEAHRAQLLAKDFKHLLVEDVLFYQRPLKSKKSLIANCPYETRQYINKETGEIKDVNVKCIAKSNPYFQEFRLWQWISNLRLLRQMDGQDVTADYIKGNDDKERLFDLLNNQGEIKQEHILRDFLKLKKPKGGEFPLRWNYVDDKIYPANETRHAMNKAIKGMAVDKEEKETLGQLFDQPAVAYMLWNLLYSITDRNELASALRRFALTHGVSSVDAFVESFLKVKPFKKEYGAYSEKATKKLLQVMRLGKYWCGDELPEPAKRTKGNKQAVYDEMANRGICKQTLQNISSIIEEDIDERLMSALLNPERPLTELSHFQGLSVSDACYVVYGRHSEVAEIVKWKDAGELNTFINNFKQHSMRNPIVEQCVLETLRTVRDVWEQEGQIDEIHVELGRNMKRTAEQRARDTQAIQRNENTNMRISLLLTELKNDPSISDVRPYSPSQRELLKIYEEGALENLTNQDEDIAKISRLAQPSASELRRYKLWLDQKYVSPYTGRPIPLAKLFTPAYEIEHIIPQSRYFDNSFSNKVICEAEVNKLKANNLGMEFIKKFGGKTKGILDEEAYKLHVTTNYAHNPAKRSKLLMEDLPTDFNSRQLNDTRYISKTVMALLSNVVREEGERETRSKHVVVCTGGVTDTLKKDWGLHDVWHNLVYPRFIRLNNLTGSQDFGYWRDLNEEERKKGEDSKKVFQITLPPECQRGFVKKRIDHRHHAMDALVIACASANIVNYLNNQSAANPHVHESLQRLLCDRKRVIRKPWPTFTQDAQKALEDLVVSFKNTVRVVNKASNTYLRYDKDGKKKRFKQEGEGLKAIRKPMHKETYYGEVNLIRKEMLPLKRALDDVNAIVDKELRASIKGLLRDGFNLQQVLANFKDKDFKFNKRDIKKVEVYVSSEKSTPMVATRKLLDTSFNAKRIADITDTGIQKILLNYLKANDNSPEQAFTPEGIAYLNEHIAEYNNGKPHQPILKVRVSEIRGAKFAVGHTGTKRTKFVEAQSGTNLYFAIYEGNEGKRHFETIALNVAAERLKMGQTPVPETNDAGLPLKFYLSPNDLVYVPTDEDRVAAHPSIDKRRIYKMVSATDRECHFLPFEVASIIADKVEFEAKNKVGRVIDTLEYKEKSEEDNKTSAGSKVMIKDVCWKLEVDRLGNITKIVR

SEQ ID NO: 17064 - protein, 1432 aa, unidentified
  REGION 1..1432: note = Cas Enzyme sequence
MKKILGLDLGSNSIGWALVNEAENSDEASSIIKLGVRVNPLTVDEMQNFEKGKSITTNADRTLKRSMRRNLQRYKLRRDALIKLLKKVGFITDGTILSEQGNRTTFETYRLRAKAPDEEISLQELARVLLMINKKRGYKSSRKIKEKETGTLIDGMEVAKKLYDEDLTPGQLCLQLLESGKKSLPDFYSSDLQEEFDRIWNFQKQFNPKAFCDTAKEEIKGKNKSQTWAILAKYFIWTDEMVVWNEKESKTERVEKECKLVGLKRTVKKEEQRKENYRWRVQALTEQLDLEKVAVVLQEINGQISTSSGYLGAISDRSKVLYFNRQTVGQYQMAELEKNPNTSLRNMVFYRQDYLDEFDKIWEKQAEFHKELTVELKKEIRDIIIFYQRRLKSQKGLIGFCEFENREIMVEKNGKMQAKVVGCKAIPRSHPLFQEFKIWQTLNNVEVFAGEKKCKRKRTDAFPGLFDGTEDTLMVEGWRYLYQEEKEILAKELSVKKSLKKECILKLLFDNPQDLDMNFEQIEGNDTGNVLFSAYSKMIEKYGYEPLDFGKPTDEIIERLQDIFTDLGWNTDLLFVDLNKEGKDLEKQPYFKLWHLLYSFEGDNTPTGNGKLVEKLMELCHVGKECALELVNISFQNDYGSLSAKAIKKILPYLKEGNRYDVACGYAGYRHSKSSLIKEEIENKVLKDKLDILPKNSLRNPVVEKILNQMVNVINAIIDTYGKPDEIRVELARELKKSAKEREELTKAIAKSTREHEEIRKVLQEEFGMINVSRNDIIRYKLYEELKDNEYKTLYSNQYIPKEKVFSKEIDIEHIIPQARLFDDSLSNKTLEYKAINIEKGNKTAYDFVKEKYGEKGLQQYLNRCESLFKGHRTKLRKLKMEQENIPEGFIDRDLRNTQYIAKKALAMLNEICRRVVATTGSITDRLREDWQLVDVLKELNLPKYETLGLVEVYEDKDGRKIKRIKDWTKRNDHRHHAMDALTVAFTKDAFIQYFNNKNAAWQVDCKEHSDIIGIKTRYFENGRALPPMPLVRFRAEAKSHLETLLVSIKAKNKVVTNNVNCTKRKGGENKKLQQTPRGQLHLETIYGSHRQYVTKEEKVNASFDSSKIATVCKQAYRNALLERLAAFGNDPKKAFTGKNSLEKNPVYLDREQTARVPERVRTVELETVYTIRKPVDPNLSVDKVVDAKVRSILEQRLREYDGEAKRAFVNLDENPIWLNEEKGIAIKRVTIRGINKVQSLHGKKDKNGNLILDETGKKIPVDFVNTGNNHHVAIYRKPVLDKTGQEMLDAEGNPVYELDEVVVSFFEAVTRVNLGLPVIDKNYNKSEGWQFMFTMKQNEYFVFPNEKTGFDPKEVDLLNPENYAVISPNLFRVQKISTKNYMFRHHLETTVIDNKPLRKITWELIQTPNKLDGIVKVRVNHIGQIVSVGEY

SEQ ID NO: 17065 - protein, 1163 aa, unidentified
  REGION 1..1163: note = Cas Enzyme sequence
LEAKTKTSTSKIFLGKYGIYSADLKGLDRKLQPIKWRVEALRQQVDKDVLAFVISDLKGQIANTSGLLGAISDRSKELYFNKQTIGQYLWASLKENPHVSVKNQPFYRQDYIDEFEKIWETQASFHKELTPELKQEIRDIIIFYQRPLKSKKGLISVCELEQRKVKVTIDGKEKEITIGPKVAPKSSPMFQEFRIWQNLNNIQLIDNERNSKRSLYEEERNLLYEELSIRDRLSKAEALRVLGKKNRQWDLNYKELEGNRTQATLFSCYNKIITMTGHEECNFKQLKAPEIRHYIKTIFKNLGFNTGILEFDSSLNGHELEQQPMYQLWHLLYSYESDKSRTGNEALLKKLETIFGFPREYASVLAEVAFEDSYGNLSVKAIREILPHLQAGLDYSQACEEAGYKHSRRSLTKEELDQKEYKEKLELLPKNSLHNPVVEKILNQMINVINAVIDEYGKPDEIRIELARELKIGAAERENMTRSISQGNAENKRIREILEKEFALSYISRNDIIKYKLYEELKPNGYKTLYSDTYIPKDKLFSKDFDIEHIIPKARLFDDSLSNKTIEARDVNIAKSNKTAFDFISGKYGQQGIEAYKKKLYILLQGGSINKAKYNRLLMKEADIPSDFINRDLQNTRYITRKAYEILSDLVRVVTPTSGAVTSRLREDWQLVDIMKELNFEKYQKLGLTEVIEDKDGRKIKRIKDWTKRNDHRHHAMDALTIAFTKPSFIQYLNNLNARSNKGDSIYAIENKELHREDGKLCFNAPLPINEFRAEAKKHLKAVLVSIKAKNKVMTQNVNKIKTKHGVIKKVQLTPRGELHNATFYGTKKRPIIKMVRVGAALDEVTIKKVSSSFIRKVLLDRLYEYNGDAKKAFTGRNSIDKNPIYIDEERKRTVPALVKTIEWEMYHPTRKLISPDLKIDKVIDKGIRDILKTRLAKFNGDVQKAFSNLDENPIYKDEAKKIILKRVSLEGVSSVIPLHTIKDRAGMPITGKDSEPVLGDYVQTSNNHHVAFYIDENGNLQDNIVSFFEAAERKSQGVPIIDKNFNHDIGWRFLFTMKQNEYFVFPNEVTGFNPSEVDLMDEANYDIISPNLYRVQKMSRVVYGKSIIRDYVFRHHLETTVEANANLKGLAYKQLKSLSYLEGIVKVRINCIGKIVAVGEYD

SEQ ID NO: 17066 - protein, 1380 aa, unidentified
  REGION 1..1380: note = Cas Enzyme sequence
MKKILGLDLGTTSIGWALVNECENEDEKSSIIRLGVRVNPLTTDEKGNFERGKAITTNSDRQQTHGARINLQRYKLRRKYLCDCLNKHGWIGSEPMYEDEKSSTFETYKLRAKAVEEEVSLHEFARILFMMNKKRGYKSNRKANDKEEGMLFDGMSVAKKLYEEHLTPAEYSLQLLNKGKRFTPEYYRSDLVEEFEKIWNEQKKYYPEILTDEFKRQLEAKTKTSTSKIFLGKYGIYSADLKGLDRKLQPIKWRVEALRQQVDKDVLAFVISDLKGQIANTSGLLGAISDRSKELYFNKQTIGQYLWASLKENPHISVKNQPFYRQDYIDEFEKIWKTQASFHKELTLELKQEIRDIIIFYQRPLKSKKGLISVCELEQRKVKVTIDGQEKEITIGPKVAPKSSPMFQEFRIWQNLNNIQLIDNERNSKRSLYEEERNLLYEELSIRDRLSKTEALRVLGKKNRQWDLNYMELEGNRTQATLFRCYNKIITMTGHEECNFKQLKAPEIRHYIKTIFKNLGFNTGILEFDSSLNGHELEQQPMYQLWHLLYSYESDKSRTGNEALLKKLETIFGFPKEYASVLAEVAFEDSYGNLSVKAIREILPYLQAGLDYSQACEEAGYKHSRRSLTKEELDEKEYKEKLELLSKNSLHNPVVEKILNQMINVINAVIDEYGKPDEIRIELARELKIGAAERENMTRSISQGNAENKRIREILEKEFALSYISRNDIIKYKLYEELKPNGYKTLYSDTYIPKDKLFSKDFDIEHIIPKARLFDDSLSNKTIEARDVNIAKSNKTAFDFISGKYGQQGIEAYKKKLYILLQGGSINKAKYNRLLMKEADIPSDFINRDLQNTRYITRKAYELLSDLVRVVTPTSGAVTSRLREDWQLVDIMKELNFEKYQKLGLTEVIEDKDGRKIKRIKDWTKRNDHRHHAMDALTIAFTKPSFIQYLNNLNARSNKGDSIYAIENKELHREDGKLCFNAPLPINEFRAEAKKHLKAVLVSIKAKNKVMTQNVNKIKTKHGVIKKVQLTPRGELHNATFYGTKKRPIIKMVKVGAALDEVTIKKVSSSFIRKALLDRLYEYNGDAKKSFTGRNSIDKNPIYIDEERKRTVPALVKTIEWEMYHPTRKLISPDLKIDKVIDKGIRDILKTRLAKFNGDAQKAFSNLDEEPIYKDEAKKITLKRVSLEGVSSVIPLHTLKDRSGMPITGKDSEPVLGDYVQTSNNHHVAFYIDENGNLQDNIVSFFEAAERKSQGVPIIDKNLNHDIGWHFLFTMKQNEYFVFPNEVTGFNPSEVDLMDEANYDIISPNLYRVQKMSRVVYGKSIIRDYVFRHHLETTVEANANLKGLAYKQLKSLSYLEGIVKVRINCIGKIVAVGEYD

SEQ ID NO: 17067 - protein, 1380 aa, unidentified
  REGION 1..1380: note = Cas Enzyme sequence
MKKILGLDLGTTSIGWALVNECENEDEKSSIIRLGVRVNPLTTDEKGNFERGKAITTNSDRQQTHGARINLQRYKLRRKYLCDCLNKHGWIGSEPMYEDEKSSTFETYKLRAKAVEEEVSLHEFARILFMMNKKRGYKSNRKANDKEEGMLFDGMSVAKKLYEEHLTPAEYSLQLLNKGKRFTPEYYRSDLVEEFEKIWNEQKKYYPEILTDEFKRQLEAKTKTSTSKIFLGKYGIYSADLKGLDRKLQPIKWRVEALRQQVDKDVLAFVISDLKGQIANTSGLLGAISDRSKELYFNKQTIGQYLWASLKENPHVSVKNQPFYRQDYIDEFEKIWETQASFHKELTPELKQEIRDIIIFYQRPLKSKKGLISVCELEQRKVKVTIDGKEKEITIGPKVAPKSSPMFQEFRIWHNLNNIQLIDNERNSKRSLYEEERNLLYEELSIRDRLSKAEALRVLGKKNRQWDLNYKELEGNRTQATLFSYYNKIIMMTGHEECNIKQLKAPEIRHYIKTIFKNLGFNTGILEFDSSLNGHELEQQPMYQLWHLLYSYESDKSRTGNEALLKKLETIFGFPREYASVLAEVAFEDSYGNLSVKAIREILTHLQAGLDYSQACEEAGYKHSRRSLTKEELDEKEYKEKLELLSKNSLHNPVVEKILNQMINVINAVIDEYGKPDEIRIELARELKIGAAERENMTRSISQGNAENKRIREILEKEFALSYISRNDIIKYKLYEELKPNGYKTLYSDTYIPKDKLFSKDFDIEHIIPKARLFDDSLSNKTIEARDVNIAKSNKTAFDFISGKYGQQGIEAYKKKLYILLQGGSINKAKYNRLLMKEADIPSDFINRDLQNTRYITRKAYELLSDLVRVVTPTSGAVTSRLREDWQLVDIMKELNFEKYQKLGLTEVIEDKDGRKIKRIKDWTKRNDHRHHAMDALTIAFTKPSFIQYLNNLNARSNKGDSIYAIENKELHREDGKLCFNAPLPINEFRAEAKKHLKAVLVSIKAKNKVMTQNVNKIKTKHGVIKKVQLTPRGELHNATFYGTKKRPIIKMVKVGAALDEVTIKKVSSSFIRKALLDRLYEYNGDAKKSFTGRNSIDKNPIYIDEERKRTVPALVKTIEWEMYHPTRKLISPDLKIDKVIDKGIRDILKTRLAKFNGDAQKAFSNLDEEPIYKDEAKKITLKRVSLEGVSSVIPLHTLKDRSGMPITGKDSEPVLGDYVQTSNNHHVAFYIDENGNLQDNIVSFFEAAERKSQGVPIIDKNFNHDIGWHFLFTMKQNEYFVFPNEVTGFNPSEVDLMDEANYDIISPNLYRVQKMSRVVYGKSIIRDYVFRHHLETTVEANANLKGLAYKQLKSLSYLEGIVKVRINCIGKIVAVGEYD

SEQ ID NO: 17068 - protein, 1380 aa, unidentified
  REGION 1..1380: note = Cas Enzyme sequence
MKKILGLDLGTTSIGWALVNECENEDEKSSIIRLGVRVNPLTTDEKGNFERGKAITTNSDRQQTHGARINLQRYKLRRKYLCDCLNKYGWIGSEPMYEDEKSSTFETYKLRAKAVEEEVSLHEFARILFMMNKKRGYKSNRKANDKEEGMLFDGMSVAKKLYEEHLTPAEYSLQLLNKGKRFTPEYYRSDLVEEFEKIWNEQKKYYPEILTDEFKRQLEAKTKTSTSKIFLGKYGIYSADLKGLDRKLQPIKWRVEALRQQVDKDVLAFVISDLKGQIANTSGLLGAISDRSKELYFNKQTIGQYLWASLKENPHVSVKNQPFYRQDYIDEFEKIWETQASFHKELTPELKQEIRDIIIFYQRPLKSKKGLISVCELEQRKVKVTIDGKEKEITIGPKVAPKSSPMFQEFRIWHNLNNIQLIDNERNSKRSLYEEERNLLYEELSIRDRLSKAEALRVLGKKNRQWDLNYKELEGNRTQATLFSYYNKIIMMTGHEECNIKQLKAPEIRHYIKTIFKNLGFNTGILEFDSSLNGHELEQQPMYQLWHLLYSYESDKSRTGNEALLKKLETIFGFPREYASVLAEVAFEDSYGNLSVKAIREILTHLQAGLDYSQACEEAGYKHSRRSLTKEELDEKEYKEKLELLSKNSLHNPVVEKILNQMINVINAVIDEYGKPDEIRIELARELKIGAAERENMTRSISQGNAENKRIREILEKEFALSYISRNDIIKYKLYEELKPNGYKTLYSDTYIPKDKLFSKDFDIEHIIPKARLFDDSLSNKTIEARDVNIAKSNKTAFDFISGKYGQQGIEAYKKKLYILLQGGSINKAKYNRLLMKEADIPSDFINRDLQNTRYITRKAYELLSDLVRVVTPTSGAVTSRLREDWQLVDIMKELNFEKYQKLGLTEVIEDKDGRKIKRIKDWTKRNDHRHHAMDALTIAFTKPSFIQYLNNLNARSNKGDSIYAIENKELHREDGKLCFNAPLPINEFRAEAKKHLKAVLVSIKAKNKVMTQNVNKIKTKHGVIKKVQLTPRGELHNATFYGTKKRPIIKMVKVGAALDEVTIKKVSSSFIRKALLDRLYEYNGDAKKSFTGRNSIDKNPIYIDEERKRTVPALVKTIEWEMYHPTRKLISPDLKIDKVIDKGIRDILKTRLAKFNGDAQKAFSNLDEEPIYKDEAKKITLKRVSLEGVSSVIPLHTLKDRSGMPITGKDSEPVLGDYVQTSNNHHVAFYIDENGNLQDNIVSFFEAAERKSQGVPIIDKNFNHDIGWHFLFTMKQNEYFVFPNEVTGFNPSEVDLMDEANYDIISPNLYRVQKMSRVVYGKSIIRDYVFRHHLETTVEANANLKGLAYKQLKSLSYLEGIVKVRINCIGKIVAVGEYD

SEQ ID NO: 17069 - protein, 1380 aa, unidentified
  REGION 1..1380: note = Cas Enzyme sequence
MKKILGLDLGTTSIGWALVNECENEDEKSSIIRLGVRVNPLTTDEKGNFERGKAITTNSDRQQTHGARINLQRYKLRRKYLCDCLNKHGWIGSEPMYEDEKSSTFETYKLRAKAVEEEVSLHEFARILFMMNKKRGYKSNRKANDKEEGMLFDGMSVAKKLYEEHLTPAEYSLQLLNKGKRFTPEYYRSDLVEEFEKIWNEQKKYYPEILTDEFKRQLEAKTKTSTSKIFLGKYGIYSADLKGLDRKLQPIKWRVEALRQQVDKDVLAFVISDLKGQIANTSGLLGAISDRSKELYFNKQTIGQYLWASLKENPHISVKNQPFYRQDYIDEFEKIWKTQASFHKELTLELKQEIRDIIIFYQRPLKSKKGLISVCELEQRKVKVTIDGQEKEITIGPKVAPKSSPMFQEFRIWQNLNNIQLIDNERNSKRSLYEEERNLLYEELSIRDRLSKTEALRVLGKKNRQWDLNYMELEGNRTQATLFRCYNKIITMTGHEECNFKQLKAPEIRHYIKTIFKNLGFNTGILEFDSSLNGHELEQQPMYQLWHLLYSYESDKSRTGNEALLKKLETIFGFPKEYASVLAEVAFEDSYGNLSVKAIREILPYLQAGLDYSQACEEAGYKHSRRSLTKEELDEKEYKEKLELLSKNSLHNPVVEKILNQMINVINAVIDEYGKPDEIRIELARELKIGAAERENMTRSISQGNAENKRIREILEKEFALSYISRNDIIKYKLYEELKPNGYKTLYSDTYIPKDKLFSKDFDIEHIIPKARLFDDSLSNKTIEARDVNIAKSNKTAFDFISGKYGQQGIEAYKKKLYILLQGGSINKAKYNRLLMKEADIPSDFINRDLQNTRYITRKAYEILSDLVRVVTPTSGAVTSRLREDWQLVDIMKELNFEKYQKLGLTEVIEDKDGRKIKRIKDWTKRNDHRHHAMDALTIAFTKPSFIQYLNNLNARSNKGDSIYAIENKELHREDGKLCFNAPLPINEFRAEAKKHLKAVLVSIKAKNKVMTQNVNKIKTKHGVIKKVQLTPRGELHNATFYGTKKRPIIKMVKVGAALDEVTIKKVSSSFIRKALLDRLYEYNGDAKKSFTGRNSIDKNPIYIDEERKRTVPALVKTIEWEMYHPTRKLISPDLKIDKVIDKGIRDILKTRLAKFNGDAQKAFSNLDEEPIYKDEAKKITLKRVSLEGVSSVIPLHTLKDRSGMPITGKDSEPVLGDYVQTSNNHHVAFYIDENGNLQDNIVSFFEAAERKSQGVPIIDKNLNHDIGWHFLFTMKQNEYFVFPNEVTGFNPSEVDLMDEANYDIISPNLYRVQKMSRVVYGKSIIRDYVFRHHLETTVEANANLKGLAYKQLKSLSYLEGIVKVRINCIGKIVAVGEYD

SEQ ID NO: 17070 - protein, 1052 aa, unidentified
  REGION 1..1052: note = Cas Enzyme sequence
LYEGDAIKDIGVRIFSDGRDPKSGASLAVDRREARAMRRRRDRFIGRRSALLRELIAHGLLPADKTAAKALEVADPYALRVKALDEPLDPHEIGRALFHLNQRRGFKSNRKADRVAKPGEEGKIASGTKALDAAMQIVGARTLGEFLNGRDVKRVRPDSGEEDGSYAFYPDRKHYLAEFEAIWTKQAEFNPTLISDAAKIAIHRVIFHQRDLKPQVVGKCTFAGWCGVPDDETRLPKAHPLFQQRRLYEEVNQLEIVTAGASSRKLTLDERDTLILKLRDKTKVSFSILGKAIKLPEGARFNKESENRKELIGDEVRASLGHKDRFAGRWGGFSTEAQCTIIDRLLNEESTEKLLDWLKVSYALDVETAEAVANARLPDGHGRFGLTATTKLLEQLKDGQDADGHPLTYAAAAAEAGFHHSDFRTGECHDALPYYGEILAREIAPGKDNYGDALERKWGKITNPTVHIGLNQLRKLVNAIIRQYGRPDYIFVELARELKLNEKQKAEHNRKIKQNTDAAKQRGEKLEALGEHDSGGNRMRLRIWEELNPGNPLDRRCPYSGEIISIEMLMNGTAEVEHIIPYSRCLDDSVANKVMALTTWNRDKGNKTPWEKWGGTPQWDVIQDQVARLHKSKQWRFAPGAMERVERDGGFIARQLTDTQYLSRIAAKYLGALYPEKGERHVYAVTGRMTAMLRRIWGLNELLPDHNYVENPHSNAPKNRLDHRHHAIDAAVVGATTPAMIAEIAKAAGRAEAQALDKLFVDLPEPWNGFRDELRDKLLATTVSHKADHGRKGAAIPGKDVTAGRLHNDTAYGLTGRTNAKGAPIVTVRKPLLSLQSKDLTDPERMPDKDLQSRLYSATQSATGKEFENALRAFAKRDGPYKGIRRVRLSEALNVIPIYDKEGRAYKGVKGDANARFDVWRLPDGKWVSKWTDRDGVERSGVVSMFNAHQKGKAELKPHPAAKRVLSLRQNDLVAVERDGGAREILRVVKFSSIGSMQLAPHNEAGALKGRDADPVDPFKYINTSAPGLKNMKARQIRIDELGHIHDPGPRG

SEQ ID NO: 17071 - protein, 1052 aa, unidentified
  REGION 1..1052: note = Cas Enzyme sequence
LYEGDAIKDIGVRIFSDGRDPKSGASLAVDRREARAMRRRRDRFIGRRSALLRELIAHGLLPADKTAAKALEVADPYALRVKALDEPLDPHEIGRALFHLNQRRGFKSNRKADRVAKPGEEGKIASGTKALDAAMQIVGARTLGEFLNGRDVKRVRPDSGEEDGSYAFYPDRKHYLAEFEAIWTKQAEFNPTLISDAAKIAIHRVIFHQRDLKPQVVGKCTFAGWCGVPDDETRLPKAHPLFQQRRLYEEVNQLEIVTAGASSRKLTLDERDTLILKLRDKTKVSFSILGKAIKLPEGARFNKESENRKELIGDEVRASLGHKDRFAGRWGGFSTEAQCTIIDRLLNEESTEKLLDWLKVSYALDVETAEAVANARLPDGHGRFGLTATTKLLEQLKDGQDADGHPLTYAAAAAEAGFHHSDFRTGECHDALPYYGEILAREIAPGKDNYGDALERKWGKITNPTVHIGLNQLRKLVNAIIRQYGRPDYIFVELARELKLNEKQKAEHNRKIKQNTDAAKQRGEKLEALGEHDSGGNRMRLRIWEELNPGNPLDRRCPYSGEIISIEMLMNGTAEVEHIIPYSRCLDDSVANKVMALTTWNRDKGNKTPWEKWGGTPQWDVIQDQVARLHKSKQWRFAPGAMERVERDGGFIARQLTDTQYLSRIAAKYLGALYPEKGERHVYAVTGRMTAMLRRIWGLNELLPDHNYVENPHSNAPKNRLDHRHHAIDAAVVGATTPAMIAEIAKAAGRAEAQALDKLFVDLPEPWNGFRDELRDKLLATTVSHKADHGRKGAAIPGKDVTAGRLHNDTAYGLTGRTNAKGAPIVTVRKPLLSLQSKDLTDPERMPDKDLQSRLYSAAQSATGKEFENALRAFAKRDGPYKGIRRVRLSEALNVIPIYDKEGRAYKGVKGDANARFDVWRLPDGKWVSKWTDRDGVERSGVVSMFNAHQKGKAELKPHPAAKRVLSLRQNDLVAVERDGGAREILRVVKFSSIGSMQLAPHNEAGALKGRDADPVDPFKYINTSAPGLKNMKARQIRIDELGHIHDPGPRG

SEQ ID NO: 17072 - protein, 1218 aa, unidentified
  REGION 1..1218: note = Cas Enzyme sequence
KLDVNKEYDRYKIGRAFYHIAQRRGFLSNRLEGTKEGDGVVKKSIAEISVAKEDKTLGQYFYEKYVNGDKIRDQYTHREAHYLEEFNRICEFQNLPKPLRNKLHQAIFYQRPLKSQKGLVGRCVFEPKKPRCVVSHPKFEEYRKLCFINTIKIKTPNDEKLRFLNTTEKENIEPLFYRKSKDYFDFEEISKQLAPKKQYKFYKDPNVNPEDFLFNYTMKTTVMGCPVSARLKELFGENYMNLTIEYIRGKDGQQSTIDINDVWHVLVTYHSEEKLAEFVQKRLHLNDDQIKEFLKIHPKQEYASLSLKAINKIIPYLREDLIYSHAVFLASMEDIVPPDTWKNDENKKIIKEEIHHIIQTQNEEKQIIDAVNGIIKKSREENAYWSKEASEIFKSNLIKSLRNQFGTTKLIEFGEEKKNLILDNAYALLKKQMNRNMGRGEFAVVQRIDERVKAFLVDNFDVDERRLDKIYHPSAIDVYKPAVVGSDKNLYLGSPMVSAVRNPMAMRALHQLRKVINELIKLNKIDPYTKIHIEMARDLMNANERKALQAWQREREKQCKEYAQKIREFYIDSIINTEPSEEDILKYQLWEEQNHKCVYTGNEIAVSDFLGANPKYDIEHTIPRSQSFDNSQENKTLCDNVYNRSVKRNKIPSELDNYKEILLRIEHWKEKYEELNTQIQSAIKQTRASTDKNAKDRAIQKRHRLSYERNYWFNKHRRFTMQEVPEGFKNSQIVDTGIITKYARLYLKTVFEKVYTVKGNTVADFRKIWGLQPEYLEKERINHIHHCIDAITIACITKENYENLAKFYHEWEELHKAGVDKKPQVEKPWETFTEDIKSIEDEVLVSHYTPDVLPKQTKKKLRKRGKIQYNKEGKPIYQQGDTVRGSLHKETFYGAIEREVKTKNGEIEKQIRYVVRKPLDTLEDSNIKNIVDPKVREIITRAREEEKKLKKELDSLSKKLSNASEGEESGVLTGIDNLKTRIKNLYALPNKNGNKISIKKVRIYTPTVTNPIQLKKQRDVSQKRRKPYKEYYHVANDANYLMAIYEGIDEKGNKKRDFELINNLQAGEYYKLSVQKYLKPQDINALEGLVPSSKTTGKLSLRLKGIIKVGSMVILWEKSPGEVWELEKTDIKKRLYKIIGLSNQRIKGNKGKSYDFATIVMRHHQEASPASDLKVLDGAFEQNEDYKAQRKMNHNQFNALIEGVDFNLTLLGEIKKIT

SEQ ID NO: 17073 - protein, 1010 aa, unidentified
  REGION 1..1010: note = Cas Enzyme sequence
LNSIKIKNTYGNDSQFQFLTEFSHYFQIVKQLFFRKSKPTFKFGDISKAINREAKKRNEFFECNYKDKYPIVGSPTMSQFVSLFDAEDWENCKEKISKNYKLKDNKTVDELIDELWHTLFFASDFVNDITSKKIKEFIKARYNVTEEQIDAYEDINLKQGYASLSRKAIKNVLPFLKAHIIYSHAVFFANVDAIVGKTIWENNKEFIQDTIIDIIECFKDDNLKVDIVNGLVSDFIKEFDNADSDYVLDETDKKNVKEKIVSFYGVSKWENLSASRKESLQTEIETMFQQQLKKRRTGGYYLTKARLDEKIKQFLIDEYKVGETEANKLYHPSAIDIYQDSLSGELESPFTNSVRNPMAMRTLFQLKTLVNTLLEEDKIDTDTKVIIELARELNDKNKRLAIERYQREREAENKNYRVKLEPHAKKAKSKVTEQDIIKYRLWIEQNGKCLYTNNTISIEDLFGSNPKFDIEHTFPRSKSFDNSLANKTLSEKKFNQIKGNKIPQQLETKYLQNALMNIRHWKENIEALREKIEQQKYFSKVASTVEQKNRAIQQKHYLRLQYDYWKDKYKRFTDEEIHFRFKNSQLVDTGIVTKYAKLYLQTLFKNVFPAKGTMVADVRKSWGLKEKDRNLHYHHAIDAMVLTCMTKDIREKLAQSFLEAETLNKREKFLVEKPWDTFTKDVLSLQDEILVVHKHPDNLLKQTKRKLRKRGKIQYNKNGNVIYEQGQGLRSSLHKDTFYGAIERENEKDEKEIWYVIRKPVDSSFSETDVKNIVDEGIKERIYKHGLKNIRTEQGWIELPKENGKKPMLIKRIRLKTRLNNLPKIKKQSHISQKSKKPHKEYYYATLENIFAMAVYKAVNSKGKKIMAYQTISAFDAAKHNQGNKKMEIPVESNMIKNKGKASEILLPLSYVLKVNQMVLFYEKSKEELKKLKNKDLSNRLYKITQFESDGRIQLRHHIQGGADKDLKKESSLDFNKPAQKLRISLSNVKAGFEGKDFVLHPSGKIDFVN

SEQ ID NO: 17074 - protein, 1034 aa, unidentified
  REGION 1..1034: note = Cas Enzyme sequence
MKRLGLDLGSNSIGWCLLELGPDGEPVAISQTGVRIFNDGRHPKKLTSLKATRREARSTRRRRDRFIRRQKCLIGELVRSGLMPQDKSKREALAFRDPYPIRKKALDHQVHPHEMGRAIFHINQRRGFKSNRKTADNEAGVVKQSIAELESRLMQKKARTLGEFLADRHETKKTVRARRLGTKSADLYEFYPDRSMLEHEFETLWAAQAAFDPGLYNEDARQRIKDIVFFQRKLEPQKVGRCTFLPDEKRISKALPSFQRFRIYQELANLAWIDESGVVHPVTASVALRDRLFGELETKRKLTFKSMRAILRKEGIVDYPVQFNLESDLRDHLIGNLTSCIMRDPKKMMGEAWDRLDEAAQDRLIRTLQDGNLQDDEVRTRLVETYGLSDDVAEACLDARLPDGHGALSKEAIDRILPFLRDHGLIYYDAVKEAGFGEANLYDPHAALGDRLDYYGRALAGHVMGASGKPEDRDEQRYGTISNPTVHIALNQIRAVVNEVIRLYGKPDEVVLEIARDLPLGKAKKLNLKKSHLAGQDRNQRAREELAKLGFADSRESRQKFQLWEQLAKDPTDRKCPFTGKMIALSDLFTDKVEIEHLLPFSVTLDDSMANKTVCFREANREKGNRSPFEAFGSSPDGYDWQEILERSKTLPGSKRWRFCSDAMEQFEAEGGFMERHLNDTSYISRYTTEYMSTIIPKNKIWVVTGRLTALLRGFWGLNSILRGHNTDQDRQPKKSRDDHRHHAIDAIVVGMTSRGMLQKVSKAARRSEDLDMTHLFDDRIDPWEGFRDEVKKHIDGIVVSHRPRKKIQGALHNDTAYGIVEHVKEGASLVVHRVPITSLGKEGDIEKVRDSLIKSALLNETAGLSGKSFKEAVRKWCDAHGIKSLRILEKVSVIPIRNAKGEVYKGYKGDGNAYMEIYEEPQTGKWKSEIVSRFDAHQPGYIPAWRAAYPTACLVMRLRINDLIRFADDGVIYKLQKMSGGTLTMAPHTEANVNDRNKDKSDPFKYTLKSASSLRSAGARKIHISPTGLITEE

SEQ ID NO: 17075 - protein, 1386 aa, unidentified
  REGION 1..1386: note = Cas Enzyme sequence
MTKIKNEYIVGLDIGTNSCGWVAMDSQNSILRMHGKTAIGSHLFDAGNSAADRRAFRTTRRRIKRRKWRLKLLEEIFDPYMTEVDPYFFARLKESGLSPLDKRKNVSSIVFPTALQDKKFYCNYPTIYHLRYDLMSEDKKFDLREIYLAIHHIVKYRGNFLYNTPVKDFEASKIDVKDSLEKLNELYERLDSEFTVELDSSNALEIEKIIRDKKVFKINKVKSIHHLLSLKTENKERTKLIKDVSKQIINAILGYKTKFETILLKNISKDEADDWEFKLTDVDADNKFENLIGDLNENEQEILLVIRNLANAITLSNIVEEGKTLSESMIDKYNKHSDDLKLLKQVISDHPDRDKAKKLALAYDLYVNNRHGKLLQAKDVLGSKKTLSKEDFYKEVKKNLDDSKASQEILDAIALDSFMPKQRTNENGVIPYQLHQLELDKIIENQGKYYPFLKEVNPVSSHLKQAPYKLDELIRFRVPYYVGPLISPNESTKNKQTKKNQNFAWMIRKEQGQITPWNFDQKVDRMASANKFIKRMTTKDTYLLGEDVLPANSLLYQKFTVLNELNNIKINGKRISVPLKQELYNNLFKKNSTVTTNKLKSYLKENYNLINVEIKGLADEKKFNSGLTTYNKLRNLKIFDQQIDDLNYDKDFERIIEWSTIFEDKAIYKDKLKTIKWLSDRQIDKLSKIRMQGWGQLSKKLLSQLTDNNGQTIIEQLWDSQNNFMQIVNQSDFKDAIAVANQNLLVNTSVEDILNEAYTSPANKKAIRQVVKVVDDIVKAASGKVPKQIAIEFTRDADDKAKISQTRANKLRKVYKELSNELASETIRNELERVAKDQKLLKDKYYLYFMQLGRDAYTGEPIDIDELEQYDIDHILPQSFIKDDSLENRVLVKKAVNNGKSDNVPVKLYGNRMATDLEMTIRHMWEKWKDQGLITKTKYNNLIIDPDKINKYESSGFIHRQLVETSQIIKLASTILQSKYPDTEIIVVKARYNHYLRKHLNLYKSREVNDYHHAIDAYLSAICGNLLYQVYPYLRPFFVYGQYKKFSSDPKKEKIIYDKTRKYNFISQIFENKSNDIISLETKKKVFDKKDIIEKLKHAYDYKCMLVSRETETRDQEMFKMTVYPRLSRDTKKSRNLITKKKDMPTEIYGGYTNNSDAYMVIARINKKKGTEYRVFGVPMRELVNLRKAEKKGYYNAYLKQVLEPEIMYNKNGKKNKTISSFEIVKSKVPYKQIILDGDKKFMLGSSTYVYNAKQLTLSQDAMQAITDNCENDTDEEKALIEAYDEILTNIDKYLPLFDINKFRDKLHAGREKFINLSLDVKKDTSLQVLNGLHDNAVMPKIKSLGLSTELGKLQIPTGVKLSENAKLIYQSPTGLFEKRVKISDL

SEQ ID NO: 17076 - protein, 1423 aa, unidentified
  REGION 1..1423: note = Cas Enzyme sequence
MALQKKSQHTAYEQERKYAMKKLKQMSGPYSIGFELSSTAHGFVATDPNGNVLYHGKQPVMGTRVFKEGQHAAEARMPRTSRRGIQRRRGREHEMERVFAPVISSIDPDFFIRRRMSYKLGKIRFESDPIGFSYSRLFHSFPTLAHLDVALMESDSAMDPRLIFESVANHVVRRGHFLLENQNVSSTNSDIDTQVANYAEVLVSYFEDTLDERIEPSLEALDINGNVTARELQKRFASAMCVSGDDIQKKTEKAQIKAIADLVAGYKADLTALVPDAEKLPKVSISDGDALEEFLSDSCPDSLVSVLMAAQALYTSWKLQGMLSYAPGKSLSHNQVAQYDVYGKQLRMLKNLALKYVAKQDADGNIDEDGFKDYVRFFGGPKCEDRYRYDKVQVKKQDSPKKNMGYTAYNLNVLGYEEFAKRVELLFKDTDAVNDPQYKTMMEAFANHAFLRRIHTVDNAAIPYQLHAEVVNRIIDNQGRFYPWLIDAREHILKVLTSRIPYYVGPLDSTDHGKAGENGTRFAWVKRLAGHEDAFVSPWNYEDHIDIDTTAELFIRRMTGECSYLDGEDVLAKNSLLYEKYCFFNELASLSFTEDGDSWMPFDAGMRKAIYDAASDGKTMTVKRIESVLQRDFFIAHPHVRGTSNPKAMSSKRSNYAYFCRLFDVKALSASDMSMAEDLVLWNTVFEDRDILRRKILKTYGDLLTEKAVDDFCHKRLSGWGKLSERLLTGIWADTASGDLCVMDVLEQGRPYGRYRGSSMNLMQILNDDVLGFKMEIKRLNDSHMQMAEGFDLNALPGSPALRRGVSQAMKVLDDIVSVAGKAPDRIYLKVTRTASNSRKGKRTAKRSDKIKLALKALDADAAADLGAAKLLHELGMFDEKEINERIYLYFHQAGKCLYTGKPIDITRIASNDYYVDHVVPLAYRKDESLDNKVLVYAEASRYKSETLLVSPAVQRKMLPFWRMLRNAGLMSERKLNALIRTEISEGMLKSIIGRQFTENSWEAKLFTVAIAAKYPGTVVIPVKAGVIGAVRSRIGIPKSLKANQFYHAHDALLAAEVGRYMELAKPAFVHNRVKYEQYMRKIKLVDEENKKAPKSQLDFFAGGFFFDRVDKDTGEVYWDKDEEVERIYRACGWKNLRVTYAAFEDGGAFWKQTIYSPREKSKLIATKSDRPAEIYGGYSSQTFANFFVYEVMKKKVKQLRFGAVPAAIASKSDPDTYNAMLEMYARGFAKTAKEKFVRIVRARVLKNTMIELYGERFRIAGEKQVYPVRQMPLAIDEVYLLKGVETIAAAGNAGASAKIDFEKAAESLVGFWDLLLEKLPVNYPKLTVQLKLGSLKHPKDILAATSESEFPAIVYKIAEAEIQVMEQASGLRNISDTKILGGNTFGGSLVFTFNKVLNDPKSKACFIDTTPAGLHEVKTKIW

SEQ ID NO: 17077 - protein, 1375 aa, unidentified
  REGION 1..1375: note = Cas Enzyme sequence
MRKIIGLDLGVSSCGFAYVREAEIINEKSEIMHLGVRVYPLTVDEQNNFEKGKSITTNAKRQEKHSIRINLQRYKLRREHLVDCLKKAGFIDDDTILHESGNRTTFETYRLRAKAVTDEISLSELARVLLMINKKRGYKSNRKMNNSEEGSLVDGMEVAKYLCENDVTPGQYAYDLLSNGNRNLPDFYQSDYKDEFEKIWNFQKAFYPEILTDDFKKAISGKNKINTSKMFFARYDVQIAQIKEKDKRLQALGWRCDALTEKLDIEQLAYVVCDLNGLINNSSNYLGKISDRSKELYFQNLTVGQYQMKMLDENPNASLKNMVFYRQDYLDEFERIWETQAKYHPELTRELKKEICNMIIFYQRPLKSMKGLVGICELERKQVEVEIDGNKKIITVGSKVCPKSSPLFQEFRIWQRLNDIKVKNLSTRQEYFLNQDQKELLAKELEYKSRMTKQQMLKCLSLKPKEYDMNFKEVNGNETQAMLFDAYRKIIECSGNRIIDCSRNGEYDFSKMSADEIHALVKTVFDGLGYNTGMLDFDAQTADISQDSMYKLWHLLYSYESDKSAIGNETLVRKIQKLFGFESDEYAKIIAGITFKSEYGNLSAKAIKNILPFMKEGNNYSTSCAYAGYNHSVRSLTKEELAGKQLKTHLEILPKNSLRNPVVEKGLNQMINVVNYLIDEYGQPDEIRVELARELKKSAKEREEMSDAISKSNDENNEYRKILEDEFGIMHVSKNDILRYKLYLELKENGFHTLYSNTYISREKLFSRDFDIEHIIPQARAFDDSFSNKTLECRSINLEKSDSTAFDYVTGKYGQDGAEAYKKRVNDLYEAKQISKTKMTKLLMTADDIPADFINRDLCDTQYIAKKAKEILESVAPVVVTTTGSVTERLREDWQLVDVMKELNWDKYDKLGLTETYDDKDGNQVCKIKDWTKRNDHRHHAMDALVIAFTKQSFVQYLNNMNARSDCSGVIYGIEKKEMYRDKHNKLRFKPPFPLDEFRSEAKRHLQDILVSVKSKNKVVTRGINKTKCAQGFNTRVQLTPRGQLHNETVYGKRQMYVSYEEKVGSSFTADKIATVANKKQREALLERLHAYGDDAKKAFGGKNSLDKNPVWLNEEHTEHVPVKVKCVGTETVYTVRVAVDKDLKVDNVMDPQVKKILQQRLNEYGGNAKKAFSNLDENPIWLNQEKGIKIKRVAVKAKVSNPESIHMTKDKDGNDVPVDYVLTSNNHHAAFYVDKDGKIHDEVITFKEAVNRAVNGKPVVDKDYNKDIGWKFLFSMMKNEYFVFPNADGFNPKEIDLTDEKNYHLISPNLYRVQLISKNEYPKGIMRSYMFRHHLETTVNVDLKDVTYKNMRTLSFIKDIVKVRINHIGNVLYC

SEQ ID NO: 17078 - protein, 1293 aa, unidentified
  REGION 1..1293: note = Cas Enzyme sequence
  REGION 148..151: note = misc_feature - Xaa can be any naturally occurring amino acid
SVLFEEAQTAKERRQKRSARRRLARRHKRIKLLQALVAPDVCAADPAFFLRMNESFLWAEDSKYEKLYAKLPKALFVDGTVSVETLPTIYHIRNELVKSTKQADIRYVYLAMHHIIKYRGHFLMEGQTLSDIGAEAPQKMQELLELLXXXXEQIQKLLYAGKKKESKEAAQSLASLLLGYKGSLKALIDYESQTDAPEKTSLGAIEGETEETYLAGMTEAQAEVFALMLELYRWQLFAEIRQNGQTISDTMVARYEKHGRDLEKLKAWVKAYQPDKFYALFRDDENAKGYAAYTDHLRKPKKFKKEKLQRCTQDEFYKVLKAMLTGNKDAEAAAAAQPMLEAIDEPNGFLPLQRINLNGQIPNQIQAEELVKILDAQGKYYPTLRENREKILSICTFRLPYYVGPLYQDKNSPFQKWIVRDMTQPAYPWNFFDVVNQTATAEGFIANLTNKCTYLPIEDVLPLHSLLYEEYLMLNELNRVRVKGNLIRDVQLKQRMLDELFAKNKSVSYKTFAKWLQLNSPYVDVTENDISGTQELGKFTASLRTRYDLEKHGFTVNDQTTEQLETLVRWSTIFEDRSILKKLIQEKYPDVTDTQLSFLVQRRYTGWGRLSEKLLTGVLGEYENQPATIMEVLRATNENFMQVLNNPQYHFQEKIAKERLMELGEPKEEIEYDEIRKLQVSPALKRGIWTAVRIVKELIEHQGCHPHAIYLENTREETPDEKKQRTQSRLNQVEQMYKELAEDKAAEKVPSECWEVLKNCRDKKKLDDQQYLYLLQLGKSLYSGKPLDFDQLSATTQIDHILPQCYIVDNSIENRALVLSGENQRKADNLLLADSIRDSQRPWWNYLRQKGLMGEKKFKNLTRSMVSADDKQKFAARQLVETGQMVQCVTELFKRYYPDVHVRGIKAGLSSELREQYGLYKIRELNDMHHAYDAFLAATMGNFVERFMPWLDNESSAAIRFRKAQGAKKADDKVDLSSKHGMILARFSRDQVDADTREIIRNAQQEICYLKAVWGYHDGHVVFLKRQKSGKITEDSRYRAGNKSAKMPLKKGLPCQRYGGFDSINPAFMTAIQYTQGKKVYHRVVGIPIYANVPVEKADELIRAFAADKIPGVTVVRPRLLMNQMLEWDGGIFVLRGGQTIDILTSKKNAARVTITNGKQLFVSGKDMTTIALLFRGKKDDLNPEQLKETVLHLLEKFKTQYAVFYQKCKADDINRILKNLETPEQLTDADWTAMVSELLNAMGKQRKVSKEWITCEDWRIRGIPTKDVDLIDQSITGLREKRTKLWPDSEPS

SEQ ID NO: 17079 - protein, 1105 aa, unidentified
  REGION 1..1105: note = Cas Enzyme sequence
MVATLISTDLQFAFDVGHSSIGWAVLQVTSRDAAPALLGTGVVTFGADDCLASKRRAYRRQRRHVRSTRQRVARLEKLLAYFGVISAADLAAKHRQSGGHSAPWMLAARVLASGGAKEHLLTWVQLWDVIRWYAHNRGYDGNRRWSSEEAAAVDDAEAKADSEKEQNAIALMQEHNTQTMAETFVRVLGLDVAGDKKSSRVRFKAKSAAFPRDCVEREFRRILEAHRGHLPALDETFIGLLTARTLSKTEREHLATIGIPLPARFEGGLLFGQLVPRFDNRIISTCPLSGEKVPTRNCPEFLRFRWAMQLANVRVGESGASDLRPLSPDERRVLNDRMRVEGRLTKKTFKDAVRTLPGIARDNLDSLLIHPDAEDALLLDPVIQLAQSDRLKPFWLALSPRVQKRARDAWERGKALTLADLRLIAEKLGESTTALDEAITARLDAANTRKRKKDVGLSRESILAEKLSIKKLSGRAAYSRPLLVRAYEEVLQGKHPKEAGGCLFLDDAKRLEQVNRRIEDQTNNHLVRHRLMILQRLLRDLIADPQFAAGDRTRVGRLTIEVNRDLREMSGKTAKQIEQDLGLRLSNHDKVSKKLEAAFAEQTFNGGKVEITAGLIRKGRIAEDLGWVCPYTGMDYEPIDLVSHRVDKDHIIPRSQRPSDSLDSLVVTFSEINKWKGNRTGWQFVQEEQGKPVPGMSNLYIRPLTKYAEWVEGLESFKGHDDDKRRKKNRRALLLLPKYEDKAKGFLPGDLTQTSQLVRLGAQLLTKHFVDLPSPPPVISIPGAVTGTVRRSWDLLGCLSLAAPQILEADGSRKTKTDIRDITHLHHALDACVLAYTSLLLPRDGGLWELMIKRNPNEADKAQLKATGYFDFDAQGRFGLRDLPSDWKNQIRLRLAEKRVVQHVPADKGGLRVEENTRGVEKIKDGRVFLHQRSRDVKTGQIKIKPSDETVDKVVGLSPKNGQGKLKQLKGVRVITDNFGVALLDHAPEGEEKFAIIPWHKVWHRLGELEKRNGGKPPRVLRNGMLIRVPRGGYTGTWLVFSAKNNASGMALDMGWPDVVRLKNKTPGHKINVILKTLVRDGLEILRPSLTGLPITSSITPASAT

SEQ ID NO: 17080 - protein, 1075 aa, unidentified
  REGION 1..1075: note = Cas Enzyme sequence
SSASRNSGPLSFAFDVGHSSIGWSVLTAPASGMPDILGCGVVLFEKDSALAIQRRQHRQQRRHIRATRQRIARMERLLSSLGVFTAEELKSKHIANGGSPTPWLLAARVLASHGQQTLNWSELWDVLRWYAHNRGYEPIGADEDEEENKEKRAHAREGMERFGKQTMAETICAWLGQDPLAPRSGTTESYKAKDAAFDRHVVREEVRRLLTSHIGKLPCIDEDFIRALLDDAQAKPCAGIRLPRRYTGGLLFGRLATRYHNRIIGRCPISGAKLPVKDCPEYYRFRWALLLANITVATAADSPLRELTATERAELTKIAERDGYFTPAEFRKTVRTLTGAVRDNLDQMFMDATAAENLVLDPALKLATTNSWIGPLWLHLPENTRRHALNHWRRGRTQTLADLRSKAASSGADLTGFDSALAQLCTAPARKSRKKEPVPPPTADEILSTRFAAPLIGGRAPYARPLLIQAYQQSMQGRHPRAEDGCLFETPEQRRSRDQRTIDQQTNNHLVRHRLQILGRLVAQLIADPAYANGDAARVERITLEVNRDLREMAGLTAQDIAKEMNERLRSHAQVSKRLLAELPPGTRINASLIRKARIADDLNWQCPYTGHDFEPVDLVTRRVDLDHIIPRSLRPSDSLDSLVVTFSEINKWKGNRTAWQFVADEETKAVPGLPHLHIKQLRRYEEDVRAFDKRGHIDDQRRKKRRIEKLLLARYEEKGGGFTPGQLTQTSQLARLGQQVLRAPFTHLAQPPVFVALPGPVTARVRAAWDALGCLAEAAPGVLEKTKDADGREHFVVKTKTEIRNITHLHHALDACVLGLASALIPNRGDVWRLLLERKLKPDQRADLEALNLGDFDANGGFRLRDLPHSLKQQIRTRLAERRVVQHVPADMSGLRVEENTRGVLKRENGRVFLRQRKKNTNGEFVVNRTDELESKVVGLNPEGKLAKIKGVRVVTDNFGVAILDDEKLPPAERFVVIPFARVWEQLETLKARNGGRSPQVWRNGQVIKLPKGPRAGHWRIFSIKNTSNMGLVLDLGTVEAIRPTWINVLLKTLLRNGASRAITTLAGSEARNA

SEQ ID NO: 17081 - protein, 1134 aa, unidentified
  REGION 1..1134: note = Cas Enzyme sequence
MANRSTVCASDFVLIPKTKKQGKNMLATQKSKDLHLAFDVGHSSIGWSVLQASSRAVTPNLLGTGVVTFEADACLASKRRAYRRQRRHVRSTRQRVARIEKLLAHMGVIAAADLLAKHRQAGGHSAPWMLAARILNHKNSPGNHLLTWIQLWDVIRWYAHNRGYDGNSRWANADATELDSEEAKGDTEKAQNAIALMQEHGTKTMAETFVRVLGLDIDGDKKSSRVRFKAKSAAFPRSVIENEFNAILSAHRGHLPKVDDAFISLLTARSLTAKQRALLAAADIKLPARFEGGLLFGQLVPRFDNRIISTCPISGEKVPTRNCSEFLSFRWAMQLANLRVGDAQTTAMRPLNTQERRTLDGMMRLEGRLTKNEFKQAVRSLPGITRDNLDTLLMHPDAEDALLLDPVTQLIRGDRLASFWPTLSPRVQKRARDAWQRGKALSLADLRTISEKLHEPVTAFDAAILTRLDVANTRKRKKDAGLTHESLLAEKHSVKKLIGRATYARPLLARAYAEVMAGMHPKEVGGCLYLDEAKRHQQLQRRIEDQTNNHLVRHRLLILERLLRDLIADPQFAAGEKSRICSLTIEVNRDLREMSGKTAKQIEQDLGLRLSNHGKVTEDLEAAFAEQSFNGQKIEITAGLIRKARVAHDLDWVCPYTGKEYEPIHLVSRQVDKDHIIPRSQRPSDSLDSLIITFAEINRWKGNRTAWQFIQDEQGKPVPGLPQLSIRTLAQYETWVKGLETFKGHPDDKRRKKNRRALLLLPRYEDKSKTFLPGDLTQTSQLVRLGAQLLTKTFIDQKEPPTVVSIPGAVTATVRRSWDLLGCLSLAAPQILDDAGACKTKTDIRDITHLHHALDACVLAYTSLLLPRDGGLWQLMIKRNPNEAERAALVATGCFDFDQEGRFGLRDLPPDWKNQLRARLAEKRVVQHVPADMGGLRVEENTRGIEKIEDGRAYLHQRSRDAKTGQIKIESSHKPIDKVVGLSPANGIGKLRPLKGVRVITDNFGIALLDHAAEGEEKTAIIPWHKVWHRLGILTERNSGYPPKILRKGMLIRVPNKNGRSDYRGIWMVRGVQSNQKQGLLIDMSYPSVVEYRQAGRSDCKQNVKFETLIGDGLQILKSSLTGVTFTAQTSNTE

SEQ ID NO: 17082 - protein, 1080 aa, unidentified
  REGION 1..1080: note = Cas Enzyme sequence
MIASKNPVHFELSFDIGHSSIGWAVLGLKPNQPLPAILGCGVVTFEKDGALANQRRLHRSQRRHIRATRLRIARIEKLLTHLGVLTAEQLASKHLASGGHSAPWLLAARVLASKGERILTWTELWDVLRWYAHNRGYEEIGTDVTEEEAEDDDKKDAEKVANAKTAMADFGKTSMAETICAWLELDPLGDQIASRENYKTKNCAFEREVVINEVRQILLAHRGKLPKLDDGFIHTLLDDARSTIVPAIKFPQRYRGSLLFGRLETRYHNRIIGRCPISGKKIPNKNSPEFLRFRWAMQLSNIRIGSETTGELRPLSAEERKILHTAITASGYFGVKALKDSVRSLPGATRDNLETLLLHPDAKESFIYDPARKLVKSDSRLSTVWEHLPEQIQKRTIGRWRAGKQTSLATLRAESLTLGHDMSAFDAAVEDLVTLSSKKGHGKSAPATHDEILSAPLDMRRDLSRLSGRAPYARPVLIKAFEEVMAGIDPKGKGGCLEETDGIRKRREARPLTEQTNNHLVRHRLLILSRLLKDILADKNYVAGQVAHVERVTIEVNRDLREMSGLTAQDIAKELGARLSNHKKVSARLEKELPPGTAINASLIRKARIADDLGWRCPYTGIDFEPIDLIEKRVDKDHIIPRSQRPTDSLDSLVLTFAAINKWKGKRTAWQFIEDCGGKTVPDAPNQSIMPMNRYKEFVAKLDTKGHDDDYKRKKRRKEYLLVEHYEEKAAGFTPGHLTQTSQLARLAAQVVREPFSNLEEKPKIVALPGSVTGSVRRSWDLLGCLAAAAPDVMDSNNTVKTKTEIREITHLHHALDACVIGLASMLFPNNGDTWRLLSERRLGAEEQKHLAENLPSKLLDFDTNGGFRLRDLAEEFKQQIRVRLTERRVVQHIPSDMNGLRVEENTRGILKRDNGRVFLRQRKRDADGNMVINESDEPETKVIGLLPLGQTNGKLAKLNGVRVIADNFGVAILDDTTLRPEHRSIIIPFANVWQRMTQLRELNGGRHPLVLRNGEIIDIPEGKRIGRWRIFSIKNNASGMALDLGSVEAIRPTWINCLLKSLLRDKARRLNITLTGADK

SEQ ID NO: 17083 - protein, 1277 aa, unidentified
  REGION 1..1277: note = Cas Enzyme sequence
MSKTILGLDLGTNSIGWAVVNDNGRGEFDLIKRGVHIFEEGVKIEKGNESSKAAERTGYRAARRLKFRRKLRKIETLKALSDAGFCPPVSKEELKNWQSKKIYPLNPDFRDWFRTSDPKENAESQEYKNPYYFRWLAATENLDLNNREDRYRLGRAFYHMAQRRGFKSNRLDTTKESDGVVSKDICELSEKLNGRTLGQYFFEECYGKRKIRKVHTSREEHYATEFKFICQKQGLADELIKNLYRAIFYQRPLKSQKALVANCPFEPKKKRIPISHPVFEEFRMHQTLNNIKIKTLDDADLRPLTSEEKEKTTPLFFRVSKAHFDFEDIAKKLTPRGQKFACGRDAYAEAHVRFNYREDQTISGCPFSAELKKLFGDDYKAVMFSSYAGNKTAKTADDILYEVWHVLFSFDDENRLRAYAQTRLGLDAEQVEKFVSIHLKQGYGELSFKAINKILPFLKQGLIYSHAVFFANLTAVVGEKAAGEESLKDGIATLIDSHKEHIAIQRCINDFVGEYRLNPLAFENRYNLMDIQSFRNALPVDLQHMAEHICKEIRRQIRNNNDKGEFAKLLRLEERVAEYLKENFGVDEFALKKLYHPSKEETYKPAERAEDGHLYLNSPNISSIRNPVFMRAMHRLKAVVNELVKQGMVNEQTVVHIEMAKELNDANKRIALRRWQKSREDDRKKYKAAIEEVLVGQGITREASDDEILKYQLWEEQKHICPYTGTTIEPSAFIGADPEYDIEHTIPRSLSCDDSQENMTLCDRAYNRETKKNRIPTQCPNYGEIVSCIAHWEDRVVGLEREIEKKLRASRAAQTKDLKDKAIQERLVLQFERNYFREKCRRFTMEEVTSGFKNSQLVDTRIITKYAGLYLKTVFNRVCTVNGKTTNALRKCWGVEKSRDTHAHHAVDAIIAACLTRDQYDELARFYHEYESYESGDRPQKPHFPKPWQQFTEDMKELKEQILVSHYAPNNLLKQTKRNVRLKGRAVVQQGQTARGSLHKDTFYGRIKDSQGEVKTVVRVPLAYSSTGGLFGFKNTDDLKRIVDRNVREKIRSAVAWRLESGNKKISEAFKDPVWMNEEKGIQIKKVRCFADSVKNPIALKKQTNLSRQEHKQDYYVQNDSVFVVAVYEGKNKRGRSVFDMRGLSALEAVSGGTEIPDSVNKNGTPCLLKYKFHAEKSVLFYVNDPKELSAMPIKELSKRLYKVNDLGRTETRTVFRHHMEARAKTDILAKHSLASSLDFSKPAPLARIAHSNTNVLIEGVDFKFNVLGEIGFLERN

SEQ ID NO: 17084 - protein, 1082 aa, unidentified
  REGION 1..1082: note = Cas Enzyme sequence
MAILNSVTPTDWSSHEFYRRSLVLGIDVGLSYIGIYLRLGDQPLVGETVVYSSRDSLVQRRQLRHLRRNRRSLRQRIFRLRQWCDQFGLPWAAKADWQPAMERAFLLRHRGESEPGSLSPTELVVCLRHILGLRGYDWHRSGESEGTYPWGEKEPLSRECLEWLEREHITPASAQTVRALLPPDLAEEDAARMESLLAAAIERSERDGMMPHLRAHAAAPLTHRGRNRNFPREVLEEHAANLIRNHAAHFGATGTDTPLQSYLEILNYHRKDAKAQERHWESKAGKCPFTGEVRAPASDPDARRFRLLEFLSTRRVAITARRAAVGAPGLRLPPAAMVSWLLGYPNGSAEPLPASRELRAEFERRVCAEGEKLAPDAKSLNGDYFSQLRDLLYPRGAGKADRAALSAKAARSLFAHATRDGQVFEPAEIVRALRERPNPLEPSFYERRREAQLAEWFHPHVEFLLGPRAYLLDGKRAPTGQIHGWLNRLLARPAVRERLAAAGHPPLPDYVVIEVAGDVPRTSEGRKRIEQDQKERRQRRDDRLERYGLTSASEAQLLRLELWEQQGGTERVPARCPMTGTELSGGPLANGLEVAHIYPATWGGPYLRDNLFLTTREVNGAMLNQPPAQCRGFSPTHLAGMRWPERKRSLFVTAWQRPPLGELPDWGFDTRVAQLARQLRDAMRVWLGIRDENEVARRVGTVSGYFTAQCRKAWLEDYRKDRSDLRNHLYDAMVLAHIPPGSGLNTVALGGIFETVLLKQQGGGLAPAYRPLRALGPDWRAFDAAHRESCLVQYPRSSAPKKARFDTTVYGVEASPRTLPDGTSERAPRLRVREVITSGGWPVKDAEKWFAECAARSPEFAAAFPEAKWRAWIEENTRRKAEGREPLPLANPGGGTVRAVSVDASKPSFFAPDAVALHEPAGVKNPKEKNLAVELFETTRASGLKQIKSRIISHPRFALLRRTWERKGIATSPDDPLPPGVKPLARLKKGDLLRVPLLRDGKVAESDGESYVKLWVQVSAINSTGTVEAKPCEYLLEQMELDAGGGVNREGARLFGARIQKVYPFRNASLLHVIRCTPAAPA

SEQ ID NO: 17085 - protein, 1053 aa, unidentified
  REGION 1..1053: note = Cas Enzyme sequence
MGKVLGLDVGTNSLGWALVDTDKKEIIDIGVRVFQEGVNGLNTGKEESKNAERRTYRLTRRQYTRRKQRKSKLKSLLYSIGLFPKNEKELKEFWKLNPYTLRVKALDTELTSLELGRVLYHLNQRRGYQSNRKAQNEEEDKGTIYDGSKDSDKPGINVIKNALMSGQFRTLGEYLNSLDTTEQRIRNRFTSRNQYFDEFQQIWAKQKAYNPEILTEQNHYSIAKGCMFFQRPLKSQKKTLGHCTFEPKKYRAPKSQPISQEFRMYQLLNNLRIETKERVTDEQQELTGVEYDALLSYLKIHPSLELGRGKLKPELKKVFGLKKDDEYAFNYDKLLGLDTVSKIIKVVGDEYAVEKGDDFIHHIWHTLYFNEDPEKVKDYAIRKWDINEEQADKLKKIKLEAGYLNISTKAINNILPFLKEGYRYDESCSQAGYHHSQQHITTELLEFIPPVSDSDIRNPIVAVSLSQMRKVVNSIIREYGYIPEIHVELARDLKKPKQQRLDILKSNNDRAKQRSSIKSELEDYIDRPTKNDIRRYELWKEQHELCPYSGVKISLTRLTSGDSDIDVDHILPFSRTLDNSASNQVVCIREENAEKGNRTPWEAFSHNENKYYQICERVKSLPQNKRKRFLMTGEAFQKYLESDEGGDFIQRQLTDTAYIAKETMAVLKKVCPNVVATKGMATADLRHLWELNHVLGIKEKVNRDTGEVKVKKNRDDHRHHAVDALVIALTSRWSLQQLSNWNAGSSYSHRRDAARFTLTKPWDTLVEDTKNKISEIIVSHKTRKKIRGGLHEGTIYGRLRDSFTGELAFNESGAPLFKVRKPLFSLADSGQIQKIIDPVIRKLVLQRMIDHGADAKAISAGKKVSVPKNAFSEPLHMPKNNGSIGPKIRSVRIMVPGNKTFPVAENGERSHAFVEPGNNHHIVIFEREIRGKVERWSQVVSLFEVVKRRNRGEAPIMSSKEGWDFLYSLQANELFIPGITFLDEYNPTIHSVYRVQKLTDAQIALRKHSVAILDIKMADGSYYSPGRLLISPKQLKGLKVVISPIGKLEECHD

SEQ ID NO: 17086 - protein, 1416 aa, unidentified
  REGION 1..1416: note = Cas Enzyme sequence
MSKILGLDLGTNSIGWALRETSEPQNQITDKGVVTFEKGVAEGKSGEFPMVQKRTESRGKRRNYQAEKYRKWALLETLIQNGMCPLTIEELDAWRKYKKGVGRKYPQTDKFIQWLRFDFDGDEKPDFERFGLSKHESLYVFRMLAAQKEETAKAIFSKQPHLLGRVFYQLVQRRGFRGRDEEESQMIMKGGGDSGAKGVNEITSYLKQYGTLGAALYHLQKETGERIRKRYNLRSDYEQELKTLCDIHELSEDLYHKLWKAIIWQRPLRSQKGLIGFCTLESPKKNDEDKYIKSGKKRCPVSHPFYEEYRTWVFINNLLIEPPTGINKERYLQEKVYPLFYNAARDFKLKKIADQLKKDGAAMQARFPDDTKVISCTLLNDFKKLYGGDWKQALGWNDALDNEAKKQPYNIEDVWHVLATFDSKEKLKEFAKLKLELTEESSEHFSKLKLAQGYATLSLAAIKKLLPYLQKGFKYSHAVYLANIHKVLGATRLDEEMANHLAHTFDAIEKEGKQQRTIDEIINSLIADHQNAEQRWGMDESYALDADDHKDVEEKIISVIGDKTWQERISATEQQIIRESVIAGYQYYLQQRINTPFNKIFPKRERLHDKIFQHLKDSYSLTDDAIKHLWHPSEQESYAPAPEKDGIKSLGDPQPISRGFKNPMALKTLHQLKKLLNYLLKSGKIDEDTRVVVEIARELNDANRRKAIERWQREREKQNEEFKGIIDDINKECGAAYNREDKTLLDKVRLWKEQNMRCLYTGKTINLCDLFNGIKYDFEHTIPASMSFDNELKNLTLADTKYNREVKKKRLPSECPNYNEESMIGGIMYTSIMSNIETIFGRLNTEKKTIRGKKIISQKFEKIEQLEKLLDEWQKKTSDDKGVKDAIIQRRHLLRMELEYWRKKVDSFIIKEYKAGWRNSQLRDTQVITKYALPYLKTVFRKVDVQKGAVTAAFREIYKVQPRTEKKDRSKHSHHAIDAAVLTLIPPPLVRDKILLRYNQEKDNNPHNTYHESVREWREFAVQHIHSIEDEVMINFQPQRRTLTQTYKNVRKRGIQQYLKQKNADGKWQYKLDDGGHKIPLKAAGNTIRGQLHNDSFFGAMKQPVYEEVKGKFIPQTDGRGNFIFQKNEKRGDELFFAVKPMAALTYITKPEDLDLVIDPNLRAYLKNETTARMQKGFSFSQAMAEPIWAFGKKQDKHGNSLNPIRNLRCRIKGGGGGLVNFPASIRDFDAYQSKKQYKRQFYALNGETAVCALYQGIIDGEVERIIQPYSILDIAKAKIGDSFEEIISPNFEKKIKKETYLIPLYAVLQTGQRVLFYENEIEELKSLDDTILAKRFYLIVKFEDGRISFKNHLNAMPEDELKREMKRLNLADVGASSFNFSQSIPKLRLSKTAFNFAIEGKHFSVNPDGQIKWLF

SEQ ID NO: 17087 - protein, 1416 aa, unidentified
  REGION 1..1416: note = Cas Enzyme sequence
MEKVLGIDLGTNSIGWALREINNGLDNQIIDKGVMTFDKGVAEDKSGEHPMVQKRTESRGKRRNYQAEKYRKWELLQCLIANRMCPLTIEELNEWRYYRKGIGRKYPQSEKFIQWLRFDFDGDGKPDFERLGYSKHESHYLFRVLIVDESKIQIFRNEPHIIGRVLYQLVQRRGYNDGQNIDETEKDELSKTIMKGGGDSGAAGVDNILPFTDKHKTLGSALYHLQKEQNVRIRKRYNLRSHYESEIKELCRVQGIDHLFKNFWSAIIWQRPLRGQKGLVGICTFEKNKRRCAISHPLYEEYRTWVFINNLKIKPIEDALSKTEGEKQQDLKTVLIERVYPQFFKASSDFKLSSIAKELKKVGYEITARFPEDTKVVSFSFLYRMKEIFGDDWVSITGWNDLLNGKSKIQQYSIEDLWHLHFAKTDNKETGETDFEFLKRFALEKLHLDETKAEVFAKIRLQQGYATLSISAIKKILPYLRQGFIYSEAIYLANLHKVLEVDKVTKEMIAHFSDEVRKITKQSSIERKLTQAANELINDQLNSETRFGMDPSYQLDGNDRKDIDQKLTEVFGKYSWQNLGEEGQENATKYVSEKYLAFLRKRMHDKGTFEKNGRLHDRIFNWIKNTYGVPDENIKYLWHPSEQETYMPAIKKDGKEFLGSPEPISKGFKNPMALKTLHKLKKLINYLIAVGKIDNETRVVIEIARELNDANKRKAIERWQRQREKENDTFKKRIDEINAECKADFNREDKNLIDKIRLWEEQNKMCIYTGKTINLSEVLNGARYDIEHSIPASMSFDNELKNLTIADKKYNQQIKEKGLPSECPNYDKEYTHEGVTYPPILKTLQNVFGRMTTIEKRIKGRTVMKQSFKKIEELEEQVYFWVNESKKASTKERKDYCVQQKHLYKFQLDYLRYKLNTFTTIEYKAGWRNSQLRDTQTITKYALPYLKTVFNKVEVQKGNITADFRKILKIQNRLEKKERAKHSHHAIDAAVLTLIPPAAVRDKILSRYNEAQESQQNYHEKPRHWNNFHVQHILSIEDDVLINYQAQHRTLTPTFKTVRKRGKIQYVKEKLANGKWQYNLDNEGKKIPLIGKGDSIRGQLHEESFMGLIKQPEYELKNKKYVPKTDGKGNFLFQKKGNTDELFVVKKIPLIEFDGLKKFEKIIDLNLKAYLTNLISERMNGGSSFQDAIAQPIWAFGKSVDKNGNTIEPLRHVRCRVAKAAGFLSQEKTLDVRKNDFVSKHPHKSDVLAGNDEMVICLFYEKNGVRNFRLISRFELGLLKIKKVIELFDIPGYNRSQKGVKKVEVPLAHIIQTGLKIFLLDKKVSTIQGLQQLDKAELLKRLFIVNNFNVPAGKTIYIYLINHLDARPKEVLQKNEEKDIDTSKYQAKLALTSDKFTCAFEGKHFEVMPDGEVKWI

SEQ ID NO: 17088 - protein, 945 aa, unidentified
  REGION 1..945: note = Cas Enzyme sequence
DNGFSFKPNDKAFNKLYHHSQQVTEKVKHYKIPEVENLRNPIVQHAVNELRRLVNELIDKYGSFDHIHVEMGRDVKAGKAKRQEMTFQINENRKKNDEAREKLTEFGLSHTRDNVQKYLLFKEIQDKAGNVVCPYTNKTVSPSSLLGLENAFQIEHIIPRSISLDDSFANKTLCDAKFNQLKGEKTPYQFYKENSDPNLWGGAKSWEEVAYRAFRVLPYGKAKRFTAKKDFESTDFIQRQLNDTRYISKQAKDILSKICDDVRVMPGSVTSELRHLWGLNNVLQPVKEVKLDVKTNEKEAVPHYAVLDEYKKVKYALPVYNELPQVVEDDLTLAGYITKEKEFKSKYLEFSTAVEELDPGSYWAKLKVGNNPRLIKRYAGRPETDEEHIALLGQVNKEKFSHNSLAKNLPAVGLDGRKKYYANFKVLNKALEPAEDRNRPKAKKDELLLYGQVNGGQFKSYIYQCQTNLPDDAYWLKLKLDFEDVEFIPSETPKPEFDKDKQILISASVDSDGQLSTHVDQRFTLETSNDPGIYWCIFDIKKSPYDFTKIKNDPPKPATDEKVVEGNVWVDKSTGEIKFDPKKNREDQRHHAVDAIAVALAKQSYLQQLSTFYANKDEKSRGNEAEKPTFDEPWEGFRKDVEESVGKILVSYTKTNGDLKKVTKAIVKDGYKRKSEGYAVRGQLHKDYVFGKRKPIGKEEAYHIRKSLNAITKSTHVNKIVDDKIRQLIQEHLKELGIDITGKYDVPKEAFFKSGKPQIYLPNKNGEPVPIKKVRIRERLGNAENVKPSKDINKYVNPRNNHHVLIYEDEGGELREDVNTLWEVVERKLNGEPIYQLPPARDLMHIPKRIVETIEVNDYFVLGLSNREFENATNSIISEHLYKVQKVAGGDYFLEICFRMHRDGRKDKEAKSDYSYIKNFGTGKTGWHTHNPIKIKVDRLGNILK

SEQ ID NO: 17089 - protein, 1662 aa, unidentified
  REGION 1..1662: note = Cas Enzyme sequence
MTKKILGLDLGTNSIGWALVEQDFENKQGKILGMGSRIIPMGQDILGDFDKGNSVSQTAERTRLRSMRRLLERYLLRRERLHRVLNILGFLPEHYSSQIDFEKHLGQFINETEPKLAYKPAWNELKKKNEFEFIFKSAFNEMLDDFRKTQPELLNRKNRKGEDIKVPYDWTIYYLRKKALKDKLTKEELAWVILHFNQKRGYYQLRGEEGETTNSIREYVEVLKIVSIEKGEKDKKNDKKIWYKMTLSNGWTYSAPFVTAPNWLNTEKEWLITEELDEAGNIKITKDKKSDKEGKEKRKITPLPTFEEIDLLKKEDQDKLYGKIKAKTQITIQNTGKTVGEYIYDTILQKPNQKIRGKLVRTIDRSFYKEELTAILQKQIELQPELFTNGLFNGCVRELYRNNEVHQLTLSKRDFVHLFVEDILFYQRPLKSQKSSIANCSLEFRKYKAKDKDGKEIEVKEYLKAIPKSHPLYQEFRVWQWMNNLKIYRKEDDADMTSSFLNEIADWEDLFAFLMSKKEVNHEDILKHILEPKKLKPKELKAEIAKYRWNYVFNTEKDESKKYPCNETGYEIKRRLEKVTGVPGDFLTKEIEQQIWHIIYSVSDPKEFEKALKSFADKHQLNRAPFVENFKKFPPFKSEYGSFSEKAIKKLLPLMRIGKYWKWEIIDTKTQSRIKNLQTAEFDESIKDRVREKVKKGKLDKNEDFQGLPLWLAQYIVYDRHSEAALSGKWNTVSDLEKYLKDFKQHSLRNPIVEQIVTETLRVVKEIWKQYGNGIENYFNEIHIELGREMKNSADDRKAITDQVSNNENTNLRIKALLAEFKNDSSIENVRPYSPSQQEILKIYEEGILSSVKNKEYSESEKQQKEEDEAMLKIGSTAQPSKTELTRYKLWLEQKYCSPYTGNIIPLNKLFTEAYQIEHIIPQSRYFDDSMSNKVICESAVNTLKDNQLGFEFIKNHHGEKVETGFGGTVEILSEERYKKFVEEHYGKNRSKRNKLLLTEIPDKMIDRQMNDTRYISKFISNLLSNIVREDKEDDGVNSKNLIPCNGKITATLRQDWGLDDVWNDLILPRFERMNQLTKTNDFTAWNERHQKYLPTVPLELSKGFSKKRIDHRHHALDALVIACATREHVQYLNNENAKSQKFHLQRGLAKKLKRMEVVEISKMKKNEAGAWVRGGEKITKEVPKDFLKPWATITQETRDALERIVVSFKQNLRVINKTKFGGLTYKESKQKSKDRNWAIRKPMHKDTVSGKVYLLSEVKEMTLKNALKKVDELKDVQIIVDKQQREAVYKYFSKNKIDIENALKDENLKDLKKVNVFEPQSATRKPLGTSFTKKIIEESITDTGIQKILLNHLYSKGNNPESAFSPEGIEDMNNNINPLNGNKFHQPIFKVRIYETIGNKFSVGQTRNKKSKFVEAAKGTNLFFAIYENEKGVRSFATIPLNEVIERQKQGLSPVPETNEKGEKLLFHLSPNDLVYVPTEEENESINSIDFNNLSKEQLKRMYKFTDGSGSMANFIPANIADVLFNLNKEKQKKNGINYPIQNEIGVGSQGSKNERAFSGEQIKSFCIKLQVDRLGNISPAKKEVISQTNQLDSTVSEPEVAYKKSNLKAFSSFEEADEENARAMAYLSPEEHLKNVRERIQKIYEDELKKPMDKKIKFRK

SEQ ID NO: 17090 - protein, 1560 aa, unidentified
  REGION 1..1560: note = Cas Enzyme sequence
MIKKILGLDLGTNSIGWALIQQNFEGNEGTILGMGSRIIPMSQDILGDFGKGNSVSQTAERTTYRSIRRLRERHLLRRERLHRVLKVLGFLPEHYATEIDFESRLGKFISETEPKIVYKKVWNEKKDKNEYKFIFQKSFSEMLADFKMNQPQLLKNEKGEDKLVPYDWTIYYLRKKALTKKIEKDELAWLLLNFNQKRGYYQLRGEEEELNPNKLVEFYSLKIADVQADEPQKGKADIWYSVILENGWIYRRSSKTALFDWKDKVRDFIVTTDLNDDGSVKRDKDGKEKRSFRAPAEEDWTLLKKKTEQEIDNSHKTVGEYIYDTLLANPKQKIKGKLVRTIERKFYKDELKKILEAQKHFQPELQSEDMYNECVRELYRNNESHQIILSKKDFTHLFLEDIIFYQRPLKSKKSSISNCTLEYRKYLVNGMEKTEYLKAIPKSNPIYQEFRLWQWIYNLNLYKKEDDTNVTNEFLNHVEDYENVFEFLNTKKEIKQEILIKYFLEKKGLKGKVLTNAVVKYRWNFVEDKVYPCNETKALITARLSRVDNVSNDFLTNQIEQQLWHIIYSITDKMDYEKALKTFAKKHKLNEESFVENFKKFPPFKSDYGSFSEKAIKKLLPLMRLGKYWDWNLINEKVKERIVKIVHGEYDEDIKDRIREKTIHLSEENNFQGLPLWLASYIVYGRHSEAASLSKWNTVEEIENYLEEFKQHSLRNPIVEQVVTETLRVIKDIWKYYGNGAKDFFNEIHVELGREMKNTAEERKNITNQVTENENTNIRIKALLTELLNDKNVENVIPYSPMQQEALKIYEDGVLGSDIEIPEDIEKISKTAQPSINELQRYKLWLEQKYRSPYTGEIIPLNRLFTSDYEIEHVIPQSRFFDDSFNNKIICESVVNKLKDNQLGLEFIKKHHSQIVETGKGKTVKIFDEEEYKEFVKQHYEKSRSKRNKLLLEDIPEKMIERQINDTRFISKYISSILSNIVREDKDDDGINSKNVIPANGKITSELKQDWGLNDVWNDLILPRFERMNRISNSATFTTYNQKYQKHLPTVPLELSKGFQKKRIDHRHHAMDALIIACATREHVNLLNNQYAKSPKRYDLQRKLRKFEKVSYNDRKRNEVIEREIPKEFIKPWKNFTVDAKNAMEKIVVSFKQNLRVINKTSNKYEKWIDENTEKQKEFVQQCKGDSWAIRKPMHKETVSGLIKLRKNKEVSLNTALDDHLNIVDKKLRQEIETLIKTGYDKKKLVKHFKGLKNEHRDVSKVEVFYWETDNVASRVSLDTSFNKNRIESITDTGIQKILLNHLKKYNGRKDEKEKEIAPELIAFTPEGIEEMNKNIVSLNNGKFHQPILKVRTYEPKGNKFNVGQTGNKKDKYVEAAKGTNLFFAIYENENGKRNYETIPLNEVIEHQKWRATLSKDEQKNIPMIPAKAEKGLLLFYLSPNDLIYIPDQEENPLTTVDLSKRENIYKVVSFTGNRLYAIPHNIAKSIVDKVEFTQLNKLEFSLLKIPIKDTCIKLSINKIGQVMLAKSTNEFEKKEDADLDTLPIIDIYNHNDNSAKAVN

SEQ ID NO: 17091 - protein, 1397 aa, unidentified
  REGION 1..1397: note = Cas Enzyme sequence
VISFQSKYTIFEINLLFMEKILGLDLGTHSIGWAIREVNVELENQIIDKGVLTFDKGVAEDKSGEHPMVQKRTESRSKRRNYQAEKYRKWELLKCLIENDMCPLSLDELNKWRYYQKGVGRKYPQSKIFLNWLRYDFDGDGKPDFERLGFSKHESHYLFRVLIIAEDKKNVFQKEPHIIGRVLYQMVQRRGYKDGTGVSEQEQEELSKTIMRGGGDSGASGVNEIIPYIEKYKTLGAALYYLQKEKNVRIRKRYNLRSHFEAELLEICRVQEIGHIYKQIWGSIIWQRPLRSQKGLVGLCTFEPNKRRCPISHPLYEEFQTWVFINNLKVKPIAQDVSKSESENQEQLVSVLKSEVYPLFYKSSPDFKLNSISKRLKAHGFEITAKFPDDTKVNSVSFLNKLKDVFGDEWVVRTGWADFFENKDKVVAYSFEDLWHLHFTKCDNKLTGESAATFLRRFALEKLKLDGKQAEAFANIRLQQGYATLSLSAIKKVLVYLHRGFIYSEAVYLANLERVLGVSSLSTDQITEFIEDFREVVKRHSFGKRIVKISNELISDQLNSKQRFGMDSSYQLDDDDRKDVLTKITSVIGIKTWGALSEDEKEVISNEVSDRYLNFLKKRINSRDVFGKVGRLHEVVFEWIKDKYGVPDQNIKHLWHPSEQEVYRPAKIENGRLVLGNPEPISKGFKNPMAMKTLYRLKRLINYLISVGKIDEDTRIVVEIARELNDANRRKAIQKWQKDRESENDGYKLEIDRINKHSGSNYNREDKNLLTKIRLWEEQMRMCMYTGKIIGLADVLSGLYFDVEHTIPASMSFDNELKNKTIADSYYNREIKKRRIPYECPNFDREFVSSGVVYSSILSNIQAMFGRVVEIEKKVKGKIVKHTTYEKILELEELFFEWKAKTSDDKKIRDNIMIRRHLIKMELDYWRSKLSSFVSKEYQAGWRNNQLRDTQTITKYALPYLKTVFNKVDVQKGAITADFRKIYGLQSKFEAKERAMYSHHAIDAAVLTLIPQASKRDQILLKYNRAIEDRLHYHENPLNWRGFKQHFIAGIEEDVLVNYLPSHRTLKRTLKKIRKRGVVQYMKIMSEGGGWKYKLDESGKKIPLFSQGDSIRGQLHEDSFFGAIKHKGELALVKRCHISSFTSIGDCKKIIDDTVRTIVREELERRVALGQSFDKAKFEPISFPNGKELIKKVRCRVAAGRGYLTPGKAIEVRRHQFLSTRDYQHHVYAQNDQNVFCLYYEKVIDEVTLRAFRILGLFDLAKLKLKADTDFFADQYFRVLEVGKGEKRVELPLVKILKVGTKVIFFDETIEELKEMSIRDISKRLFRVYKFNEMGTPNLYLQLHLEARKNELLGDGGTCFDPLKLNSRLKIKADKLKAAIEGRDFEVALDGQIVWLD

SEQ ID NO: 17092 - protein, 1417 aa, unidentified
  REGION 1..1417: note = Cas Enzyme sequence
MDKILGLDPGSNSLGTTVRDIREGDLQEQLIYYSVDTFESALESGGQSKAATRSSDKRKRRQYDTRRQRLWKTLDLLIKHHLCPLAQEELDAWRFYDKKRNYFRKYPVGSAAFSRWIKLDFDGDGKPDFETPFELRHQLATVPLDLTVEANRYMLGRAIYHIAQHRGFRSSKKGLTAQSDEVDGEVILAEDITVQLAASEEKKKGKIDQYMKRMGLETVGSAYHFLLTNGEVDEPTGYHPIRIRASEYQVVRQQLKDEIRKIFDKQNLSSDQDLLTRLLSEKEGKATLFFNHPPRIAKGSIGKCTLETNKQRCLESHPEFEKFRAWQFINNIRVRDAFGKMTPLPLNLRERLYREELAGHVNDFSFKTLRKVIEQELQQEFFYDRDPKVRTISHADDFTVPACVVTKRLKELFGENWETFEQSMSKGRKGRNKNVPAHQIIYSAMDVWHQCLSIDSTEELEEYAQDTLGWTDEDRFKALKRLWSAVTTNRCMLSHKALKNINRFLTRGLMYSDAVLFAKVPDIVGEERWKAMENRIWEYAASGYSSLKDSIAKRATISSITNRLIADFKTQTDENRNKDKQLGFEKTLNEDDHRKVLEFTVQHFGKQTWNNLPIAEQHDIESAVCAEYEVFFQSPQHDYQKMPRLGNELAQILSERFFPEITADDFKKRLYHPSQIAVFQPIEIPGHGVRLGSPSLGNIKNPVYMRAMHIIRRKINALLDAGIIDVENTRVVIELPREMNDANQRKAYKDYQDREKEEHDIVRAILEKKYASISGEDVDKVRLMLHSNPHYIEQTPLPKCTRKEAEKQYRTWIGEGGICYYTGIPIHLEDLFPQEGSEPHVDIEHTIPRSILPDNTMMNQTLCFSHYNRFEKGNTLPALLPEFEKLILPRLQPIAERIERIKDVISVCKGRSKNAQEKQWKDYWIAQRHVWEMDLEYWQGKYDRFLTKEVTDGFRRSQLTDTAIIAKYAAHYLKSIFSRVDIQKGRVTAMFRQILGFQNKNEEKDRTNHYHHAIDSTVLTLIPVAEQRDRMIELFYKMDEVKDGQEYEALARQMDREIRNCHLARSAADMKCLAAGIEETITESVLVSRYAKDRTLKNVRKRVKTGQKSKITDGKRIPLYSGGDSIRLDLNKDSTYGAILGNEGKIVLVKRESLLKVIEKGKIDDIVDSKVKSTVLHAIAKGAQEGLKPLEVAKQGIWMSGKRADKNGKPIQPIRHVRCKTSNVGFSKAVPVSEHLHHAPGAEHKFYKYAVSGGNPLAIIYERINRKGQVDRRVRFITAFELAQQASQIRSKGKKSIQSVDDIVEETGWRTTKIGNSEYLIWNILKPGYRFLLPKNADENLKGLTQQELLERLYVIKNFNGGKGTTCNFEFTHHASALAEPKPLSFTQLLTHKVLFEHIDFEIEANIMEREHLFKWK

SEQ ID NO: 17093 - protein, 1757 aa, unidentified
  REGION 1..1757: note = Cas Enzyme sequence
MFEKKFVFLRQNNIKTIIMRRILGLDLGTNSIGWAVVEIDHDKKIVRIIALGSRIIPMGDKEISTFENGGKLKSSAANRTKDKSIRKNKARFLLRRDRLHCVLNLLQWLPEHYKLDIEFVDEKGKRSGKIIKGKEPKLAYDIDENGKWYFIFNNAYAEMEQEFKSVHPELFYNKGKSDKQTKIPYDWTLYYLRKKGLSQELTKEELAWVTMSFLQKRGYEKVMGKDEKEQKEGEISEITNAKVVSVEPLSKKTQDGLNIYHIKLADEYNNIVFEYNEDASYQITQLNEFKLLEKISKLSKDNDDIAKATVEIRISEIKNIEITDIINTGRKSKENTIYNLATGWSPEFQSRYIPKLKGTHRDFVITTTYNQKGIMTKKRNIKMPNEDSAPLIKLKTETSIQEYNSINKTVGVGSYIYDALLRNPNQKIKAGLVETIERDFYETELKAILNAQKQFHPELQDEQRYMDALRMLYPNNESHRNSLAQRDFTALLSDDIIFYQRDLKTKKSEIADCRYEYVTFKKDGKEGNKPLKGIAKSNPLYQEFRLWQFIKRLRIIKLVSENEQGEKLVNIDVSDKYLTPLAKESLFEWLNNKKEVTQAAVLRKLGLEESNYTWNFEADHKEPCNSTRYDFILRLKRIKGFDWNTFLNAKSKVHAPKKKDGSDGIVDGPSNEYLLWHFFYSVKKRDERVKGFPSLIEKLLNNAGIDLSYKNKVIEMISSISTYKSEYGTYSEKAIKKLLPFMRLGKYWSQEDVERIKTIYPIKPEVLVKENIQGEITDLQGLWVSSACYIVYGRYSESNDETHWTQPYQIKDFLLSKEFKHNSINNPVVEKVLRETLMVVHDIWTTFGEEEGTYSKEDGTSVKTYKKFFDQINIEIGTSLKKNNKQKDLDSKKNAENRLANERAFKLLQELKTCYPLKSIEENSPYPKIKLRILEEGIIDAIRFDKDDQVYDYNVETDEKKFTKKEIKELLKKEASSISPNDIVRYRLWLEQRYISPYTRESISLSNLFDRTKYQIDHVFPQERITLDSLDNKVICEAIINQAKGAMTAYEFILKANGKAFYKGQSRIVLTPIDYIKNIENNISNPKKKEILLSKTIPNKFGNNQLNNTRYIAKLAMELLSNIVREEGEKEFKSKNVLVISGGITSRLKKDWQLDDAWNELIKPRFVHLNQLLETEEFICSRKINGHETEIPVIPTEEITISGELTNNQPKKFIPADVSKKRIDHRHHALDALIVALATSDHVNYINNQSGSDLDINSNQRIDERKDLKAKYMTTKSREDGTKIKFFLPPMQYKEGNKIVSYKYAYKNLAPQSVFKDVVVFALQNTLATFKQKNHIMRQRTNWITHPDYKDGMPEKDLEQKKKYSIRQSLHEKTFYGKRTFRPMPIENAINKSELIVENRIRNLIQSLYQEGLKKDQIVQKLKGTDPVVYIKEACAVTQWNECHSISILAKSDKSKIIKEIECAVDICVQNILKRHLAKYDSVKLTVSEAALYYDDIVYEEQKSIVDDYLNSGKESDNKIDVYARNKKFGDKPLVHNPQLAFSADGIEDMNSHITELNNEKSHKPIYRVKFAQALGKMFPVAEIEDGKPITVKTKQFVCTDKGSNIVCGIYKSDKGKTKFIVPTLREIIDAERTGKELFPESYPNPKYFDFKLRFTLSPLDMVYMPTKDEIENGHLNDCIDYSRIYIMNNVEKEHMYFIPCNIAAEIIKNEIDLRKDKNGILIGSCECKTAKCDGLAIKDHCIPLKVDRLGNIIKIG

SEQ ID NO: 17094 - protein, 1536 aa, unidentified
  REGION 1..1536: note = Cas Enzyme sequence
LIIYFIFEKIVNTILVMKKIVGLDLGTNSIGWALINAYIDEYNKEHLYGIEACGSRIIPMDAAILGNFDKGNSISQTADRTSYRGIRRLRERHLLRRERLHRILDLLGFLPKHYSDSLNRYGKFLNDIECKLPWVKDETGSYKFIFQESFKEMLANFTEHHPILIANNKKVPYDWTIYYLRKKALTQKISKEELAWILLNFNQKRGYYQLRGEEEETPNKLVEYYSLKVEKVEDSGERKGKDTWYNVHLENGMIYRRTSNIPLDWEGKTKEFIVTTDLEADGSPKKDKEGNIKRSFRAPKDDDWTLIKKKTEADIDKIKMTVGAYIYDTLLQKPDQKIRGKLVRTIERKYYKNELYQILKTQSEFHEELRDKQLYIACLNELYPNNEPRRNSISTRDFCHLFIEDIIFYQRPLKSKKSLIDNCPYEENRYIDKESGEIKHASIKCIAKSHPLYQEFRLWQFIVNLRIYRKETDVDVTQELLPTEADYVTLFEWLNEKKEIDQKAFFKYPPFGFKKTTSNYRWNYVEDKPYPCNETHAQIIARLGKAHIPKAFLSKEKEETLWHILYSIEDKQEIEKALHSFANKNNLSEEFIEQFKNFPPFKKEYGSYSAKAIKKLLPLMRMGKYWSIENIDNGTRIRINKIIDGEYDENIRERVRQKAINLTDITHFRALPLWLACYLVYDRHSEVKDIVKWKTPKDIDLYLKSFKQHSLRNPIVEQVITETLRTVRDIWQQVGHIDEIHIELGREMKNPADKRARMSQQMIKNENTNLRIKALLTEFLNPEFGIENVRPYSPSQQDLLRIYEEGVLNSILELPEDIGIILGKFNQTDTLKRPTRSEILRYKLWLEQKYRSPYTGEMIPLSKLFTPAYEIEHIIPQSRYFDDSLSNKVICESEINKLKDRSLGYEFIKNHHGEKVELAFDKPVEVLSVEAYEKLVHESYSHNRSKMKKLLMEDIPDQFIERQLNDSRYISKVVKSLLSNIVREENEQEAISKNVIPCTGGITDRLKKDWGINDVWNKIVLPRFIRLNELTESTRFTSINTNNTMIPSMPLELQKGFNKKRIDHRHHAMDAIIIACANRNIVNYLNNVSASKNTKITRRDLQTLLCHKDKTDNNGNYKWVIDKPWETFTQDTLTALQKITVSFKQNLRVINKTTNHYQHYENGKKIVSNQSKGDSWAIRKSMHKETVHGEVNLRMIKTVSFNEALKKPQAIVEMDLKKKILAMLELGYDTKRIKNYFEENKDTWQDINPSKIKVYYFTKETKDRYFAVRKPIDTSFDKKKIKESITDTGIQQIMLRHLETKDNDPTLAFSPDGIDEMNRNILILNKGKKHQPIYKVRVYEKAEKFTVGQKGNKRTKFVEAAKGTNLFFAIYETEEIDKDTKKVIRKRSYSTIPLNVVIERQKQGLSSAPEDENGNLPKYILSPNDLVYVPTQEEINKGEVVMPIDRDRIYKMVDSSGITANFIPASTANLIFALPKATAEIYCNGENCIQNEYGIGSPQSKNQKAITGEMVKEICFPIKVDRLGNIIQVGSCILTN

SEQ ID NO: 17095 - protein, 1536 aa, unidentified
  REGION 1..1536: note = Cas Enzyme sequence
LIIYFIFEKIVNTILVMKKIVGLDLGTNSIGWALINAYIDEYNKEHLYGIEACGSRIIPMDAAILGNFDKGNSISQTADRTSYRGIRRLRERHLLRRERLHRILDLLGFLPKHYSDSLNRYGKFLNDIECKLPWVKDETGSYKFIFQESFKEMLANFTEHHPILIANNKKVPYDWTIYYLRKKALTQKISKEELAWILLNFNQKRGYYQLRGEEEETPNKLVEYYSLKVEKVEDSGEKKGKDTWYNVHLENGMIYRRTSNIPLDWEGKTKEFIVTTDLEADGSPKKDKEGNIKRSFRAPKDDDWTLIKKKTEADIDKIKMTVGAYIYDTLLQKPDQKIRGKLVRTIERKYYKNELYQILKTQSEFHEELRDKQLYIACLNELYPNNEPRRNSISTRDFCHLFIEDIIFYQRPLKSKKSLIDNCPYEENRYIDKESGEIKHASIKCIAKSHPLYQEFRLWQFIVNLRIYRKETDVDVTQELLPTEADYVTLFEWLNEKKEIDQKAFFKYPPFGFKKTTSNYRWNYVEDKPYPCNETHAQIITRLGKAHIPKAFLSKEKEETLWHILYSIEDKQEIEKALHSFANKNNLSEEFIEQFKNFPPFKKEYGSYSAKAIKKLLPLMRMGKYWSIENIDNGTRIRINKIIDGEYDENIRERVRQKAINLTDITHFRALPLWLACYLVYDRHSEVKDIVKWKTPKDIDLYLKSFKQHSLRNPIVEQVITETLRTVRDIWQQVGHIDEIHIELGREMKNPADKRARMSQQMIKNENTNLRIKALLTEFLNPEFGIENVRPYSPSQQDLLRIYEEGVLNSILELPEDIGIILGKFNQTDTLKRPTRSEILRYKLWLEQKYRSPYTGEMIPLSKLFTPAYEIEHIIPQSRYFDDSLSNKVICESEINKLKDRSLGYEFIKNHHGEKVELAFDKPVEVLSVEAYEKLVHESYSHNRSKMKKLLMEDIPDQFIERQLNDSRYISKVVKSLLSNIVREENEQEAISKNVIPCTGGITDRLKKDWGINDVWNKIVLPRFIRLNELTESTRFTSINTNNTMIPSMPLELQKGFNKKRIDHRHHAMDAIIIACANRNIVNYLNNVSASKNTKITRRDLQTLLCHKDKTDNNGNYKWVIDKPWETFTQDTLTALQKITVSFKQNLRVINKTTNHYQHYENGKKIVSNQSKGDSWAIRKSMHKETVHGEVNLRMIKTVSFNEALKKPQAIVEMDLKKKILAMLELGYDTKRIKNYFEENKDTWQDINPSKIKVYYFTKETKDRYFAVRKPIDTSFDKKKIKESITDTGIQQIMLRHLETKDNDPTLAFSPDGIDEMNRNILILNKGKKHQPIYKVRVYEKAEKFTVGQKGNKRTKFVEAAKGTNLFFAIYETEEIDKDTKKVIRKRSYSTIPLNVVIERQKQGLSSAPEDENGNLPKYILSPNDLVYVPTQEEINKGEVVMPIDRDRIYKMVDSSGITANFIPASTANLIFALPKATAEIYCNGENCIQNEYGIGSPQSKNQKAITGEMVKEICFPIKVDRLGNIIQVGSCILTN

SEQ ID NO: 17096 - protein, 1520 aa, unidentified
  REGION 1..1520: note = Cas Enzyme sequence
MKKIVGLDLGTNSIGWALINAYIDEYNKEHLYGIEACGSRIIPMDAAILGNFDKGNSISQTADRTSYRGIRRLRERHLLRRERLHRILDLLGFLPKHYSDSLNRYGKFLNDIECKLPWVKDETGSYKFIFQESFKEMLANFTEHHPILIANNKKVPYDWTIYYLRKKALTQKISKEELAWILLNFNQKRGYYQLRGEEEETPNKLVEYYSLKVEKVEDSGERKGKDTWYNVHLENGMIYRRTSNIPLDWEGKTKEFIVTTDLEADGSPKKDKEGNIKRSFRAPKDDDWTLIKKKTEADIDKIKMTVGAYIYDTLLQKPDQKIRGKLVRTIERKYYKNELYQILKTQSEFHEELRDKQLYIACLNELYPNNEPRRNSISTRDFCHLFIEDIIFYQRPLKSKKSLIDNCPYEENRYIDKESGEIKHASIKCIAKSHPLYQEFRLWQFIVNLRIYRKETDVDVTQELLPTEADYVTLFEWLNEKKEIDQKAFFKYPPFGFKKTTSNYRWNYVEDKPYPCNETHAQIIARLGKAHIPKAFLSKEKEETLWHILYSIEDKQEIEKALHSFANKNNLSEEFIEQFKNFPPFKKEYGSYSAKAIKKLLPLMRMGKYWSIENIDNGTRIRINKIIDGEYDENIRERVRQKAINLTDITHFRALPLWLACYLVYDRHSEVKDIVKWKTPKDIDLYLKSFKQHSLRNPIVEQVITETLRTVRDIWQQVGHIDEIHIELGREMKNPADKRARMSQQMIKNENTNLRIKALLTEFLNPEFGIENVRPYSPSQQDLLRIYEEGVLNSILELPEDIGIILGKFNQTDTLKRPTRSEILRYKLWLEQKYRSPYTGEMIPLSKLFTPAYEIEHIIPQSRYFDDSLSNKVICESEINKLKDRSLGYEFIKNHHGEKVELAFDKPVEVLSVEAYEKLVHESYSHNRSKMKKLLMEDIPDQFIERQLNDSRYISKVVKSLLSNIVREENEQEAISKNVIPCTGGITDRLKKDWGINDVWNKIVLPRFIRLNELTESTRFTSINTNNTMIPSMPLELQKGFNKKRIDHRHHAMDAIIIACANRNIVNYLNNVSASKNTKITRRDLQTLLCHKDKTDNNGNYKWVIDKPWETFTQDTLTALQKITVSFKQNLRVINKTTNHYQHYENGKKIVSNQSKGDSWAIRKSMHKETVHGEVNLRMIKTVSFNEALKKPQAIVEMDLKKKILAMLELGYDTKRIKNYFEENKDTWQDINPPKIKVYYFTKETKDRYFAVRKPIDTSFDKKKIKESITDTGIQQIMLRHLETKDNDPTLAFSPDGIDEMNRNILILNKGKKHQPIYKVRVYEKAEKFTVGQKGNKRTKFVEAAKGTNLFFAIYETEEIDKDTKKVIRKRSYSTIPLNVVIERQKQGLSSAPEDENGNLPKYILSPNDLVYVPTQEEINKGEVVMPIDRDRIYKMVDSSGITANFIPASTANLIFALPKATAEIYCNGENCIQNEYGIGSPQSKNQKAITGEMVKEICFPIKVDRLGNIIQVGLCILTN

SEQ ID NO: 17097 - protein, 1536 aa, unidentified
  REGION 1..1536: note = Cas Enzyme sequence
LIIYFIFEKIVNTILVMKKIVGLDLGTNSIGWALINAYIDEYNKEHLYGIEACGSRIIPMDATILGNFDKGNSISQTADRTSYRGIRRLRERHLLRRERLHRILDLLGFLPKHYSDSLNRYGKFLNDIECKLPWVKDETGSYKFIFQESFKEMLANFTEHHPILIANNKKVPYDWTIYYLRKKALTQKISKEELTWILLNFNQKRGYYQLRGEEEETPNKLVEYYSLKVEKVEDSGERKGKDTWYNVHLENGMIYRRTSNIPLDWEGKTKEFIVTTDLEADGSPKKDKEGNIKRSFRAPKDDDWTLIKKKTEADIDKIKMTVGAYIYDTLLQKPDQKIRGKLVRTIERKYYKNELYQILKTQSEFHEELRDKQLYIACLNELYPNNEPRRNSISTRDFCHLFIEDIIFYQRPLKSKKSLIDNCPYEENRYIDKESGEIKHASIKCIAKSHPLYQEFRLWQFIVNLRIYRKETDVDVTQELLPTEADYVTLFEWLNEKKEIDQKAFFKYPPFGFKKTTSNYRWNYVEDKPYPCNETHAQIITRLGKAHIPKAFLSKEKEETLWHILYSIEDKQEIEKALHSFANKNNLSEEFIEQFKNFPPFKKEYGSYSAKAIKKLLPLMRMGKYWSIENIDNGTRIRINKIIDGEYDENIRERVRQKAINLTDITHFRALPLWLACYLVYDRHSEVKDIVKWKTPKDIDLYLKSFKQHSLRNPIVEQVITETLRTVRDIWQQVGHIDEIHIELGREMKNPADKRARMSQQMIKNENTNLRIKALLTEFLNPEFGIENVRPYSPSQQDLLRIYEEGVLNSILELPEDIGIILGKFNQTDTLKRPTRSEILRYKLWLEQKYRSPYTGEMIPLSKLFTPAYEIEHIIPQSRYFDDSLSNKVICESEINKLKDRSLGYEFIKNHHGEKVELAFDKPVEVLSVEAYEKLVHESYSHNRSKMKKLLMEDIPDQFIERQLNDSRYISKVVKSLLSNIVREENEQEAISKNVIPCTGGITDRLKKDWGINDVWNKIVLPRFIRLNELTESTRFTSINTNNTMIPSMPLELQKGFNKKRIDHRHHAMDAIIIACANRNIVNYLNNVSASKNTKITRRDLQTLLCHKDKTDNNGNYKWVIDKPWETFTQDTLTALQKITVSFKQNLRVINKTTNHYQHYENGKKIVSNQSKGDSWAIRKSMHKETVHGEVNLRMIKTVSLNEALKKPQAIVEMDLKKKILAMLELGYDTKRIKNYFEENKDTWQDINPSKIKVYYFTKETKDRYFAVRKPIDTSFDKKKIKESITDTGIQQIMLRHLETKDNDPTLAFSPDGIDEMNRNILILNKGKKHQPIYKVRVYEKAEKFTVGQKGNKRTKFVEAAKGTNLFFAIYETEEIDKDTKKVIRKRSYSTIPLNVVIERQKQGLSSAPEDENGNLPKYILSPNDLVYVPTQEEINKGEVVMPIDRDRIYKMVDSSGITANFIPASTANLIFALPKATAEIYCNGENCIQNEYGIGSPQSKNQKAITGEMVKEICFPIKVDRLGNIIQVGLCILTN

SEQ ID NO: 17098 - protein, 1217 aa, unidentified
  REGION 1..1217: note = Cas Enzyme sequence
MTVGAYIYDTLLQKPDQKIRGKLVRTIERKYYKNELYQILKTQSEFHEELRDKQLYIACLNELYPNNEPRRNSISTRDFCHLFIEDIIFYQRPLKSKKSLIDNCPYEENRYIDKESGEIKHASIKCIAKSHPLYQEFRLWQFIVNLRIYRKETDVDVTQELLPTEADYVTLFEWLNEKKEIDQKAFFKYPPFGFKKTTSNYRWNYVEDKPYPCNETHAQIIARLGKAHIPKAFLSKEKEETLWHILYSIEDKQEIEKALHSFANKNNLSEEFIEQFKNFPPFKKEYGSYSAKAIKKLLPLMRMGKYWSIENIDNGTRIRINKIIDGEYDENIRERVRQKAINLTDITHFRALPLWLACYLVYDRHSEVKDIVKWKTPKDIDLYLKSFKQHSLRNPIVEQVITETLRTVRDIWQQVGHIDEIHIELGREMKNPADKRARMSQQMIKNENTNLRIKALLTEFLNPEFGIENVRPYSPSQQDLLRIYEEGVLNSILELPEDIGIILGKFNQTDTLKRPTRSEILRYKLWLEQKYRSPYTGEMIPLSKLFTPAYEIEHIIPQSRYFDDSLSNKVICESEINKLKDRSLGYEFIKNHHGEKVELAFDKPVEVLSVEAYEKLVHESYSHNRSKMKKLLMEDIPDQFIERQLNDSRYISKVVKSLLSNIVREENEQEAISKNVIPCTGGITDRLKKDWGINDVWNKIVLPRFIRLNELTESTRFTSINTNNTMIPSMPLELQKGFNKKRIDHRHHAMDAIIIACANRNIVNYLNNVSASKNTKITRRDLQTLLCHKDKTDNNGNYKWVIDKPWETFTQDTLTALQKITVSFKQNLRVINKTTNHYQHYENGKKIVSNQSKGDSWAIRKSMHKETVHGEVNLRMIKTVSFNEALKKPQAIVEMDLKKKILAMLELGYDTKRIKNYFEENKDTWQDINPSKIKVYYFTKETKDRYFAVRKPIDTSFDKKKIKESITDTGIQQIMLRHLETKDNDPTLAFSPDGIDEMNRNILILNKGKKHQPIYKVRVYEKAEKFTVGQKGNKRTKFVEAAKGTNLFFAIYETEEIDKDTKKVIRKRSYSTIPLNVVIERQKQGLSSAPEDENGNLPKYILSPNDLVYVPTQEEINKGEVVMPIDRDRIYKMVDSSGITANFIPASTANLIFALPKATAEIYCNGENCIQNEYGIGSPQSKNQKAITGEMVKEICFPIKVDRLGNIIQVGLCILTN

SEQ ID NO: 17099 - protein, 1374 aa, unidentified
  REGION 1..1374: note = Cas Enzyme sequence
EEEEEKANETIEIISAKILSVEKKEKDKKYEKYWYEMHLENGMTYRATFYNDVTSWEGETKDFVLKRTTLKDGTPKNELSFLPTPEEIDLMDAQRKAKMYAKIKLRTEKEIENSHKTVGSYIYDSLLQNPNQKIIGKLVRTVERKFYKDELKKILEVQQELIPELKDEALYQRCIEELYAANEAHRRSLSKPDYVNLFLNDILFYQRPLKSKKSLIDDCPYEYHVSKDGEQHPIKCIAKSNPYFQEFRLWQFVQNLRIYQRERTVTDGQLDLFTNTTTNKLQTDVDVTSEILKTEEDYVKLFNWLNDRSSIKQDTLLSSYFKAKKEKGKDKYPYRWNYVEDKDYPCNETRATILSGLAKCNISADFLTHENEMSLWHILYSIEDKAELYKALKKFAHRHQLEENFPEVLSKTKPFKKDYGSYSEKAIKKLLPLMRMGNYWNEEQIDAKTRERIEKIIDGEYDENIKNRVREKAISLTDIQHFRGLPVWLACYIVYDRHSEAKVVEKWEKPEDIDYYLKNFKQHSLRNPIVEQVITETLRTVRDIWKQEGQIDEIHVELGREMKNPADKRRQMTERIQQNENTNLRIKAMLMEFMNPDMGIENVRPHSPSQQDILRIYEENALDNLSKEDKDYDFVSKISKVAQPSKSDIIRYKCWLEQKYQSPYTGKMIPLSKLFTPAYEIEHVIPQSRYFDDSFSNKVICEAEVNKLKDRQLGFEFIKNHAGEIVQLSQGGTVTIMSVEAYERFVKDYYSNNRTKMKKLLMDDIPDGFIERQMNDSRYISKVVKGLLSNIVREKQEDGEYQSSREYEQEAVSKNVISCTGSITDRLKKDWGMNDVWNNIVLPRFKRLNEVTGKDCFTTYSREGHEIPNMPLELQKGFNKKRIDHRHHAMDAIVIACATRDHVNLLNNEAAHSKHNVNRYQLQHKLRRFATIKINGKEREIAQEFLKPWESFTTDAWQVLSNIIVSFKQNLRIINKTTNRYQHCEDGGKKGFEKQHKGESWAVRKSMHKDTVFGEVNLRLKKTVSLNEAIKKPENIVNKEFKKKVIELLDHGRDAKFIKKYIDDNKDVWSDINPAKIEIFYFSKDEKKRNGEPKERYFATRKSLDTTFDEKKIKESVTDTGIQKILLAHLTTKENNPEQAFSPDGIEEMNRNITALNNGKFHQPILKVRVYEKADKFAVGQTGNKTKKFVEAAKGTNLFFAFFGTEKEIKSNGRKEIVRSFMTIPLNVMIDCQKKYGIQWRNNIEDYLRGKDMIDADAKLLFILSPNDLVYLPRENDRKEDIMPLDKQRIYKFIDPAQDKGNFVQYSVAKAIFSAKFTDQKKQGISYPIQDEFGLGSQQTKSPRAITGEMIKETCIPIKVDRLGNVIEINGSPL

SEQ ID NO: 17100 - protein, 1574 aa, unidentified
  REGION 1..1574: note = Cas Enzyme sequence
MKKILGLDLGTNSIGWAVVNADEATRKDNTKYLKPNSISCAGSRIIPMSADILGDFDKGNSISQTAERTRLRMMRRLLERNHLRRERLLRVLQVMDFLPEHYNSKISRYGKFIDDSEPKLPWRKSKDGKMEFLFQESFDEMLAEFKQHHPQLLANGKKVPYDWTIYYLRKKALTQRITKEELAWILLQFNQKRGYYQLRGEEEEEKANETIEIISAKILSVEKKEKDKKYEKYWYEMHLENGMTYRATFYNDVTSWEGETKDFVLKRTTLKDGTPKNELSFLPTPEEIDLMDAQRKAKMYAKIKLRTEKEIENSHKTVGSYIYDSLLQNPNQKIIGKLVRTVERKFYKDELKKILEVQQELIPELKDEALYQRCIEELYAANEAHRRSLSKPDYVNLFLNDILFYQRPLKSKKSLIDDCPYEYHVSKDGEQHPIKCIAKSNPYFQEFRLWQFVQNLRIYQRERTVTDGQLDLFTNTTTNKLQTDVDVTSEILKTEEDYVKLFNWLNDRSSIKQDTLLSSYFKAKKEKGKDKYPYRWNYVEDKDYPCNETRATILSGLAKCNISADFLTHENEMSLWHILYSIEDKAELYKALKKFAHRHQLEENFPEVLSKTKPFKKDYGSYSEKAIKKLLPLMRMGNYWNEEQIDAKTRERIEKIIDGEYDENIKNRVREKAISLTDIQHFRGLPVWLACYIVYDRHSEAKVVEKWEKPEDIDYYLKNFKQHSLRNPIVEQVITETLRTVRDIWKQEGQIDEIHVELGREMKNPADKRRQMTERIQQNENTNLRIKAMLMEFMNPDMGIENVRPHSPSQQDILRIYEENALDNLSKEDKDYDFVSKISKVAQPSKSDIIRYKCWLEQKYQSPYTGKMIPLSKLFTPAYEIEHVIPQSRYFDDSFSNKVICEAEVNKLKDRQLGFEFIKNHAGEIVQLSQGGTVTIMSVEAYERFVKDYYSNNRTKMKKLLMDDIPDGFIERQMNDSRYISKVVKGLLSNIVREKQEDGEYQSSREYEQEAVSKNVISCTGSITDRLKKDWGMNDVWNNIVLPRFKRLNEVTGKDCFTTYSREGHEIPNMPLELQKGFNKKRIDHRHHAMDAIVIACATRDHVNLLNNEAAHSKHNVNRYQLQHKLRRFATIKINGKEREIAQEFLKPWESFTTDAWQVLSNIIVSFKQNLRIINKTTNRYQHCEDGGKKGFEKQHKGESWAVRKSMHKDTVFGEVNLRLKKTVSLNEAIKKPENIVNKEFKKKVIELLDHGRDAKFIKKYIDDNKDVWSDINPAKIEIFYFSKDEKKRNGEPKERYFATRKSLDTTFDEKKIKESVTDTGIQKILLAHLTTKENNPEQAFSPDGIEEMNRNITALNNGKFHQPILKVRVYEKADKFAVGQTGNKTKKFVEAAKGTNLFFAFFGTEKEIKSNGRKEIVRSFMTIPLNVMIDCQKKYGIQWRNNIEDYLRGKDMIDADAKLLFILSPNDLVYLPRENDRKEDIMPLDKQRIYKFIDPAQDKGNFVQYSVAKAIFSAKFTDQKKQGISYPIQDEFGLGSQQTKSPRAITGEMIKETCIPIKVDRLGNVIEINGSPL

SEQ ID NO: 17101 - protein, 1538 aa, unidentified
  REGION 1..1538: note = Cas Enzyme sequence
MKHILGLDLGTNSIGWALVKSEQDCDDVERINGIEAAGSRIIPMDAAVLGDFAKGNTKSQTADRTAARGIRRMGERHKLRRERLNRVLDVMGFLPEHYSAALTRYGKFKDGEECKIAWRKDESGQWTFVFEDSFSEMLADFVAHQPEWLAGGRKVPYDWTIYYLRKKALSKPLTKQELAWLLLNFNQKRGYYQLRGEDEQTDDKGKLVEYYALKVVDVEDTGDKKGKDTWFNIMLENGMVYRRPAAEAPDWIGKTKEFIVTTDLEKDGTPKKDKEGNIKRSFRMPKEDDWTLIKKKTENDIDRSGKTVGEYIYDALLADPTQKIRGKLVRTVERKYYKEELKKIIDSQKRFIPELNDNELYGRCISELYQSNDAYRQSISSCDFTYLFVDNIIFYQRPLKSKKSLIDNCPYEEHSYTDSKTGEVKTAPVKCVAKSNPLFQEFRLWQFVQNIRIFERQKKIGDSVKTDVDVTGEFIKSADDVVSLFDFLNDRKDITQSVLLGTYFKIKKPKGKDSDYPYRWNYVEDKTYPCNETRALILKGLKDAGIDEGFLDKDKEYSLWHILYSVEDKQEITKAMEKFAAKNSLGGKFAEVFSSLPPFNKNYGSYSEKAIKKLLALMRTGKYWSADAIDKHTLERIDKIINGEYDESIRTRVREKAISLTDVSHFRGLPLWLACYIVYDRHSESKDITRWNCPADIDQYLSHFKQHSLRNPIVEQVVTETLRTVRDIWRQYGKIDEIHIEMARDMKNPADVRAKMSKRMIDNENANLRIKAMLAEFADPDFGIAGVRPYSPSQQEMLRIYEEGALESVDEVPDEINEIISKFNQTDIKKRPTHGEIIKYKLWLEQKYQSPYTGRTISLSRLFTDDYQIEHVIPQSRYFDDSMSNKVICEAEVNQLKDRMLGYEFIKAHHGEKVLLSSGETVTILTAEEYERLVQLNFRKNPVKMKKLLMDDIPDKFIERQLNDSRYISKKIKSLLSNMVRDEGEQEDISKNVIACNGAITDRLKRDWGVNDVWNHIILPRFERLNAVTGSDRFTTTSTNGHTIPDMPLNLQKGFNKKRIDHRHHAMDAIVIACTTRSHVNLLNNEAAMSKNNAVRYQLSRKLRRYEDTMVTRNGETRTISVAREFLKPWPTFNADVEKALRGIVVSFKQNLRVINKTVNKYQKFVYNEEKHIKEKNAVRQEERNGRHLLAIRKPMHKDTVYGEVNLRRIKEVSLKDAVANFKAVVDKDLKKKLMAMIELGYDLKRIKQYFDDNKDAWQDVNLKKIKVYYFTKDTGDRYFATRFGNDLVTLFSKITKADDAKKQIERITDTGIQKILKRHLEANGGDCQKAFSADGIDEMNRNITQLNGGRPHKPVYKVRIYEKADKFAIGTKGNKAAKFVEAAKGTNLFFAVYLKEYEDSTTGETIKKRVFDTIPLKTVIDRLKNGQTPAPEEKDGAKLLFVLSPNDLVYLPTEDEVKNGTINRPLDKRRIYKMVSCTGTECYYIPFIVASPIVDKVEFFSLNKIGRAITGEMIKEICIPIKVDRLGNITEVNNEKI

SEQ ID NO: 17102 - protein, 1276 aa, unidentified
  REGION 1..1276: note = Cas Enzyme sequence
FVRRKESALLTEDAAHGVSLFDGGGITDREYHRRYPTILHLILELMTSNEPHDVRLVYLACAWLVAHRGHFLFDFGADQTDRLLNFGEVYGSFRDYLQEQGYSMPWPDAVSADTVLEILQMDAGVGKKKEAFKIRVFGGKKPAKEGTEDFPYSPEGIVGLLSGGKVKPRDLFDKEAYEQMESVSLDMGDEEFDRIVSELGDDGELLRQLRSLHSCAKLIATMSNCREGDPVCISSSKVAIYERHQKDLELLKRLVRNYCPKQYNEIFRRAVADNYVAYSGNVQSCSENDKKKVKRINKVGFSEYLKKKLKGLKVEPADKAEYDSMMNRLEHYSFLPRQRDTDNRVIPQQLYRQELAAILERAEGYLPMLREKNADGLSVSEKLLSIFDFRIPYYVGPLVRHPNSTAWIERKQGKILPWNFEQMVDLDASEQKFIDKMLNKCTYLPGEDVMPVNSLLYERFTVLNALNNLKVNGREIPVAVKQELYTQLFQELPRVPVKRIREYLLQHGYMAKDEELTGLDSTFKSGLRSHHIFKRLLGSGALTEAQVEEIILHRAYTEDKSRMGRWLRSTYPQLTDGDVQYILKQKLKEFGRLSRKLLTGLYGTERDSYGDAYSIMEMLWNSNCNLMQLLSEKYTYAEQISEYCKEYYSEHPRRLTDRLSEMYVSNAAKRPIFRALDIVSDVVKATGEAPAKIFVEMARGGTPDQKGKRTDSRKKQLLDCYKKVKDEDVSQFVKALENMGAEVDDRLQDRKLYLYYLQLGRCAYTGRPIELSRLADGSYNLEHIYPQSLVKDDSLLNNLVLVESEVNGQKSDAYPVDGDIRKKMGAFWSMLKQNGLMTEEKYRRLTRPHPFTADEKLGFINRQLVETRQSTKVIAALLKERFPKTEIVYVKAGLVSEFRQEFGLLKCRSVNDLHHAKDAYLNIVVGNVYHERFTSKWFRLEEHYNVQVKKLFAKPHSHGGECYWNGEADIARVRKNMAKNAVHLTRYAFIRKGGLFDQQPVKAAEGLVELKKGLLTEKYGGYNKATASCFMLVRFELKGKREVMLVPVELLVKDRVLDDRTFAQQYAAQTVEKIIGKKPENLELLLNGRPLKINTVFSFDGTKMVLASKDNGGKNVMLSPLVALMLAPEWEQYAKRLESFQNKQKNNKNLQPNEVRDGITGEKNATLYRILAKKMGEWPFKQFPGNQQENLERGGEVFESKEITEQITCLMNILTLMGPGSAGVDLRGCGGTGQAGKKSANAKISNWKSRYSDVRIIDESASGLFSKTSGNLLDLL

SEQ ID NO: 17103 - protein, 1036 aa, unidentified
  REGION 1..1036: note = Cas Enzyme sequence
YERHQKDLELLKRLVRNYCPKQYNEIFRRAVADNYVAYSGNVQSCSENDKKKVKRINKVGFSEYLKKKLKGLKVEPADKAEYDSMMNRLEHYSFLPRQRDTDNRVIPQQLYRQELAAILERAEGYLPMLREKNADGLSVSEKLLSIFDFRIPYYVGPLVRHPNSTAWIERKQGKILPWNFEQMVDLDASEQKFIDKMLNKCTYLPGEDVMPVNSLLYERFTVLNALNNLKVNGREIPVAVKQELYTQLFQELPRVPVKRIREYLLQHGYMAKDEELTGLDSTFKSGLRSHHIFKRLLGSGALTEAQVEEIILHRAYTEDKSRMGRWLRSTYPQLTDGDVQYILKQKLKEFGRLSRKLLTGLYGTERDSYGDAYSIMEMLWNSNCNLMQLLSEKYTYAEQISEYCKEYYSEHPRRLTDRLSEMYVSNAAKRPIFRALDIVSDVVKATGEAPAKIFVEMARGGTPDQKGKRTDSRKKQLLDCYKKVKDEDVSQFVKALENMGAEVDDRLQDRKLYLYYLQLGRCAYTGRPIELSRLADGSYNLEHIYPQSLVKDDSLLNNLVLVESEVNGQKSDAYPVDGDIRKKMGAFWSMLKQNGLMTEEKYRRLTRPHPFTADEKLGFINRQLVETRQSTKVIAALLKERFPKTEIVYVKAGLVSEFRQEFGLLKCRSVNDLHHAKDAYLNIVVGNVYHERFTSKWFRLEEHYNVQVKKLFAKPHSHGGECYWNGEADIARVRKNMAKNAVHLTRYAFIRKGGLFDQQPVKAAEGLVELKKGLLTEKYGGYNKATASCFMLVRFELKGKREVMLVPVELLVKDRVLDDRTFAQQYAAQTVEKIIGKKPENLELLLNGRPLKINTVFSFDGTKMVLASKDNGGKNVMLSPLVALMLAPEWEQYAKRLESFQNKQKNNKNLQPNEVRDGITGEKNATLYRILAKKMGEWPFKQFPGNQQENLERGGEVFESKEITEQITCLMNILTLMGPGSAGVDLRGCGGTGQAGKKSANAKISNWKSRYSDVRIIDESASGLFSKTSGNLLDLL

SEQ ID NO: 17104 - protein, 1306 aa, unidentified
  REGION 1..1306: note = Cas Enzyme sequence
NRRRIDRRQQRVALVNELFAEEIRRIDPNFFVRRKESALFPEDTAHGVRLFDGGGITDREYHRRYPTIHHLILELMTSNEPHDVRLVYLACAWLVAHRGHFLFDFGADQTDRLLNFGEVYGSFRDYLQEQGYSMPWPDAVSADTVLEILQMDAGVGKKKEAFKIRVFGGKKPAKEGTEDFPYSPEGIVGLLSGGKVKPRDLFDKEAYEQMESVSLDMGDEEFDRIVSELGDDGELLRQLRSLHSCAKLIATMSNCREGDPVCISSSKVAIYERHQKDLELLKRLVRNYCPKQYNEIFRRAVADNYVAYSGNVQSCSENDKKKVKRINKVGFSEYLKKKLKGLKVEPADKAEYDSMMNRLEHYSFLPRQRDTDNRVIPQQLYRQELAAILERAEGYLPMLREKNADGLSVSEKLLSIFDFRIPYYVGPLVRHPNSTAWIERKQGKILPWNFEQMVDLDASEQKFIDKMLNKCTYLPGEDVMPVNSLLYERFTVLNALNNLKVNGREIPVAVKQELYTQLFQELPRVPVKRIREYLLQHGYMAKDEELTGLDSTFKSGLRSHHIFKRLLGSGALTEAQVEEIILHRAYTEDKSRMGRWLRSTYPQLTDGDVQYILKQKLKEFGRLSRKLLTGLYGTERDSYGDAYSIMEMLWNSNCNLMQLLSEKYTYAEQISEYCKEYYSEHPRRLTDRLSEMYVSNAAKRPIFRALDIVSDVVKATGEAPAKIFVEMARGGTPDQKGKRTDSRKKQLLDCYKKVKDEDVSQFVKALENMGAEVDDRLQDRKLYLYYLQLGRCAYTGRPIELSRLADGSYNLEHIYPQSLVKDDSLLNNLVLVESEVNGQKSDAYPVDGDIRKKMGAFWSMLKQNGLMTEEKYRRLTRPHPFTADEKLGFINRQLVETRQSTKVIAALLKERFPKTEIVYVKAGLVSEFRQEFGLLKCRSVNDLHHAKDAYLNIVVGNVYHERFTSKWFRLEEHYNVQVKKLFAKPHSHGGECYWNGEADIARVRKNMAKNAVHLTRYAFIRKGGLFDQQPVKAAEGLVELKKGLLTEKYGGYNKATASCFMLVRFELKGKREVMLVPVELLVKDRVLDDRTFAQQYAAQTVEKIIGKKPENLELLLNGRPLKINTVFSFDGTKMVLASKDNGGKNVMLSPLVALMLAPEWEQYAKRLESFQNKQKNNKNLQPNEVRDGITGEKNATLYRILAKKMGEWPFKQFPGNQQENLERGGEVFESKEITEQITCLMNILTLMGPGSAGVDLRGCGGTGQAGKKSANAKISNWKSRYSDVRIIDESASGLFSKTSGNLLDLL

SEQ ID NO: 17105 - protein, 1360 aa, unidentified
  REGION 1..1360: note = Cas Enzyme sequence
MGAYYLGLDIGTDSVGYAVTDPAYSLRKFKGEPMWGTHLFEGGQESADRRLHRTNRRRIDRRQQRVALVNELFAEEIRRIDPNFFVRRKESALFPEDTAHGVRLFDGGGITDREYHRRYPTIHHLILELMTSNEPHDVRLVYLACAWLVAHRGHFLFDFGADQTDRLLNFGEVYGSFRDYLQEQGYSMPWPDAVSADTVLEILQMDAGVGKKKEAFKIRVFGGKKPAKEGTEDFPYSPEGIVGLLSGGKVKPRDLFDKEAYEQMESVSLDMGDEEFDRIVSELGDDGELLRQLRSLHSCAKLIATMSNCREGDPVCISSSKVAIYERHQKDLELLKRLVRNYCPKQYNEIFRRAVADNYVAYSGNVQSCSENDKKKVKRINKVGFSEYLKKKLKGLKVEPADKAEYDSMMNRLEHYSFLPRQRDTDNRVIPQQLYRQELAAILERAEGYLPMLREKNADGLSVSEKLLSIFDFRIPYYVGPLVRHPNSTAWIERKQGKILPWNFEQMVDLDASEQKFIDKMLNKCTYLPGEDVMPVNSLLYERFTVLNALNNLKVNGREIPVAVKQELYTQLFQELPRVPVKRIREYLLQHGYMAKDEELTGLDSTFKSGLRSHHIFKRLLGSGALTEAQVEEIILHRAYTEDKSRMGRWLRSTYPQLTDGDVQYILKQKLKEFGRLSRKLLTGLYGTERDSYGDAYSIMEMLWNSNCNLMQLLSEKYTYAEQISEYCKEYYSEHPRRLTDRLSEMYVSNAAKRPIFRALDIVSDVVKATGEAPAKIFVEMARGGTPDQKGKRTDSRKKQLLDCYKKVKDEDVSQFVKALENMGAEVDDRLQDRKLYLYYLQLGRCAYTGRPIELSRLADGSYNLEHIYPQSLVKDDSLLNNLVLVESEVNGQKSDAYPVDGDIRKKMGAFWSMLKQNGLMTEEKYRRLTRPHPFTADEKLGFINRQLVETRQSTKVIAALLKERFPKTEIVYVKAGLVSEFRQEFGLLKCRSVNDLHHAKDAYLNIVVGNVYHERFTSKWFRLEEHYNVQVKKLFAKPHSHGGECYWNGEADIARVRKNMAKNAVHLTRYAFIRKGGLFDQQPVKAAEGLVELKKGLLTEKYGGYNKATASCFMLVRFELKGKREVMLVPVELLVKDRVLDDRTFAQQYAAQTVEKIIGKKPENLELLLNGRPLKINTVFSFDGTKMVLASKDNGGKNVMLSPLVALMLAPEWEQYAKRLESFQNKQKNNKNLQPNEVRDGITGEKNATLYRILAKKMGEWPFKQFPGNQQENLERGGEVFESKEITEQITCLMNILTLMGPGSAGVDLRGCGGTGQAGKKSANAKISNWKSRYSDVRIIDESASGLFSKTSGNLLDLL

SEQ ID NO: 17106 - protein, 1358 aa, unidentified
  REGION 1..1358: note = Cas Enzyme sequence
MAEYYLGLDIGTDSVGYAVTDTAYTLRKFKGEPMWGTHLFEGGQEAADRRMHRTNRRRIDRKQQRVALVDELFAEEIHKIDPHFFIRRKESALFLEDTTHGVKLFNGGGITDREYHLRYPTIHHLILELMISDEPHDVRLVHIACAWLVAHRGHFLFDIAPDQTEKLLDFGAVYGEFQDFLMEQDCSLPWNPLVEPRQILKILQMQTGISKKKEAFREELYGGKKIPKEATEDFPYSAEAIIGLLSGGAVKPQVLFDNEAYAELESISLQMGDEDFERIISELGDDGELLFKLREMYSCAKLIATMSNCRKGDPICVSSSKVDIYEKHQQDLKLLKRMVKKYCPKQYGEIFRKAVPGNYVAYTGNVRSCKEPEKVKKIDKLGFSDFLKRKFKGIKVSPADQAAYEDMMNRLDNCSFLPKQRETDNRVIPQQLYRQEMETLLKKAEGYLPMLCQPDADGLTVSEKLLSIFDFRIPYYVGPLVKRLDSTAWIERKQGSILPWNFDEMVDLDASEQMFIKRMVNCCTYLPGEYVLPVNSLLYQRFTVLNELNNLKVNGQEIPVAVKQELYTGLFLQQPRVTKKNIENYLLVRACIGKHDEVAGLDSTYNSGLRSYHIFKRLMEQGILTESDVEQIILHAAYTEDKGRMRRWLKATFPKLSDGDVSYILRQKLKEFGRLSAKFLNGVYGTEKDSCGEAFTIMQMLWDTNCNLMQLLSDRFTYSEQIQEYCREYYAEHPRKLTDRLSEMYVSNAAKRPVFRTMDIVSDVVKATGCAPKKIFVEMARGGAPDQKGKRTPSRLKQLQDLYKNIKTADAKRLADELTAMGVAADNRLQDRKLFLYYLQLGKCAYTGNAIELSQLASGKYNLEHIYPQSQVKDDSLLNNLVLVESEANGQKQDTYPIDKKIRGERKAFWALLKQNGLMTDEKYRRLTRSTPFTADEKQGFINRQLVETRQSTKVIAALLKERFPETEIVYVKAGLVSEFRQEFDILKCRAVNDLHHAKDAYLNIVVGNVYQERFARQWFRIDEHYNVQVKKLFAKPHSHGGENYWNGEADVARVKKTVAKNAVHLTRYAFFRKGGLFDQQPVKAAEGLVPLKKGLPTEKYGGYNKATASCFMFVRFVLKGEVEVMPVPVELLVKECVLEDREFAHAYLEQAVEKIIGSQPRDLELLLNGRPLKINTVFCFDGTNMALAGKSSGGRNVLMSPLMALVLPGEWERYVKRLESFQNKRQINKNIVPDEEKDGISKEKNIGLYRILTEKMGAWPFAQFPGNQSDTLEKGAETFGKAEITDQVSCLMNILLMMGPGSTAVDLTICGGKKSTGSKVMNAKLSNWKKRYADVRIIDESASGLFGHSSENLLELL

SEQ ID NO: 17107 - protein, 1333 aa, unidentified
  REGION 1..1333: note = Cas Enzyme sequence
MGKEYYLGLDIGTDSVGWAVCDTNYKIPKFKGNAMWGIRLFEKSNSAEERRGFRSSRRRTQRKRERLKLLEMLFDEEISKIDPAFFIKLRESNLYLEDKSTKIPYCVFSDENYTDKDFHRDYPTIYHLRNELIKNNKPHDVRLVYLALHHIIKNRGHFLFDYSYKNDKSGDFMPIYNDLKNYFYDNYEIELDCSDVDEFANTLKDKSKGKTKKNAEIAELFGVSKKDDKVLYSALSLLSGSSVKLFDIFDDEALKDVEKKSVSFSSGFDDSANDFQSYLGERFELLEKLKAVYDWAVLADILDGKEYISEAKVAIYEKHKRDLRTLKKYIKIYMPEKKAEIFNISSKDNNYVAYSKHIKTSSGTGVLNSTCTQEEFCTYLKKTLGICKDASYEEMFKEIENSTFMPKQVTKDNGVVPMQVNEKELVAILDNAKEYLPFLLNEDNDGKTVYDKIKALFEYRIPYYIGPLNTHSTKHWLVRSNEKIYPWNIEDVVDFDKSAEKFIEKLTSKCTYLPQYDVIPKHSLLYNKFCVLNELNNLKIDGEKISVQLKQDIYNDLFKKYYKVTNKKLCDYLKSRNIAFDEISGIDNDFKSSLKSYKDLVAYNLTDEQKEEIVKAITIFGDDKKLLKKRLKNEFGDCLSDDEIKKICKLKYTGWSKLSREFLTDVTAVYKETGELINIICALWETNYNLASLLYSDEFCCDDKENKTFNDKINELNSFGNDKTLNQIVEELYVSPLVKRPIYQSLLITKELEKIMKCPPKKIFVEVARGAEEKKRTVSRRNKLLDLYKSCKNDYPLLFDELQNNTTDDELKSDKLYLYFTQFGKCMYTGENIDLGDLFNKNLYDIDHIYPQSKIKDDSLDNRVLVKKTTNAKKDNEYPLSSQIREKMTPHWKALLDKGLIDKKKYERLVRNYPLSDEELSQFISRQLVETRQSTKAVANILEQLYPRPDTEIVYVKAALTSEFRHQYDMLKCREVNDLHHAKDAYLNIVVGNAYNVKFTHNKANFIKGLQNNDKAYTVKLDSMLKHNIDGAWIADNNESLNIVKSTMNKNNIRYTRYAFEKKGGLFKVTILKKGNGQASIKKNDKRNSIEKYGGYNQVSSTYFSCVEHGKDNKRMISMFSVNLHDKNKYEENPIAYLIENYGLINPIIKVKKVKIQSCISFDNMLCHLGGKDSGGSQISYRPGVQLVLGYDNERYIRNVIRCAGGDLHLQTSKNEEDIVTAEKNIELFNLLDQKMKNNIYGVLYSNLGDKLYCSKEKFEKLDIVEQCNVIKNVLTILKNNASKGDLKSIGIKANGAIRLNNNISEIKNVKSIKLINQSVTGLFEQEIELLNL

SEQ ID NO: 17108 - protein, 1263 aa, unidentified
  REGION 1..1263: note = Cas Enzyme sequence
KVDPEFFIRLKESKFHLEDKVIDEKNIIFKEKEDGDKKFYEKYPTIYHLRHALIEGCDDIDIRELYMAVHHIIKYRGHFLFKGDISDSGLSINDKIVEIIDLMSSVAGMNRLEYNDKLINEIRNIVSNRDKTINDKKKDINKVFGGNDYKAYKSIFALSVGAKVKPYDIFLEEEYKDLDDIKGIVFKNTEYEEVRDTYEQAFEDRIILIDAAKSLYDMIILLSIKPEGKGLSENKVEIYNKHHEDLEILKEVLRKDKDLYNRVLREDKDKGTNYINYIKKSKYGKGCSREDFYKFLKKALGEMESNEKIEYILTEIDLERFLSLQRVKENSIIPYQAHRDELKKILTNASTKFEFLNYESEGYSNIEKIIKLMEFRIPYYVGPLNNHHSVENKSNSGFSWVVRKEKGRVKPWNFEKLVDKRASSMRFKENLTNKCTYLTRENVLPKESLLYSEYCLLNELNNIMYDGKKLSLEVKNDLIEKVYKKEKKKLTKKGIKDFLKHNNYADGKGEVTGIDIDIKNDLKSYRDMVRIFGSDFNHKMAEDIILWVTVFGESKDILEAEIKESYKDMVNDKQLKMIKNLRYKDWGKFSRRFLTEIRSDVLIDQSTGQGQSIIEAMRTRDHILMELLRNEYDFAKKVEDINREKQKNISEISHDLLDDLYCSPAVKRSLWQTICIVEEIKKIMGHEPKKIFVEVTRTNKAEKRRTDSRKKRLLELYKNIKDDSRNWVDEIEKTEDSKFNSKKLYLYYTQMGKCMYTDTIIDIETLFTDMYDIDHIFPRSKTKDNSFENLVLVTRESNGKKGDNYPIEPSVQRDKLDLWRYLYDKKLIGDIKFERLTRTYGFTDDEMSGFIARQLVETSQASKAAAEMLTMINKKSEVIYVKAENVSEFRHDNEFIKVREINDHHHAKDAYLNIVVGNVYNEKFTKNPYNFIKDGGRKYSLNKVFDFAFSKGGKTIWDPLTSMDTVKKMMKSNDVRVTKRSFVKKGALYKETICKASVTKNGSYFPLKMSDERLLDLKKYGGYSSIRIAFFTIISYDEISKKNKKNIVKVVPIPIYISESTESFNDIEKYIKHNIIEDSKKRRENFKVIYKKLLINTVIDVNGFRYYVTGSKPDEIHIKSATQLLLEEEITMLIGKIVKFCNSNYLRKNSKYITEENTLKVYEYLIKKLDSSYYRNKRFSKNVCKLKEQTTKDNFKKLSLEEQCSVLLEILNILVDANEYNLNKLGFSMNKSTISTNITTNESFKVINQSITGLFENEIDILG

SEQ ID NO: 17109 - protein, 1258 aa, unidentified
  REGION 1..1258: note = Cas Enzyme sequence
MATTLGLDLGIASIGWCLFDDDEKGNPRKIIDIGSFVFDQIENPKSGQTENILRREKRLMRRQRRRKVRRLEDGRTLFQKTFGLDFFKVVNERHSPETPFDLKVKGLTEKLTPEEIMVALYHYLKYRGYKSNRKVDTGKDPDDKKLLSNISSLRKEISDRNASGEKIFASGLLLEKLKAKPKEEQRLHNTSNEFHLTVARDMYIDEITALLDRQIVFGVIGEDFKKEYLGLFQRQRDFSEGPDPSSKYHVSFANLIGTCVFDGKKRVGKDSYSAKQFVLLSALNNLMFKLDPSDAHYQRLSPEQIKILENFCLDKSEVKYSALFKKLDLVPFRIKGLALSRKQYKTAMAKFYEEHPEAKGGQGNGDPSTYEALSDFMQKKTLDVTFFKNSEIVYSLRRNLCARENLSEADAKLISENSFYDEIATILLTCKTDARIFDECSKRGYHTWIIDEVTKIKSVSKTIDLSLDLCRRLAAPLEHGLTYDKAMAEIGYDHSTISHSRLIGRIPDLDTALKETKQRLTNPVVRHTLVQLRNLLNAIADTYGIPTHFAIELNRDLKRNFEDRKEIRNAQMDNQANNLRLKATLLDKFPNHFKSVFDLSKKNNDLLRYKLFDQQGGVSPYTNKIIREDDIFDDNLFQIDHILPYSRSFDDSFNNKVLVETKENQNKGDQTPFEYFKDLAPLKAYLSTHYLPREKVSRLLAKDIDSDFLDKDFEDSSYIAILAKNLITYFMLPEGEQCRTIAGSMTEKLRDLWHVSGKTHSFISSSSLHYSRKFIEEYEYRSFEANEVGGPSLVFDFAFRKSGNFEVQIKKASATGDKPLTKDQTDFNNALKEFIAQQGYFKERFSLALNQTLRGLEESISYESVNPESSIRRQAGIYILGRVIDEVERDITAKDRSNDLHHAVDAAVIGCITPKIVKHLTQFYQKNERAIEYATGEVKLSLDEPYPYFADEVLARVYERDETKLLSLLNDLPMYQENPAIEKTVHVLWPARSTEKDITGAISNETIFGFDKSSGMLTSKIAVAKLTKETLEKIMDKDGGNHAVYLACLDWLKKAGEKDRPPFPRLAKKGTLVRKVRILTGRTPSGIVDLSNDRYADNSDVVRVNVYRKNEGNKRFYFVPITYYQISRDKIRRRQFEEVKQGKRKAESVLSEPLYSLMWSQGDAGSCQITDDDLRKNYTLIACLPRHSLVEIERNGKKALCYTGGASSGMFEVYSLLGDNADLYYNGLTDSLRDRNLLTISTISALKVRSISVLGKIS

SEQ ID NO: 17110 - protein, 1253 aa, unidentified
  REGION 1..1253: note = Cas Enzyme sequence
MQRTLGLDLGIASVGWCLFDDDAEGNPIRVRDIGSFVFDQIENPKSGITENIERRQKRLLRRQRRRRVRRLADARALFQEEFHLDFFSVLAGEKQHISPFDIKKKGLTEKLTPEELTIALYHYLKYRGYKSNRKIDGGDEGDKKILSGISSIRNQIDARRKSGESLYITQYLVEQMAARPKEAQRIHNTASDFFLTVSRDMYLEEINALLDRQIAFGVIDQSFKTRYIDLFTRQRDFSEGPDASSKYHVSIEDKIGLCAFDGQKRAPKDSLTSSRFVLLSSLNNLSYKTNAEEGYRRFTPSQIVELEKMALEKKETTYASLFAKIGVVPFRIKGLALSRKEYRSVFAKFCTDEKISNGNISSEQYEELNRLLIEKTFGKAFFKNSELVYGLRKAILSLRESKKTAFNDDEQFYDDVAVILLLNKTDARIQKACQEKGYPSEVEAEILKQKNVAKTIELSLPIARLLIPLLEEGNTYDKAMAQIGYNHSQSQHAEKIGFMPDIDTALKNAGLRLTNPVVKHTLVQLRNILNAISEKYGCPDHFSIELARELGKNFLDRKDIRNTQLDNQENNIEIKTKMLEKYPNHFHTIFDISKKRQDVLRYKLYLEQRGMSPYTNHPIAESDLFDDNLYQIDHILPYSKSFDDSYNNKVLVETKENQNKKNQLPLEYLADEKPLRDFLTATPSLPREKVARLLAKDISDDFTAKDFEDSSYIATLAKNLITYYFLPENASCFCTSGRITEKLRQLWGLAGKTHSFRSSYEKGYSAKFMSDYAFDSFEENEKENGLTFHFIYREKEPFDVVISKRSAPKGRILSTEDERLNRSLDLFGENAAYFRDRFHLVYHQAFRELYSAIHYESVNENSSERREAGEVVLGAVLNEITKDINLKDRSNDLHHALDAAIIGCVSHKIILRLTKFFQTHENLVDPTTGEIDPKIRLDPPYRDFASEVLARVYERDQAKLLTILNSLVPYQDEPATFQSAHVLLPTRTPEKNISGAISKETIFGKDEKTGQIIKRVPVGKLAKASDLDGLIDKDGGNKAVYDACVAWLAMPKSTRPPFPRLAKKGSLVRSVRILQPTSASKEVDLSNGRYADNSSNIRVNVYQKKDGDPRLYFVPIYYYQLTREKIRKEQIAKVQAGKLAPEKVLPEAQYSLMWSQAEDGTAQISQSDLNEHYKLVACMPRYSLIEIHMGSRSCLCYSGGASSGKLEVYSVLGDDFDLHAASIVGEKAERNRITVSTISSLKLRSISVLGRVS

SEQ ID NO: 17111 - protein, 1360 aa, unidentified
  REGION 1..1360: note = Cas Enzyme sequence
MNMPTKGKFGEYYLGLDIGTDSVGWAVTDRNYEILRFRGKAMWGTHLFESGKTAEKRRAHRTARRRLERRKRRLDLLRDLFEEEIARVDPLFFERLDESNFVSEDRRHKQHNSLFNDPSFDDKCLFKKYPTIYHLRKDMRVTKEKPDIRLVYLACHHIIKYRGHFLFENISNGEIPNFGPLLNNAMDTLNDICGTDVSVDNIFGEIKAILLDKNLGVKEKTTKLNEIISDGDGSKGVREFVNLISGGTCKLKEIFDPEGNNEDFEDEKLKFSETDWDVMRPELEDKVSEGIILLDLAKQIYDWAILKKLLGNSTDISSVKIDEYDQHKKDLKFLKGVIRKYLGDKRYDEVFKNKSLKSNYVSYSKRTKDGRTSNDKVSEDSESCAEAKSCTQDAFCKFLKKTLEATLANPIFESGDYKDMKVRILEGSFMPKQTSKENSVIPNILHLKELRDILTNCSKWYPFFEAVDESGRAVKEKIELLCNFRVPYYIGPLSPNAGHRWMVRKGEGRILPWNFEDLVDEEKSSEGFMNNLIGTCTYIPGERVLPKNSILYSRFALYNEINSISINNKRVSMELKKEIVKDLFESNNGSKKVTKKRLESYLKSKGLFHNEDEIKGIDDSVKSNLKSEYQLREILGSKYKTTLAEDIIRSTVVFGESRKRLKDKLRLDHSEALSKDEIEKLSMLQFSGWGRLSEKFLMGIKATVDGREMNILTALEQTNLNLNEILFRYDFMKQIDAIKEKVFGASNGKISYDLVKDLYVSPVVRRGIWRSLRIIDDILSVTGHPPAKVFIETTREKQQSKRTLSRKTKLAGLYKACKEEEWLNQINGEEEWKLRGDKLFSYYCQHGQCMYCGAKIELNDLGDANKYDLDHIIPKSKKADDSIHNNVVLVCKVCNERKSDIYPISPEIQQKMRPTWDSLLKLKFIEKEKYARLIRPSPLSEEELSGFIARQLVETSQSVKAVAETLKRVFGEKSEIVYVKGKSVSDFRNNNGFVKCRSVNDYHHAKDAYLNIIVGNVYNVRFTSNPINFVKSKEKYTLNIERIFENDVERSGERAWTAGEAGSIAVVRKHMRRNNILFTRFAYKARGQFFDVNPLKKGSGQHPLKTHGGKIGSGEMDINKYGGYNKVAGSYYSLTEHTLIKERVRSLESVQMMMGDNNVTDKELEESFVSDGLVDPKIVFRNVRMNSMLELDGFRVHIRGRTGDNIEYICAEQLILPIETYNYCKKLYNYSERSKGLKTPPLAEHFKLTAEDNLKTYDVLVEKFQSNKYKSLLGRFYPMLRNKRDSVFIGLTPENQAIVLNEILNGFQCAPTKMNLKLLGESGQTGMIRINKKISALGSVKLISQSPSGIFETEIDLKTI

SEQ ID NO: 17112 - protein, 1369 aa, unidentified
  REGION 1..1369: note = Cas Enzyme sequence
MKNAQNKNYYLSLDIGTDSVGYAATDENYNLLKFHGEPVWGATVFDAASLNTDRRAFRTARRRLDRRQQRIDLLQQLFAKEIGKIDPRFFIRMEESTLYPEDKSDKYTLFNDIGFKDKDYHDKYPTIHHLIDDLMKSNKPHDVRLVYLACAWLVAHRGHFLLNFRAETAKDITDFSKTYADFLNYFENNGGLPWDKNVDQDKLAEILKKECTPKQKYKELFKLVCNDQESSADSEETPFFKKEGILKLLAGDNCKPSDLFYEENSNELETEISLKSDEETEFNEGDNIITALRKLYYWAPLTKILNGKNSISEAKTEIYDQHKKDLAFLKHVVKTYIPEQYDEVFRRTDKDNYVAYSHHTDEPHEKKWHKDKEKFSKFILGIIKEIEPNEADKAQFEEMKERLQFQKFMPKQKDGDNCTIPQQLYFLELKKILKNASEYLPFLNETDEDGISIKEKIESIFRFRIPYFVGPLNKNSDKAWFKRNDNMEKEKIYPWNFNKIVDLEASERAFIDKMRNKCTYLPWERVIPKDSLAYHKFEVLNEINNLKINGEKISVELKQEIYNEVFMKHSKVTRKKIEDFLIGKTLLERDNRSALTGIDITIKSDLMPQHAFKRLMDSKTLAENEVEEIIKRSTYAEDKSRLSKWLEKEFPQINDEDRKHICNIKIKDFGRLSHKFLCELQGMNKETGEPCTILSALWETNYNLQEIVESDKFTFKKEIKKLRDEHYSDKKPTLENLLDEMYISNAVKRPIYRALDIVSDVTKVFGKPTKIFIETTRGGTKKEKGNRTKSRRTQILESYEICREEAENLREELERLRQQERIEHLSQQLMQKSDNELQSDKLFFYFMQLGRCMYSNREINIDDPITLEQYDIDHIFPQSYVKDDSIDNRVLVAKEINQHVKQNKYPVPAEIRNRMTQIWKGLKKNKLISDEKFYRLTRSTPFSDDEKLGFINRQLVVTSQAVKAIKTLLEKSGTEIVCCKASLVSEFRHEFDLLKSRLFNDLHHAVDAYLNIVVGNVYSMKFSKNFDVNSDYSVKIKTLFTRPLICNGKTVWDGDKMLAKVKKTAVRNTAHFTQFAFFRKSGEKKGLFDQQLYPKEKGLVPRKKNLTTEKYGGYDGATIMFFIPVKYKIEKKHDIMIMPVELLHGKHFLEDKDFAQQYSFSRLEQILSKKVYEISFPLGMRPWKVNTVLSLDGFRICIAGSAGGGKCLIAQPIMQFSANKSWQFYLKKLEMFDEKCSKNKTYIYSEEHDKISVEKNIELYDLYIKKLKSSIYSKRINAPTETLEKGREKFISLGIKEQAKTLLNIHQVFGRMNRGCDLKEIGGSSNTAATKSFSSNLSNWNYKDVRIIDSSASGLWEKESKNLLELLKV

SEQ ID NO: 17113 - protein, 956 aa, unidentified
  REGION 1..956: note = Cas Enzyme sequence
LVASLLQRQGFLPPGPPDHRDPSWKAVLAMDPYELRGRALETRLEPWEFGRVMYHLAHRRGFAGSGRGADDSETGVIQEQIEKTAREMQKVNARTLGEFLAQLDPRERRRRGWHTAREWYRTEFEAIVQAQQRMGLNLDPDWVKRLRRAIFFQRPLRTSPRAVGRCGLVPGRLRAAWGLLEAQRFRYLQKLNDLRVLLPDGQVRPLTPQERELVRGELERSERLTFDRLRRLLSSCDPSESVGVPSTGKAGNCDEDPGARSTSDFSRQKAGLAFNLECGGQDCLPGNTTAARIRSAIGQKWDQASEDVRRAMVELLLGVKDRKLRARLALRRKEWALSDLEAERLAQVNLEPGRCRFSSAALRRLVPHLEAGCALTEAIAREFPEHEARFRTEADPPPETPVTNPLVRRALAETRRVVNAIVRTWGLPGRIHIELARELRKPLRRLRELLRRNEERQRQRKHAIKYLIEKGIQDPRPDQIEKFLLWVECKQICPYTGQSISDVDLFGPLPRFDVEHIIPWSRCLDDSFANKTLCEVDHNRNRKRNRMPTEVYSQDELSQILRRVRAFQGPYRFEKLRRFQMTEADLTTETGWLLRGDQLQATAHAARLAGRLLGRWYPAEERLSRIQITNGAVTSWLRVAWGLNQLLGVADEKNRSDHRHHLVDATVIALTTAATVKALTEAARRSARPRRFVDMPVPPGLVDSLRQQLETVIVSHRVDRRVQGPLHEETFYGRIQTPPTGESRTVVRKRIDALSATEAQRIVDPRVRELVAQVCNGRAPKEVFRDPSLIPEVPFGSRKVRIRHVRIWVSENPISLKDGDPRLVLPGSNHHLEIFDCREGPRPGWGGVGVRRWEAMRRLRAGKPVVRRFDEHGCPLVCSLARGETVRLNLPGGPVIAVVQKLSQDDYNFRLHTDGRRAADIPASERIRIRSSKALKKCLGCKLVVDVLGRCHVSRD

SEQ ID NO: 17114 - protein, 1073 aa, unidentified
  REGION 1..1073: note = Cas Enzyme sequence
MQQKPQRYILGLDLGIASVGWACVWADENEHPIGLLDCGVRMFERAEVPKTGDSLALARRRAHRLLRLRRLLKREGVLLSADFDENGLVRGLPIDAWALRVAGLDRKLNNKEWAAVLLHLVKHRGYLSQRKNETQSKDKELGRLLAGVNGNREALQNRSDEYRTAAELAVKKFAAENNGSLCNKGGDYSHTFDRKDLQRELHLLFARQRALGNPFTSSEMEAAVDELLMKQRSALQGEAVLKMLGRCTFEPSEYKAAKNTYSAERFVWLTKLNNLRIQYNGEERALSEAERRLLLDEPYQKAKLTYKQVRTILELPESAVFKGLRYGHGEDGLKAESGTLMEMKAYHAVRKALKDAGLEGEWENRIRNPELLDAIGIAFSLYKTDEDIRANLAAFRLPENVLEALLAGLNFDKFVQLSLKSLAKILPLMEQGMRYDEACKAAYGDHYGAKEQENHRLLPPFVADDIRNPVVFRTLTQARKIVNEIVRRYGSPLRVHIETGREVGKSFSDRKEIEKRQEENRKERERAAAHFKELFPNFAGEPKAQDILKLRLYEQQHGKCLYSGKKIDLRRLPEKGYVEIDHALPFSRTWDDSFNNKVLVLGKENQDKRNHTPYEYLDGKGNSETWRAFAERVSGCRFPYAKKQRLLTQKLDEKTEQGFLERNLNDTRYVARFLCQFIEEKMHLEGAGKKRVFASNGQITALLRGFWGLKKVREENDRHHALDAVVVACSSVSMQQKITRHFRYREELEHIDRETGEVIHGFPQPWEFFRQEVMTRVFSDDPVSELAEKLDSRPEAVHEFVTPLFVSRAPHRKVTGQGHKATISSAKRWDEEKISVIKLVLKPTKPGKGLKTKDIERIVGYPNREPALYEALTARLAAFNDDPAKAFAEPFYKTGKDGKRGALVKAVRVENVQKSGLLVRKDESGKMQGVADNETMVRVDVFGKNGKNYLVPVYAWQVEKGEVPNRAVVAYADEEDWDEMDDSFEFKFSLYPNDLVEVVTKKDKFFGYYSGFNRATGAINIKEHDLSKSKVKNGVYEGIGVKTAQSFQKYQVDTLGKTIRLCKPEKRMGFKKK

SEQ ID NO: 17115 - protein, 1127 aa, unidentified
  REGION 1..1127: note = Cas Enzyme sequence
MSYVLGLDLGIASVGWSIVEPGKRIIDLGVRVFKKAETDKEGEPLNLIRRESRLSRRRLYRRAHRLNRLLNFLISSGLIHSKDEVLKNVYNENPWALRTLGLNSVLTNNQLARVIYHICKHRGFYWASSADDGEADKGKIKNSLSSNQKLMKEKCYKTVGQMIFSEYPNCQRNKSGEYSKSLPRTDLEIELREIFKAQQSFSNPIVTKDFISAILGSGDRKTGFLWEQRPALQGADLLKMVGHCRFEKDELRAPAANFYAEQLVWLTRINNLRVYDEDSQERPLTREERDLILNMPLEMKSDIKYSSLTSAFEKANLWKAGQFKYKSVDYEQKTQKKKKSAEPSDITKSSKKNPEDKVFYKSSHLHKIRKALGSSLSEEWEKIRTEVLSGKYERYNRIAYVLTVYKEDSDVIEQLSPYESRTLIEALLPVRFSGFVALSEKSLKKIIPHMFLGKRYDEACSEAHYKQNQSEGKKSKYLPHLFSGREPNGTLIFNEEIGDIPRNPVVLRVINQTRKVVNAIVKKYGSPESVHIELARDLAKSRAERNEIKKRNEEAASRRIKEREEFEKHYGAEKPNGTNLLKYRLYKEQDCKSMYSGKEIDHKRLFEKGYVQIDHILPYSRSYDDSQSNKVLVLTNENQDKGNRIPFEYFETKQQGFSWYEFEQWVKSCKNINQKKKRNLLRRTLSNDAKKDFLERNLNDTRYACRFVKNYIDRFLCLSENSDNSGCVVVAGQLTAYLRNCWGLNKVREENDRHHALDATVIACCTRKIVQKVGVWSKSREMNSYNSSYVDPDLPVDEDEMLLQKLYVNKRKPDFPKPWNCFRNEVESRVFESDLEKLKEELKQQCSYTESDLKNVRTLFVSRACEKIGKGALHGDTVYRQTSEMRKENVAVKKVSLKKLKYARIGAIVDADTRNKNLCDALKKRYEEYSSITGKDVSKIDKKDLSKIFSDDKPMHMPNSEGQEDPCNPIVKSVRVKEACSGVPIRNGVAENSTIVRVDIFKKKGQYYFVPIYSWNKSLPNRACQGKNKSDWVVVDDSYEWCFSVRTNDLLKIVIKGKTYFDYYITLDVHSDGRIRLLNHDRQEDDVHYEKGEFRILIKNADSINKYNVDVLGNYYLAKPEKRLELA

SEQ ID NO: 17116 - protein, 1149 aa, unidentified
  REGION 1..1149: note = Cas Enzyme sequence
MEPIMREENMADKSLGPLTFGFDIGIASVGWCVLGENRIVDLGVRCFDKAETAKEGESLNLARRSARLMRRRLRRRAWRLTKLARLLKRTGLIADVNEIRQPPCASPWQLRAHGLDRLLSNDEWAHVVYHLCKHRGFHWISRAEEKKAEGDAKGEGGRVKKGLSDTQRRMTEKGYRSAAEMVLAEFPDAQRNKQGDYGKALSRVLLSEELGLLFRRQRELGNSHAGTELEAAILGSGDRKSGLFWEQKPPLAGADLLKMLGKCTFERREYRAPKASFTAERHVWLTRLNNLRIVVDGTTRALNEAERRIALPLPYKQAGDFTYKQLRAALTKAGLVPNSVKFAGLAYPTGRQLDEAKPKDPEAEKLVRLNAWQELRKTLKDKGLETEWEGMAGAATGGDPTLLDEVARVLSVFKDDDETIAELRKLPLPGGQPMIDALSEISFDKFHALSLKALRKIVPHMEVGLRYDEACAAAGYHHSQLHEVGGGEHKYLPPFYSRRDKDGRMVFNEELDVPRNPVVLRALNQARKVLNALVRTYGSPAAVHIEMARDLSRPLTGHWTDNGKYIEGRRDIEAKQREYRERNDKDKAAFATEYGIAAKSREFEKFQLYREQQGKCAYSLMPLDLHRVLHDIGYAEVDHALPYSRSYDDGKNNKVLVLTEENRNKGNRTAYEYLTSFPGGENGERWRNFVGYVESNKSYRLAKRTRLLRKDFGGKAAEEFRERNLNDTRYICRFFKNYIERFLLLDAKVGADDTATKRCVVLSGQTTSFLRARWGLLKVRSDSDRHHALDAGVVAACSHGMVKRLADYARTKELAKVRQGFPDPETGEIVDTAMFQQLHAHFPDPWPHFRAELEARLHIDDAEELRSRMAMYGTYPAEALEALRPLFVSRAPQRRNGGAAHKDTVYAQPEYLKDQGGVTQKVPVTSLKLADLGEVGKEEDTCRLVDWHRNKRLYEAIRARLETHAGKGDKAFPADNPLRKPDRDGNPTGPVVRTVTMVIDKLSGIPVRGGIAKNDSMLRVDVFRNTNDGKFHLVPVYVHHAVAPELPSRAVVGKKDESQWTLMDDSYAFQFSLYPNDLIQLHVGQESVLGYFSGVNINDAGVKYFPPDQRGIEQLRKKGVSSATVFQKFHVDVLGNIYPAPPEPRRGLA

SEQ ID NO: 17117 - protein, 1041 aa, unidentified
  REGION 1..1041: note = Cas Enzyme sequence
MQLEKLPYTLGLDIGIASVGWCVLGENRIIDLGVRCFDKAETAKEGDSLNLVRRSARLMRRRLRRRAWRLTKLTRLLKRHGVIDDIRFFQPQHPFQHSLWQLRAEGLNRLLNVEEWARVIYHLCKHRGFHWISRAEEKQAEADSKGEGGKVKKGLADTKKRMEEKGYRSTAEMVLAEFPDAQRNKQGDYGKALSRALLGDELALLFRRQREFGNSQATVQLETAILGSGDRKSGLFWEQKPPLAGSDLLKMLGKCTFEKEEYRAPKASFTAERHVWLTRLNNLRIVVDGATRGLNETERRTTLPLPYKQAGDFTYKQLRAALVKAGLLPDAFKFAGLSYPTATQQAEGKAKDPESEKLVRFPAWQELRKTLKDKGLEIEWESMAGAATGGNPDVLDSIAWVLSVFKDDEEVAAELRRLTLPGGETMIDAMLDIRFDKFHSLSLKALRKIVPHMETGLRYDEACAEAGYHHSQLRKAGEGKHKTLPPLYAGRDKDGRMVFNENLDVPRNPVVLRALNQARKVLNALVRLYGSPTAVHIEMARDLSRPLDERNKVKKAQDEYRERNDKDKAAFEAEFNMQAKSREFEKFQLYREQQGKCAYSLEPLDLHRVLHDIGYAEVDHALPYSRSYDDSKNNKVLVLARENRNKGNSTPYEYLDGAKDSERWRQFAIYVESNKSYRLAKRSRLLRRDFAGKAAEEFRERNLNDTRYICRFFKNYVEDYLKLAEGSEAKRCVVLSGQMTAFLRARWGLVKLRGESDRHHALDAAVVAACSHGMVKRLSDYARRRELEKVREGFVDVETGEIVNPAMFQQLHEHFPDPWPHFRNELDARLHLDDPSELRARIAALATYPQEALESLRPLFVSRAPQRRNSGAAHKDTIYAQPARLKAEGSVTQKVPLTSLTLNDLGKLIDPHRNEKLYAAIRTRLAAHGDKGEKAFPSNDPLRKPDRDGNATGPVVRAVTVVIDKLSGIPVRGGIAKNDSMLRVDVFRHKKDGKFHLVPIYVHHTIAKELPNRAVVAFKDEKDWTLIDEGFDFWVFRNSCG

SEQ ID NO: 17118 - protein, 1079 aa, unidentified
  REGION 1..1079: note = Cas Enzyme sequence
ETAKEGESLNLARRSARLMRRRLFRRAWRLKKLTRLLKREGLIADAKLFKPEQPFATSLWQMRVDGLDRRLSNEEWARVIYHLCKHRGFHWISRAEAKQAEGNSKSEGGKVKQGLAGTARLMDEKGYRSAAEMVLAEFPDAQRNKQGEYRKALSRELLAKELALLFAKQRKFGNPHTSSELELAILGNGDQKSGLFWQQKPALAGADLLKMLSTCTFEKGEYRAPKASFTAERHVWLTRLNNLRIVTDGATRQLTEQERLLALPLPYRQAGDLTYKQLGAALTQAGLLEAGSFNFIGLAYPTEAQKAEGKAKDPESATLVKIPAWHELRKTLTNNGVGLDDEWKKLSGDALCGQPEIFDKIAWVLSVYKDDDEVRAELAKLALPNPQAMTEALLNIRFDKFHALSLKALRAIVPHMEQGLRYDEACVQAGYHHSQLHKVGEGEHKYLPPLYDGRDSDGRMIFAEDADIPRNPVVLRSLNQARKVVNAIIRRYGSPSAVHIEMARDLSRPFDERNKIKKDQDEYQARNQRDREQFIELFGHPPKGLEFEKWRLYREQNGQCAYSQRPLTPSGNVAEIFLDGSTEIDHALPYSRSFDDSKNNKVLVLTRENRDKGNRTPYEYLGGAENSERWQRFVSFVESNKAYRLAKRTRLLRKDFGAKEAEEFRERNLNDTRYVCRFFKNYVEQHLKLAEGSEAKRCVVVSGQLTNFLRARWGLLKVRADSDRHHALDAAVVAACSHSMVQRLSNYSRTRELEQVRDGFVDIETGEIVSPAMHQQLREHFPDPWPYFRHELEARLKIDSPELLREEMARLGSYTEEELATLKPLFVSRAPQRRNGGAAHKDTIYGQPEKLKKNGSVTQKVTLASLTLKDIDLLADPHRNAKLYGAIRERLEAHGGKGDKAFPTANPLRKPDKEGNPTGPIVRTVTKVIDKLSGIPVRGGIAKNDSMLRVDVFTKGGKFHLVPVYVHHRVTGLPDRAIVAFKDEEEWTPIDGSFDWCFSLYPNDLVQVKLKNECYQGYYAGSDRATGAIGLWAHDRNANVGKDGLMRLGVKTASSVEKFHVDTLGNIYPAPSEKRRGLA

SEQ ID NO: 17119 - protein, 973 aa, unidentified
  REGION 1..973: note = Cas Enzyme sequence
EGGKVKQGLAGTARLMDEKGYRSAAEMVLAEFPDAQRNKQGEYRKALSRELLAKELALLFAKQRKFGNPHTSSELELAILGNGDQKSGLFWQQKPALAGADLLKMLSTCTFEKGEYRAPKASFTAERHVWLTRLNNLRIVTDGATRQLTEQERLLALPLPYRQAGDLTYKQLGAALTQAGLLEAGSFNFIGLAYPTEAQKAEGKAKDPESATLVKIPAWHELRKTLTNNGVGLDDEWKKLSGDALCGQPEIFDKIAWVLSVYKDDDEVRAELAKLALPNPQAMTEALLNIRFDKFHALSLKALRAIVPHMEQGLRYDEACVQAGYHHSQLHKVGEGEHKYLPPLYDGRDSDGRMIFAEDADIPRNPVVLRSLNQARKVVNAIIRRYGSPSAVHIEMARDLSRPFDERNKIKKDQDEYQARNQRDREQFIELFGHPPKGLEFEKWRLYREQNGQCAYSQRPLTPSGNVAEIFLDGSTEIDHALPYSRSFDDSKNNKVLVLTRENRDKGNRTPYEYLGGAENSERWQRFVSFVESNKAYRLAKRTRLLRKDFGAKEAEEFRERNLNDTRYVCRFFKNYVEQHLKLAEGSEAKRCVVVSGQLTNFLRARWGLLKVRADSDRHHALDAAVVAACSHSMVQRLSNYSRTRELEQVRDGFVDIETGEIVSPAMHQQLREHFPDPWPYFRHELEARLKIDSPELLREEMARLGSYTEEELATLKPLFVSRAPQRRNGGAAHKDTIYGQPEKLKKNGSVTQKVTLASLTLKDIDLLADPHRNAKLYGAIRERLEAHGGKGDKAFPTANPLRKPDKEGNPTGPIVRTVTKVIDKLSGIPVRGGIAKNDSMLRVDVFTKGGKFHLVPVYVHHRVTGLPDRAIVAFKDEEEWTPIDGSFDWCFSLYPNDLVQVKLKNECYQGYYAGSDRATGAIGLWAHDRNANVGKDGLMRIGVKTASSVEKFHVDTLGNIYPAPPEKRRGLA

SEQ ID NO: 17120 - protein, 1116 aa, unidentified
  REGION 1..1116: note = Cas Enzyme sequence
MSATYTIGLDIGIASVGWCALGETHILDLGVRAFDKAETAKEGESLNLARRTARLMRRRLFRRAWRLKKLARLLKSEGLITDTKLFKPEQPFSASLWQLRVEGLDRHLNEEEWARVIYHLCKHRGFHWISRAEEKQAEGDGKGESGKVKQGLAGTTKLMAEKGYRSAAEMVLAEFPEAQRNKQGEYRKALSRVLLAKELALLFAQQRKLGNSYASSELETAVLGTGDRKSGLFWQQKPALAGIDLLKMLGTCTFEKGEYRAPKASFTAERHVWLTRLNNLRIVTDGVTRQLTEQERQLCLPLPYQQAGDLTYKQLGTALTKAGLQEAGNFKFAGLAYPTEAQKTEGKAKDPESSTLVKIPAWQELRQTLTKAGLDDEWKKISGDALCGQPEIFDQIAWVLSVYKDDDEVRDELSKLALPNPDALIDALLNIRFDKFHALSLKALRAIVPHMEKGLRYDEACVQAGYHHSQLHKVGEGEHKYLPPLYAGRDGNGRMIFADDADIPRNPVVLRSLNQARKVVNAIVRRYGSPAAVHIEMARDLSRPFDERNKIKKEQDEYQARNQRDREQFIELFGHPPKGQEFEKWRLYREQNGQCAYSQKPLASSGDVAEIFLDGSTEIDHALPYSRSFDDSKNNKVLVLTRENRDKGNRTPFEYLGGAENSERWQRFVSFVESNKAYRLAKRTRLLRKDFGSKEAEEFRERNLNDTRYICRFFKNYVERYLKLADGSEAKRCVVVSGQLTSFLRARWGLLKVRADSDRHHALDATVVAACSHSMVKRLSDYSRTRELEQVRDGFVDIETGEIVNPAMHQQLREHFPDPWPYFRHELEARLKIDSPELLREEMSRLGSYSEEELAALKPLFVSRAPQRRNGGAAHKDTIYGQPEKMKENGSVTQKVPLSNLTLKDLDSLVDPHRNVKLYAAIRERLETHGGKGEKAFPATNPLRKPDKDGNPTGPIVRTVTKMIDKLSGIPVRGGIAKNDSMLRVDVFTKAGKFHLVPVYVHHRVTGLPNRAIIAFKDEEEWTPIDESFQFLFTLHPNDLVRVIQKGKQPIWGYYSSCHRGTGNLNIWAHDRSNAIGKDGMQEGIGVKTALSLQKFHVDVLGNIYPAPPEKRRGLA

SEQ ID NO: 17121 - protein, 1121 aa, unidentified
  REGION 1..1121: note = Cas Enzyme sequence
MSNKEQQIMSETYTIGLDIGIASVGWCVLGETRIIDLGVRAFDKAETAKEGESLNLARRNARLMRRRLFRRAWRLKKLARLLKNEGLIADTKAFQPEHAFTHPLWQLRVDGLDRRLNDEEWARVIYHLCKHRGFHWISRAEAKQAEGDSKSEGGKVKQGLAGTAKLMAEKGYRSAAEMVLGEFPEAQRNKQGEYTKALARELLAKELALLFEKQRELGNPHASNTLEAAILGNGDKKSGLFWLQKPALAGADLLKMLGTCTFEKGEYRAPKASFTAERHVWLTRLNNLRIVTDGVTRQLTEQERQLCLPLPYQQAGDLTYKQLGTALTKAGLLEAGSFKFTGLAYPTEAQKAEGKAKDPESATLVKIPAWHELRKTLTNPEVSLNEEWKKLSGDALCGQPDIFDQIAWVLSVYKDDDEVRAELAKLPLPNRDELIDALLNIRFDKFHALSLKALRAIVPHMEKGLRYDEACVEAGYHHSQLHKAGEGAHKYLPPLYAGRDKDGCMRFAEDADIPRNPVVLRSLNQARKVVNAIIRRYGSPAAVHIEMARDLSRPFDERNKIKKEQDEYQSRNQRDREMFIEQFGQPPKGGEFEKFRLYREQLGKCPYSLEAIDLERLLEPGYVEIDHALPYSRSFDDSKNNKVLVFANENRNKGNYTPYEYLNGAANSERWQRFSAFVESTKSYRLAKRTRLLRKDFGTKEAEEFRARNLNDTRYICRFFKSYVEQHLKLAEGSEAKRCVVVSGQLTNFLRARWGLLKVRSDSDRHHALDAAVVAACSHGMVQRLSNYSRTRELEQVRDGFVDIETGEIVNPAMHQQLREHFPDPWPYFRHELEARLKIDSPELLREEMARLGSYSEEELAALKPLFVSRAPQRRNGGAAHKDTIYGQPEKFKEKGSVSQKVPLSSLMLKDLDSLADPHRNIKLYGAIRERLEAHGGKGDKAFPASNPLRKPDKDGNPTGPIVRTVTKVIDKLSGIPVRGGIAKNDTMLRVDVFTKAGKFHLVPVYVHHRVTGLPNRAIVAFKDEEEWTLIDESFEWCFSLYPNDLVQIRLKKESFLGYYTGTDRSTGAVSLWAHDRNQTVGKDGLMRGIGVKTAVSVEKFHVDTLGNIYPAPPEKRRGLA

SEQ ID NO: 17122 - protein, 1115 aa, unidentified
  REGION 1..1115: note = Cas Enzyme sequence
MKNILSLDLGITSVGYSILKQLDTDKYSLVDYGVSMFDKPYDEKNNSKKILHSEVTSFKKLNDLKKERKRNLALLFEEFGLGDKDYFLYQEKQNVYKNKWHIRAKKAFCERLKVEELFTILYSIAKRRGYKSLETSDLLEELCKELEIPFEEDKKTKNNEEKGKIKSALKRVEELKERYPQKTVAAIIYEEELKNPTPVFRNHDNYRYMIRREDINDEIKKIVLAQKEFGLFDKDFDVDKFIKRLIKTIDDQKESTNNKDLLANCEFYKEHKVAHQYSLITDIFKMYQAVSNITFNSKPEIKITKEQIKLIADDFFKKVRKGKKIDSIKFKDVRKILNLPDDIKIFNKEDFSVKNGKKQDNYIIKFHFVNNLSKIDNTFILKAFEKENPYEELKEIFDTLGFEKSPKIIYENLKNKIDNKTIVELIKNKTGSSTRISSYAMVKFIPYFEQGYTLDDIKKELGLIRNEDYSKFQKGIKYLSVSQFENDDSLLINNHPVKSIVSAALRVTKHLHVKHGPFDEIKVESARELSQNEETRKAIDKANKELEKQIDNIMENEEYQEIAQRYGRNLRKYARKILMWLEQDKLDIYTGKNIGISEIFSNTVDIDHIVPQSLGGLSVKHNLVLTHKDSNLKKSNQLPINFVEDKNAFENRVEHLFRERKINWKKKVNLLATTFDETFKDTFESKELRATSYVEALTAQVLKRYYPFPNEKKQKDGSAVRHIQGRATSNIRKLLHVKTKVRDTNIHHAVDAILIGLTNQSWLQKLSNTFRENFGKIDDEARANIKKATPLIDGIEPSELIGMIEKGYNKFGKESVFYEDIWGKTKTVYFWVSKKPMVSKIHKDTIYAKKENGIYTVREKIIDKFVSLKVSSKTKVDEFYKKFKKEILYKMYLHEINQNDVIYKTVQKRGDEIAEMLKRLDANDKEALAEAKDELNNLIHKPLIDNNGNEIRRVQFYQTNLTGFEIRGGLATKAKTFIGFKAKLKDGKFKYERIDMSNIQRIKKKKDTGFKVYKNDVVFFTYPDGSCKGGRIVSFLDEKNLVAFSNPRFPGSIAYQPEEFLTFFNGKPNSHKQHSIKKAIGIIKLNLDITGNIKSYRTIGSCESEFLEFLKSIKS

SEQ ID NO: 17123 - protein, 1414 aa, unidentified
  REGION 1..1414: note = Cas Enzyme sequence
MNRNKQVLMDRANVCDSTNKTMEQLYNIALDIGTSSVGWCVTDMNGKLMKFKRRNMWGARLFDKGQTAETRRLKRSLRRRYARRRQRIILLQNLLGDMVNQKDKNFFVRLNESFLWKCDKTEKSDYLLFADKDYTDKEYYKKYPTIYHLRKHLIESNEKADPRMVYLAIHNIIKHRGHFLYQGQKFEEVSDLSDIINELSDCLKCNFEGAEFKIEKEVIEKVEEIFNEKTKEGVNNEHKKSKAEKCEDLEKILVDNKWDKKISKEIAKACLGYKFNVGTVIGESELKGEDGKSIKIQFDDSKYEEKILELAEKINDKIEIINILQNVYSWIVMEDILSGYKYISDAMVDKYERHNKQLNMLKRLFRKYLSRDDYLEFFRKEKGKEKDEEKDKDKNKEKYIINYVNYIKRNKRCANTKGTARENLYNEIKGKFKGMAENDAEYQLILQEMDNDEFLLKQKDVNNSNIPYQINLIELEKIIDNQGKYYPVLLENREKIIKLLTFRIPYYIGPVNPRKNDNKFAWVKKKEGHETETVNPWNLEEIVDIDVTAERFIDNMTGFCTYLPEEKVLPKNSLIYQEYKVLNELNKIKVNDKGLDIKTRNDIIEGVFKKQKNINEKTLKTYLLSINYLGAKIIEEYKIEGYQGDKQFANSMGSYIDFKKILGSVDVRNLDMIEEIVYWLTVFEEKSIVKRKMIQKYSDKLSEKQLSRILDLKYDGWGRFSKKFLTGIYGDYYGEKKTIMDVLKEDNKLPNLMQIINKKEFGFNEIIEKNRIKLDEGEVLKDAIDKIHCSPEVRRGIWQSMKLVEEVIEIENGVLPQNIYIEFARSEEDKKRTKKRKNKLEAAYKVLKKEIDVYNEKVLKELGEYKEKLDDEKVYLYFLQNGQCMYTKQELNLNGYLKDCEIDHIIPQSVYDEDSLDNKVLVLKGANQEKGNRIPYDYIKEKNKVNWESMKIWWEKLYKCGLMSEKKYKRLTTQNIGEIINSGFIKRQLTVTSQMIKNVANLITDYYGGKVNVMAVRAAFSTKIRKTYSELVKGSDGNYIEKNDGDCFIKNRFLNDFHHAHDAYLASIIGKYLNTVYPKMADEINYNKYIKYYNEQCKKNRKQKFNFILSKFDKIFERDGEIVWNGVEQIKYLKNILNYRDCIITHKLEENTGSFYDENRLPKNDKSEKLIPIKEGLPVERYGGYQGGEAAYCCLVSYVKKKKQQLELVKIPVMTAKKIYDGKTTLENYLKEKMGLDDIHIIRKKIMKYQLIEEDGCRYYLVSAEELANAKQLVLGSKNVRFNRILNIIEDNRYNGYSPEYIQRGLDDFYEFLIGKIQKEFGRSSSVAKEIYDTKVFYELESAKDKGDFIMEILKLTNIGSDYPYLKKYKKYNKISSSLIDRKGRSKYQGYKIKPGTVLIDQSVTGLYERRLEL

SEQ ID NO: 17124 - protein, 1075 aa, unidentified
  REGION 1..1075: note = Cas Enzyme sequence
REDIILGLDIGIGSVGWAAVQANNDGSFSPVYLPSSNGDSQYALGVRAFDIPENPKTKELLNVARREKRRQRVTIRRRRKRMQKVRNLLVKHGLLRSDDPQQTHYPYRRERPQHDPWQLRQEGLQRMLRNEELAVILIHIAKHRGFKSNSKKDKSLGGGTETGKMLSAVSSLEARIAESGAETVGEYMAGLDRKRNRRGFDDKAVYDNTILRDLLAKEANILFERQRSFGQNNASDALLTSFKEIAFRQEPLKSVEGLIGSCLFEPGEKRAPKHAYTSEKFRLVQRLTVIRLRYPEGRSERIASLKVKELAGTLGTSKGITYKALRNFLKLDSSVLFEGLDYGKKDKAGKEVDAEKSDIVTRTRACAEGSHTFYKVLGKNIYSGFVEKYTENGQRVIDAASRIISVNDDLQKISEELANLPLPEQEVRLLTEAVHEGRFSHFRGTMNLSLKAMQNILPHMIEEQDYAAGCEASGYDHAKTRPVNPDAIRNPVVRRILKEVRKQFRAVIRELGVIPGRVHIELLRDMGKSAEERNEIENSIKRRTAEKKQAREDFASLVHKRPEDISVTELMRYELWKEQGGKCAYWILWRHCGGGRHYTAGHMPEGSIALTSLLDEYNQVQIDHILPRSRTFDNSFHNLCLCSTAANQAKGNLTPWEWLGRDNPEAWHEYEAWIRSLRIKGLKKRNYTLKNLDQDREGRFHERNLTDSRYAARLVLAWFAEEYENLGVDDHDLEGCAINRFRSRPGQLTSILRQSWGVNGLKYDDMKQRVGDRHHALDALVVACCTESTLQKMTQLYKLMEHHQEKYRLTPQIPAPWDNFRNDAARMLRNVFVSRAERGNTKGALHEETLRQVRVEIDDNGNEREIVYERVAIKDLNENDLVRIKDAERNKWLIDILRAWIAAGKPKGTPPSSPKGDPIRKVRLRRGAFTSGIKVARGEGLAQADNAKMVRTDVFTKDGKYYLIPVYTSQIARGEAPNRAVVANKPESEWTLIDDTFSYLFSMTPNSYIVTEDRKGLIREGYFTSTDRTTAAITLRQANDHTKEIRSGTKTLKLFQKYRVDRLGRLYRVRKEVRP

SEQ ID NO: 17125 - protein, 1337 aa, unidentified
  REGION 1..1337: note = Cas Enzyme sequence
MKKDYVIGLDIGTNSVGWAVMTEDYQLVKKKMPIYGNTEKKKIKKNFWGVRLFEEGHTAEDRRLKRTARRRISRRRNRLRYLQAFFEEAMTALDENFFARLQESFLVPEDKKWHRHPIFAKLEDEVAYHETYPTIYHLRKKLADSSEQADLRLIYLALAHIVKYRGHFLIEGKLSTENISVKEQFQQFMIIYNQTFVNGESRLVSAPLPESVLIEEELTEKASRTKKSEKVLQQFPQEKANGLFGQFLKLMVGNKADFKKVFGLEEEAKITYASESYEEDLEGILAKVGDEYSDVFLAAKNVYDAVELSTILADSDKKSHAKLSSSMIVRFTEHQEDLKNFKRFIRENCPDEYDNLFKNEQKDGYAGYITHAGKVSQLKFYQYVKKIIQDIAGAEYFLEKIAQENFLRKQRTFDNGVIPHQIHLAELQAIIHRQAAYYPFLKENQEKIEQLVTFRIPYYVGPLSKGDANTFAWLKRQSEEPIRPWNLQETVDLDQSATAFIERMTNFDTYLPSEKVLPKHSLLYEKFMVFNELTKISYTDDRGIKANFSGKEKEKIFDYLFKTRRKVKKKDIIQFYRNEYNTEIVTLSGLEEDQFNASFSTYQDLLKCGLTRAELDHPDNAEKLEDIIKILTIFEDRQRIRTQLSTFKGQFSAEVLKKLERKHYTGWGRLSKKLINGIYDKESGKTILDYLIKDDGVSKHYNRNFMQLINDSQLSFKNAIQKAQSSEHEETLSETVNELAGSPAIKKGIYQSLKIVDELVAIMGYAPKRIVVEMARENQTTSTGKRRSIQRLKIVEKAMAEIGSNLLKEQPTTNEQLRDTRLFLYYMQNGKDMYTGDELSLHRLSHYDIDHIIPQSFMKDDSLDNLVLVGSTENRGKSDDVPSKEVVKDMKAYWEKLYAAGLISQRKFQRLTKGEQGGLTLEDKAHFIQRQLVETRQITKNVAGILDQRYNAKSKEKKVQIITLKASLTSQFRSIFGLYKVREVNDYHHGQDAYLNCVVATTLLKVYPNLAPEFVYGEYPKFQTFKENKATAKAIIYTNLLRFFTEDEPRFTKDGEILWSNSYLKTIKKELNYHQMNIVKKVEVQKGGFSKESIKPKGPSNKLIPVKNGLDPQKYGGFDSPIVAYTVLFTHEKGKKPLIKQEILGITIMEKTRFEQNPILFLEEKGFLRPRVLMKLPKYTLYQFPEGRRRLLASAKEAQKGNQMVLPEHLLTLLYHAKQCLLPNQSESLAYVEQHQPEFQEILERVVDFAEVHTLAKSKVQQIVKLFEANQTADVKEIAASFIQLMQFNAMGAPSTFKFFQKDIERARYTSIKEIFDATIIYQSTTGLYETRRKVVD

SEQ ID NO: 17126 - protein, 1408 aa, unidentified
  REGION 1..1408: note = Cas Enzyme sequence
MKTNKKIYKDNQYTLSIDPGLNNVGWALFDEENKKMVEMGVRKFEPAKEAKISRLKRSARRNNGRKKWRKQQLKQAFIDFNLIREDEFKNSQFYEFHPEQYKAAGVKNLMDLRCYALQNKVTYQELFQCIYNILKYRGNFLRDDIDFENGESLTEELLIQEITNFMIKSLQLDIDNLDKLKESISTMCNQNIDLKEIPYAEISDDKVSQKSIENVFKALKDQKFNPFMIEDDPILIDEEEGKSIIPEAKTKTIYMKSVQKCGDLSNRFEQLLNITDSYRLYKVLNGEKYICTAYKKKLDRVADYYSFKDSPEGCSKYSDIESAKIEEEITYITNNMNATKGKPEKYGYTRKNPRGPIHVIHNVLNRYPNGLLVKEAVDILRTQQNYYGKEVVSDEFIDVIRYILKARIPYYIGPLSETAKNQWCTKTGKFKYSYSYTIEHMDGVDEESSIKDWKDRMRGHCTYLPEAFALPKGSFVAETLLILNELNVLTAIDKNNNTYYLTTNDKIKVFDYLFLDENHCGDVKYKEICDLLDLEYFGPKNKKSQVKTFKQNYTLYKSITNICTALKLHSIIDLFSTEFQNNQLKTIEEIVLNLNLYDEKKHKYQALTKMGISDENSKKLSSLNSKKFYGLSEKFVLKTPLNKDGRCLLEILFEDNQPGYTNEMMTAITNACDMNGNPVSFIANKYEAAFKELEKNEELELNFNSLLEVMNKTGNGFQIPASRPVLRSINQMMKVIQAVYLYYGVPKRIVLEIPRDMSGKNTNHEMPAKHYKTMEALHQDIMKQCKDKDHPRKTCIDQKWNDLKDFELNQKNRVKLELYLRQNGMDMITGEKINLNELENYEIDHILPRGFGDDSMDDKILIRFVSNALKKDRTPLMWITDPTDPVINKSGKEITADQYINRVNELFDMKLISENKKKRLLLKDTEDLDRFINQNLVDTRYITREMIGILKAYNRVKGYPTKVIALKPAFTKNYSNAFDIYKNRDFGLQHHALDAAVLGITDIMLNRLFPNYESGRISTSFAKHHQMLADVGNDKKLKDSTKYVIRKMYEKVFGNSPLDYGSLVYVCKNTMPLYSQKSNRNWKGEKFPASRRLPYQKYDIKNGNIVGVYNDKSEENIGKQNSEVLRLFEINNKNHAFDSVNCVAYDIYRIPEKKNNKVIWKNIGIHIPKCIVDEDGTIQKDKYIKLIKKYYGFDDNLIDEKGDLITAYFKLRLYKNDLVGNTEKHEIRDLVLGSIADKKLELNKIDCFVYQKIAQKKASLFKMIIDNQGSSKYDIHNYKEYQECECKEEILRDMIFDNMNIKNQEFASLLYAKIINDKKLDLENINKICWILAYYQQFLNEITGKKEFNTGRGIGALKKDESINYFKLKTSPLGVRFNTEKNQWTGPVGYENAFKIIKKEAFTWKITV

SEQ ID NO: 17127 - protein, 1408 aa, unidentified
  REGION 1..1408: note = Cas Enzyme sequence
MKTNKKIYKDNQYTLSIDPGLNNVGWALFDEENKKMVEMGVRKFEPAKEAKISRLKRSARRNNGRKKWRKQQLKQAFIDFNLISEEEFKNSQFYEFHPEQYKVAGVKNLMDLRCYALQNKVTCQELFQCIYNILKYRGNFLRDDIDFENGESLTEELLIQEITNFMIKSLQLDIDNLDKLKESISTMCNQNIDVKEIPYAEISDDKVSQKSIENVFKALKDQKFNPFMIEDDPILIDEEEGKSIIPEAKTKTIYMKSVQKCSDLSNRFEQLLNITDSYRLYKVLSGEKYICTAYKKKLDRVSDYYSFKDSPEGCSKYSDIESSKIEEEIANITNNMNATKGKPEKYGYTRKNPRGPIHVIHNVLNRYPNGLLVKEAVDILRTQQNYYGKEVVSDEFIDVIRYILKARIPYYIGPLSDTAKNQWCTKTGKFKYSYSYTIEHMDGVDEESSIKVWKDRMRGHCTYLPEAFALPKGSFVAETLLILNELNVLTAIDKNNNTYYLTTNDKIKVFDYLFLDENHYGDVKYKEICDLLDLAYFGPKNQKSQVKTFKQNYTLYKSITSICTTLKLHSIIDLFSTKFQESQLKTIEEIVLNLNLYDEKKHKYQALIKMGISDENSKKLSSLNSKKFYGLSEKFVLKTPLNKDGRCLLEILFEDNQPGYTNEMMTAITNACDMNGNPVSFIANKYEAAFKELEKNEELELNFNSLLEVMNKTGNGFQIPASRPVLRSINQMMKVIQAVYLYYGVPKRIVLEIPRDMSGKNTNHEMPAKHYKTMEALHQDIMKQCKDKDHPRKTCIDQKWNDLKDFELNQKNRVKLELYLRQNGMDMITGEKINLNELENYEIDHILPRGFGDDSMDDKILIRFVSNALKKDRTPLMWITDPTDPVINKSGKEITADQYINRVNELFDMKLISENKKKRLLLKDTEDLDRFINQNLVDTRYITREMIGILKAYNRVKGYPTKVIALKPAFTKNYSNAFDIYKNRDFGLQHHALDAAVLGITDIMLNRLFPNYESGRISTSFAKHHQMLADVGNDKKLKDSTKYVIRKMYEKVFGNSPLDYGSLVYVCKNTMPLYSQKSNRNWKGEKFPASRRLPYQKYDIKNGNIVGVYDDKSEENIGKQNSEVLRLFEINNKNHAFDSVNCVAYDIYRIPEKKNNKVIWKNIGIHIPKCIVDEDGTIQKDKYIKLIKKYYGFDDNLIDEKGDLITAYFKLRLYKNDLVGNTEKHEIRDLVLGSIADKKLELNKIDCFVYQKIAQKKASLFKMIIDNQGSSKYDIHNYKEYQECECKEEILRDMIFDNMNIKNQEFASLLYAKIINDKKLDLENINKICWILAYYQQFLNEITGKKEFNTGRGIGALKKDESINYFKLKTSPLGVRFNTEKNQWTGPVGYENAFKIIKKEAFTWKITV

SEQ ID NO: 17128 - protein, 1408 aa, unidentified
  REGION 1..1408: note = Cas Enzyme sequence
MKTNKKIYKDNQYTLSIDPGLNNVGWALFNEENKKMVEMGVRKFEPAKEAKISRLKRSARRNNGRKKWRKQQLKQAFIDFNLIGEDEFKNSQFYEFHPEQYKAAGVKNLMDLRCYALQNKVTYQELFQCIYNILKYRGNFLRDDIDFENGESLTEELLIQEITNFMIKSLQLDIDNLDKLKESISTMCNQNIDLKEIPYAEISDDKVSQKSIENVFKALKDQKFNPFMIEDDPILIDEEEGKSIIPEAKTKTIYMKSVQKCGDLSNRFEQLLNITDSYRLYKVLNGEKYICTAYKKKLDRVADYYSFKDSPEGCSKYSDIESAKIEEEITYITNNMNATKGKPEKYGYTRKNPRGPIHVIHNVLNRYPNGLLVKEAVDILRTQQNYYGKEIVSDEFIDVIRYILKARIPYYIGPLSETAKNKWCTKTGNFKYSYDYTIEHMDGVDEESSIKDWKDRMRGHCTYLPEAFALPKGSFVAETLLILNELNVLSAIDKNNNTYYLTTNDKIKVFDYLFLDENHCGDVKYKEICDLLDLEYFGPKNKKSQVKTFKQNYTLYKSITNICTALKLHSIIDLFSTEFQNNQLKTIEEIVLNLNLYDEKKHKYQALTKMGISDENSKKLSALNSKKFYGLSEKFVLKTPLNKVGRNLLEILFEDNQPGYTNEMMTAITNACDMNGNPVSFIANKYEAAFKELEKNEELELNFNSLLEVMNKTGNGFQIPASRPVLRSINQMMKVIQAVYLYYGVPKRIVLEIPRDMSGKNTNHEMPAKHYKTMEALHQDIMKQCKDKDHPRKTCIDQKWNDLKDFELNQKNRVKLELYLRQNGMDMITGEKINLNELENYEIDHILPRGFGDDSMDDKILIRFVSNALKKDRTPLMWITDPTDPVINKSGKEITADQYINRVNELFDMKLISENKKKRLLLKDTEDLDRFINQNLVDTRYITREMIGILKAYNRVKGYPTKVIALKPAFTKNYSNAFDIYKNRDFGLQHHALDAAVLGITDIMLNRLFPNYESGRISTSFARHHQMLADVGNDKKLKDSTKYVIRKMYEKVFGNSPLDYGSLVYVCKNTMPLYSQKSNRNWKGEKFPASRRVPYQKYDIKNGNIVGVYDDKSEENIGKQNSEVLRLFEINNKNHAFDSVNCVAYDIYRIPEKKNNKVIWKNIGIHIPKCIVDEDGTIQKDKYIKLIKKYYGFDDNLIDEKGDLITAYFKLRLYKNDLVGNTEKHEIRDLVLGSIADKKLELNKIDCFEYQKIAQKKASLFKMIIDNQGSSKYDIHNYKEYQECECKEEILRDMIFDNMNIKNQEFASLLYAKIINDKKLDLENINKICWILAYYQQFLNEITGKKEFNTGRGIGALKKDENINYFKLKTSPLGVRFNTEKNQWTGPVGYENAFKIIKKEAFTWKITV

SEQ ID NO: 17129 - protein, 1408 aa, unidentified
  REGION 1..1408: note = Cas Enzyme sequence
MKTNKKIYKDNQYTLSIDPGLNNVGWALFDEENKKMVEMGVRKFEPAKEAKISRLKRSARRNNGRKKWRKQQLKQAFIDFNLISEEEFKNSQFYEFHPEQYKVAGVKNLMDLRCYALQNKVTCQELFQCIYNILKYRGNFLRDDIDFENGESLTEELLIQEITNFMIKSLQLDIDNLDKLKESISTMCNQNIDVKEIPYAEISDDKVSQKSIENVFKALKDQKFNPFMIEDDPILIDEEEGKSIIPEAKTKTIYMKSVQKCSDLSNRFEQLLNITDSYRLYKVLSGEKYICTAYKKKLDRVSDYYSFKDSPEGCSKYSDIESSKIEEEIANITNNMNATKGKPEKYGYTRKNPRGPIHVIHNVLNRYPNGLLVKEAVDILRTQQNYYGKEVVSDEFIDVIRYILKARIPYYIGPLSDMAKNQWCTKTGKFKYSYSYTIEHMDGVDEESSIKVWKDRMRGHCTYLPEAFALPKGSFVAETLLILNELNVLTAIDKNNNTYYLTTNDKIKVFDYLFLDENHYGDVKYKEICDLLDLAYFGPKNQKSQVKTFKQNYTLYKSITSICTTLKLHSIIDLFSTKFQESQLKTIEEIVLNLNLYDEKKHKYQALIKMGISDENSKKLSSLNSKKFYGLSEKFVLKTPLNKDGRCLLEILFEDNQPGYTNEMMTAITNACDMNGNPVSFIANKYEAAFKELEKNEELELNFNSLLEVMNKTGNGFQIPASRPVLRSINQMMKVIQAVYLYYGVPKRIVLEIPRDMSGKNTNHEMPAKHYKTMEALHQDIMKQCKDKDHPRKTCIDQKWNDLKDFELNQKNRVKLELYLRQNGMDMITGEKINLNELENYEIDHILPRGFGDDSMDDKILIRFVSNALKKDRTPLMWITDPTDPVINKSGKEITADQYINRVNELFDMKLISENKKKRLLLKDTEDLDRFINQNLVDTRYITREMIGILKAYNRVKGYPTKVIALKPAFTKNYSNAFDIYKNRDFGLQHHALDAAVLGITDIMLNRLFPNYESGRISTSFAKHHQMLADVGNDKKLKDSTKYVIRKMYEKVFGNSPLDYGSLVDVCKNTMPLYSQKSNRNWKGEKFPASRRLPYQKYDIKNGNIVGVYDDKSEENIGKQNSEVLRLFEINNKNHAFDSVNCVAYDIYRIPEKKNNKVIWKNIGIHIPKCIVDEDGTIQKDKYIKLIKKYYGFDDNLIDEKGDLITAYFKLRLYKNDLVGNTEKHEIRDLVLGSIADKKLELNKIDCFVYQKIAQKKASLFKMIIDNQGSSKYDIHNYKEYQECECKEEILRDMIFDNMNIKNQEFASLLYAKIINDKKLDLENINKICWILAYYQQFLNEITGKKEFNTGRGIGALKKDESINYFKLKTSPLGVRFNTEKNQWTGPVGYENAFKIIKKEAFTWKITV
